United States Patent Application Publication US 2004/0123343 A1 - sequence listing, part 9

SEQ ID NO: 23138 - DNA, 321 bp, Oryza sativa
  Clone ID: PAT_MRT4530_28247C.1
atgcctctctctcctcacgctccccccgccacgcggcagttgggcgagggcctcgggccgccgcagcgcgagggcccgaggggcctgacgccgcaccccgaggggcatgacctggcaccccgaggccccccggtcgcgcctgcgactcatggggcgtgggggcagggccaggctgtagagccacgtcgggaagcgggcgagggcgactacgacgggaggcacaggcggctgcggacggggtgcagacggctagtcggggaggtgatgaaccctgagttccactcgatactcaaggatgttgttggcccgatctttcggtga

SEQ ID NO: 23139 - DNA, 1674 bp, Oryza sativa
  Clone ID: PAT_MRT4530_28248C.1
atgcaggcagccaccaccaaatcccgccgaattgagcgccagtccaccagcggcaacagatggatggcggcggctgatgaggaagctaccaagcatgtggtagagcagagggaagagaggagcggggcgccagtgctccggtggctaggaggtggcgaggtcggtggccaaatgtgttctcgtgccgtcgcccccgtcggatgctgccgcagggttccgctgctgtcgccgctcccgctccgcgcgcgcggctgctgctgctactccgctgttgctggcactgctgctccgctgccgctactcctctatgctgctgtagttgctactgccgctactgcactgctgtgctgctgcagcagctgcgcggccaacgtgggccgcgcgctctggcgcggtgccggcaccggtggtggcggggagaggatggattggtggggaggaggcagcggcccgctgctatgggcggcccgctttggggacgtcggccacctgagcaatgctagcctggcgctgggcctgtcccttggcagcggccaaggaggaggaacgaccaacgcgacggcacaccatgaaaacctcgcacccgactatccaagcacagaggcccccgacacgagtacacgacacgccgtcatgcgccacgccgccgccgccgccgtgccgctggcgaccaccgtcgccatgctgtacgcccgcctcgccgcctccctgaccggccctggcccccgccgcctcgccgcgctcctcccggcgatggcactcctccccgtcctccctctcgccctcccgtactacagctaccgcggcttctccgccttcgtcttcgtctggctcggcgagttcaagctcctcctcctcgccttcggccacggcccgctccacccggcgctccgccctctcccgttcgtcttcactgccgcgctccccgtcaagctcgtcgacgccgccgcggcagcagcaggcgcgtcggcgtcgaggccaccgccagctgcacctgcagctacgttcaagttcgtcgtctcgtccgccatcaaggtcggcgccatggcggccatcgtccgcgtcctccacgccaaggaggagatgcaccgctacgcggcgttctccctcaacgccgtcttcatgtactgcttcctcgacgtcgtcctgccggccctcggcgcggcgggcgtggcgctgggcatggagatggagccgcagttcgaccggccgtacctgtcggcctcgctgcgggacttctggggccggcggtggaacctcgtggcgtcggcggtgctccgcgccgccgtctacgaccccgtcagggcgcgctccggcgacccggcggccggcgtgctcgccgcgttcctcgtgtcggggctgatgcacgaggtggtgatactctacctgacctcccgggctcccacggggcgcgtcacggcgttcttcgcgctccacggcgtgtgcgtctgcgccgagcggtggtggtgcgcgcgccagcacaagcgcgaggcgaggccgcagctgcctcgcgcggtggccgcgccgctcgtactgggtttcgtcgccggcacggcgttctggctgttcttcccggcgatctacggcggcgggatggacgacctgtacctcgcggagattgcagggtttgcaaaaggcctcggccttggcggaagctggacaggggaaaactaa

SEQ ID NO: 23140 - DNA, 808 bp, Oryza sativa
  Clone ID: PAT_MRT4530_28249C.1
aagatataatggcaacaccagcagcagtgtccactacctccatgtgccagccgatgcgacgaacagcggaggcgtggtagacggtggcgccggcgaggcggagaagtacctgtccacccgtggcgtggcggcagcggtgcttgagggtagtcaggtggcacctgagatattggcaagacaccgctccctccgccgaccgcttcctgcgctgccgccggatcgacgggagcagcatatcgccgtgccgaccgctccctgagccgccactccacctacgccgccgccggatcgacgtgacgggatgcgacgacgatggaggagccgcgtgggagaggagaaatcgagcagtggcgaacgagggctcagcccggcggcgtggcggacaagcgttcacggtgcagctgacggttgggcgcgccgtgcgacgaggaaggcgccgagcgcggcaaaggagtggggtcatcgcggagcgggcgcgtcgcagaccggcgttggtggcgcagccgacggtggggggtgcgggccatgcgacgaggcgaccccaccgtcggctgtcctcgtaattatagtagttcataattcgtcgaccgcggcggaggaatggaggagtggggtcggtgcggcagccgatgaggctccgaggcagtttctggcgcgcgtggcggatctgcggcgacggcgaatcatggggttcggcggtgaggcgcggttcctagcatgggggtgggacaacgaggcgacggggagggatgcaacgcaagggcgaaccggcgaaggcatgaatgcggcgtgcgggaggagcgcgtga

SEQ ID NO: 23141 - DNA, 363 bp, Oryza sativa
  Clone ID: PAT_MRT4530_2824C.1
ctaatcccttcgcttgtcgccgatgagcgcggcgacggagaaggggcggctggacggcgaggaggattcaccgcgcgcggaggcgttcctggagatcctcgccgggtccagtcgggggatgcggaagcggaggtcgcggagcaggtgctcaggtcccgcgtctgctactcccgtcccaagtccgccgtccgcttcttcgtctggtcggggcggtcggtgaatcacaccggctacgcctggaacctcctcgtcgacatcctcggcaaggccggcatggagtagcccatgtgggacgccgtccgccgtccgcaccatgaacaaggagggcagcggcctcgtcaccgtcgccaccttcgcctccat

SEQ ID NO: 23142 - DNA, 572 bp, Oryza sativa
  Clone ID: PAT_MRT4530_28250C.1
ccggccggacaaccacacacacaccaaccagcagcagcaagcaggttagctgcttaggagcaatagacaccggaggccagggtcgccggcgatcatgtggccggagaagatgagggcttgggcatccatggccgaggacccgctgaagcgcgcgtcggcggcatcgtcgtcgtcgacgagcccgctgcggcgctacagcccggccacgctcgccgccggcggcctcctcgtcggcgccgtcgcctacttcatgttcaaggggaagcagggccaaggaaggcaaggcgaccaaccggttcgccgtccttaactagaaggagatcgcttatatcacctagcttatctagtaatcgcttgaataataatctcctctccctttgcctagcggtcggcatccatgtataaaccactatctttgtgcttaggtttatgtatccgttttatccatgaactgtcaaagaacatgaacagaagtcctctctttcctgtcatcccttgtaacagtgtcatttcgatttcaactgaaaaatgcctgtggttaaatcttcacttgtatcaaaaaaaaaaaaaaa

SEQ ID NO: 23143 - DNA, 909 bp, Oryza sativa
  Clone ID: PAT_MRT4530_28251C.1
atggagaggttaatgatgaacatggtagtggtcgtccgagcaggaacacaaggcactcaagttcaggattaccgtccagtcaataccggcggctgcggctcgagcgccgacagcagcgagcgccgatgccggcggctgcggctcgcgcgccggcagcagcgggcgcctcctccgctgcttcggtgggagtcgtcggaaatcatatgtgggagcttcgacttggcggtggcgctgttcaacggcggcgagttccacgcgcgccacgatgtcgtggaggagctctggtacaccaccgacgagcccacccggacgctgccggctgctccacgcatcctccagtgcgccgtcggcttccaccacctcttcaaccaaaaccaccgtggtgccatgatggagctcggggaaagcctctgcaagctccgcaagctgcgtctcgacgacactacgagccccttctcccgcttcgagaaggaggtcaccgccgcgctcaacttcacctaccgcacacagaaggagctcgcggcatgcaccgacgatctctacctcaccatggatggctccgtgacctcccaccagctgcttggcaacttcgccgctgactagaagcgggagaaggagcggggcgaagcagcggtgattacttctgtaaccataaaccagaaccgccattatcctcgccaccaaacaagcaaccgaccaacaggtggcccaaccatcaaccctgctggccaagagaaacaagccgcgggtaaggacaaccgagctggctctaggaaaaggccaagaaaattgatcatcgatgatgatgatgaagactcgaatgaccagacaactggcccgactacttctgcccggaagaaactagggtattacattcattccttcattctcacttgtacttttacatag

SEQ ID NO: 23144 - DNA, 405 bp, Oryza sativa
  Clone ID: PAT_MRT4530_28252C.1
atggctctgggagccgagaacctggaggggacaatcgaccgctacattagccacacccaagaggcgcctgcaaacaagaagccccgtgaacttactgtaaaggaagatgcagggcgaaaacctggaatcatgctcgttgcaagaactgcatggcctggagatgcagatggagaagagcctaagcagcatccgtttacaaaaggcaagcaaatgcaaaagaagctgatggataagatttcacagctacaacaacaggagaagattctgtcggaggagaacgcactgctcctcgatcagggcaaggtgcaacatgctccaatcggggctccagcgcgcgagatgaatcagaaccagcatgtccaggatattgatgttgacactgagctggtcattggaagacggtga

SEQ ID NO: 23145 - DNA, 1040 bp, Oryza sativa
  Clone ID: PAT_MRT4530_28253C.1
ccggccgggaatttagcttttactattctaatcagcaactccaaccgatccactaattacacgtcagcttgcttagccgcgtcgcgctgctctgcttgatcatcatcaccttctccgatcgatcctcctcgacgccgcccacaaatataaatcccacacgcgtcctcctcctcctaataaactcctccaattcctcgacgaatcagttttctcctctgattttccaccacaagatctctagtttctttgatttcttgatcagacgacgatgggagggagcaaggatgagcagcaagacagggggctcttctccaacctgatgcacggcgtcgccggcggcggcggcggccatggctatccgtaccctcctcagcaggggtactacccgccgccgcccaccgcgtatcctcctcctcctccggcggggtacggcggcggctatggctaccctcctgcaggttaccccggctcgtccgcgccattccaacacggtaaccatggcggaggaaacatggggatgctagctgcaggtgcagccgctgccgcggcggcgtacggcgcgcacaagctttcccacggtcatggccatggaggctacggctacggtggccaccacggcggcctcttcggcggtcaccatggccaccacggcggcttgtttggaggccatcacggacaccacggcggcggcctcttcggcggccaccacggccaccatggcggcttgtttggcggtcaccacggcttcggtggccaccacggacaccatggccaccattgatggtgatcaccatatcgtgttgcacggcgtgttcaatcagtgcgagtgataagatgatcatgagttggtttgattatactactataaactcgatatgtgtatatagttttttctacttagtttgctactctagattgtatctgagacactgatatgagtgataatatggtttgatgattagtaaccgactgtcaataagtgttttaattaagtttttactgtgctgatacccccacgtttttaaaaaaaaaaaaaaaaa

SEQ ID NO: 23146 - DNA, 237 bp, Oryza sativa
  Clone ID: PAT_MRT4530_28254C.1
atggcggcgagctcgaacaaggggaaggagggctgcaacaccctcgcacacgtcgtggtcaaggaaggggcctactcaccgtcgtgctggcgatgttgcgcgaaggagcatgacgttcatggctcctaccatcatctccagctcctcttttcgtcgtccggacgcccattcgtctcgctggtcgccacctcaaggctcttgaccacagtgagagattgggaagagctgtgctactaa

SEQ ID NO: 23147 - DNA, 497 bp, Oryza sativa
  unsure (1)..(497): unsure at all n locations
  Clone ID: PAT_MRT4530_28255C.1
ggggcatcagtggaggcgtggtggcgccgggccggcaggggcggcggcggtggcgccgggccggccgccagatccggcaagggcaggaggggaggcgcggcggcgccgggctggaggaggcggcggcggcggcccggccgccagatccagcaggggtcgggaggggaggcgtggcggcggtggcctggccaccagatccggcaggggcggtaggggaggcgcggcggcgctggcccggccgccagatccggcagggtcgagatgaggcgcggtggcggacgacggatctggagcctagcgcggtggcggtcgacgttgggagtggaggcggcctgatccccacggctgtagttgtctccacctttgtcgtttctgacgtattggtgttggctctcgctgggctgtccctgccngtggtgatggcactggtgcttgttgtggcccacgcccnagcgttggtggtcgtggtgggggtgggggcggcggtttcccttccc

SEQ ID NO: 23148 - DNA, 3816 bp, Oryza sativa
  Clone ID: PAT_MRT4530_28256C.1
tcagtcttcgtcgaaagatgaagatagtaggtttcccatgtgatctaaaggaggatccgtccttgacctcatcggcacccactgtttctcctcgaaagtgacgatgggtttgttgatgttcttctcggcatcagccctcagagaggtagctatctcttccacattcacgatattgctgtgacaagcacgaatcgagacttccttcagactcggaaggaactctatgccagtgatctcttggatggaggcttcttcgaacagagacagctctagccttgctagctttggtagtgccccttcttcaaatcttgcctcccaatcttcagacatgtcgagatgaatgacaagcagtctaagagatgggaattcccctcgaaggttcatacttttcgtaaatattggtggactggataatgaattgacgctgccggagttcatcgcgccatcaggtcgccaaagtaataacgagcgaaggctgccgctgagcttctcaagagcagagatcaaggatgcccaggtgctgtcgtcatcaacaaacatcagtactccaagtttcctcaaccgggatagcttcgacaactcgctgatataatgtgatgtagaggtcgtgatttctacctgtgcaagtgttgtaagtgaatccatttttcgaagttcgttagggatatgtaaaccccagaactcagaaataggccaccgcccagtgtggttataggatcttcttcctccaagtaagtttgctaaatgtggaagattggttatgccaggaggcaaatgctttatggctgtgtcccttatatccagagtctccaacttcttcaggtttcctatttgtgcagggagttccgtaatatgtgttcttctcagattaaggtattccaattgaaacagcctgcacaagtctttgagatctctatttctcaggaattcgtagccagcgccggcccaagtcctcgcgggatgccaccaccgacgctgcaatatccgtcgctgacgacaacagctgaagacgccgacaaaccaggggaaggcgcccctgaacctgaagatggacccccaggtcacgaggcttcgccacctcaccgtcctgcagcgcctcgaccccttcgtcgcggacattctcctgatacaagtccatgtcacccacttcgacttcatcatcttcaacaacccgtggagacggatagatgtggaaggcttgcttttccacctgtagatgactcattacatgatggtccagttcatcggtatgcacatgcatatccctgataagcaggaagagcacctccttagtgtttatgtctaaaaacttcaaccacagtatttactgttccacaaatgctccccaagaagtaaatggtacgtgttttttaaatactaaggactgctaagatcttgtcgcagctttttgcatgactgcacatcctagagtacatttttcatcgtaaatcaacagggcctccctcgtccagtgggtgagtgattatttaggtgactttttcatataagtaaatagatcctcagcctctatgcacgaaagcgcagggacacatttataaacttgggacagagaaatggtgcattacttccatctgaacttttagatgttgtcatagcgagtgatatcatacacaaaccaccaaaaccaaatatagacaccacccgtaattgttgcacatgtgcctccaataaccagtgcacaagatttccctgacgtggttcaatgccaacaagctgccttctctctggaaagagtgcagtaatgcgagtatcaacatttaaaagattagcttggctatcatatgcagccatgctattcccagcagttccagagatgagatgattggcactataccttgaatttcgggcactgatattcatagtacgcctttttagttcttggatttgtttggcaatctgatgcctcactctggtggtctgcaatatgtgggtggccttgcggaaaaacactacagggccgctgccaccggcactactgctgtcaccaagttgatgtttgaactcatcaatacaatcctcgatatcatatgcaatctcacgcacatgcttcttccaaatcttaacttgcttgccgcattcatctctcccagaaaggtcctgaagaaaggctgtcatgctctccagttcatccttcaagtgttgcagttcaccccgaatacctcccagaagctgggcttcttggaggacgattgtgccgagctttcccaagagagtgtggatcgcaccttccgcggcactaacaacagcatgttccatctctgttagaagtccattcatcgctcttctcctcctatcccttgtggccatcctctcaccataagtcagaaagatgtccccaagatcaacatgccccacatccttcaacctccttccaacttcctcaaacatcgacaccccatcctcatttgaaaagtagtacaagaacttgttatagtcgaaccttggcacatccactccaccccacatagtcctctccacaaacttagttgcctccaatgtcctcccggccttcaccaacccaccaacaaagatgctctcaaagttcaccaatggatccctccccttccttcccctcttccccaagtgcccctgaagcagcataatgtatgtgtgcatgttcggctcgcaccccgtggcaaccatctctctgaaaacctccgtcgcttctcgagctcgcttgatcctgatcaatcccttcatcaacccatggtacagtgcaatgtccttctccttaacaccatgaaaaaccctgtatccttccctcaccctcctcctcaccagcagcccatacaccaaatcccccatcacctctccgtccacctccacacctctcttgaacatttcggcgaacaccatgtacgcgccccacatcctcccttccttgcacagccacgacaccactgcccggtagcacccgcctctgccaccgtctgaaactcccctcctccgcattccgtcgaacaccttcatggcgtccgcgacgcggttattcttgaacagcgtcaccacgatctcctcgtacgcggcggcgcccgggtcgagcccgcgcctctccatcccgttccacaccctgcacgcgtcagagagcatccccgcgcggcagtatccgacgaccagaagctcgcagcacctcccggtccgcgacacgccgtaccggtgctcggcctgcttgatcaccttctcggcgacgtcgggcagcttgcagacggagcaaacgacgtcggtgatgaagttgagcgtgcggggcctgtcggcgtccgggaagagggcgagcagggaggagaccttgccgacctcgcgggccggggcgaggccacggatggcggcgcggagggcggcaagggagcggagcgcaggcgggaaggagagcagggtggagtggagcaggtcgacgttgcgggacttggcgaggacgtcgaggaagcgcgcggcggtggccggggagtgcgcgaagccgtgggcggcggtgaggtggtcgaggaggcggcgcacggggcgccaggagagcgggaaccgcgcggaggcctggaggaagagctcgcggaggtcgtcggccgcggcggaggggagcggcagcgcggagaggcgccgccgcagcgcgtcctccggggcgtgctggtgctggtagagcaccgtgcagaggcggagcagcagcgacgggtcggtggggcgccccggcgcgggggcgggggcgggagcggcggcagcttccgcggcggtggagaggaggaggcggcggcggcggcgggagagtgggaggaggaggaggaagcggggcagcggcggcaacggcat

SEQ ID NO: 23149 - DNA, 3759 bp, Oryza sativa
  Clone ID: PAT_MRT4530_28257C.1
ctatccttgcccggagccgtcgccgccgatgaagctgagcggtgcggagttgtcgttgcctacactcgtcatccgcagctgcgcccgcctgcccgtgcccgggaacgctcctagttagcctcgttttcttttttttttttttttttttttttagagtagcaaccatggaaagagatgttgcacttatcaacatgtagtacagtaacaaccatcatcaaatgtccctacaactccgtctctctcatgctcgaagaatataataatctcattgattgaaacacgtataggaaaatttaagcggcaattaaggaagtaatagtatagttgtagcagtagaagagtacagcaacacacgttaattaatcacgcgagagcgatggatggatcggccggtaaggtctcggtctcgacctcacacgaggcggcggcagatggtgatgccgtcggcgatggcgagctggcagacgtcgatgcgcgggtcggcggcgagcctggagttgaggtccctgatggcgacggagaacctccggtccaggtccgacagcggcgtgtccggcggcagcgccaccgtgccggcccacagcgtgttgtcgtacacgatgtgcccgccgacgcgcaccagctgcagcagctgctcgtggtacttgacgtagttgggcttgtccgcgtccacgaacgcgaagtcgaacgccgcctcgcgccccgccgccgcctcctcggcgagcagctcgtccagcttctccagccccttcccctcgcggaagtccaccttgtgcgccaccccggccttctccaagaacggccgcccgatctcgtagctctccctgtccgggtcgatcgccaccaccttcccgtcccccgggcggccgccagcgccgtcgcgaagcaaccgaagaggccgtgaagccacccacctcgactatgaacccctatctgtgctcgctcgtgatgaggcggagctcgcgcatgaactcgttctcccgcgggcacaccatcgtgttcagcatgtactcgtggagggattcactcttgaggagggtcttggggctatcgttgctgtggatggccgtcttcatctccttggactgaatctgaatgccgccgttggcgccatggctggcatcgccgttcgccgccgccatggccgtgcttgatactcttgacgccggtgtcgttcgcttcagccgcctagagtgtgcagtgccgcttgcccgaccccgccgtcctccatatcgcacgccggacgtggcatcaaataatcgacgaaatcatcgttgaacgggggttgtcggaatcgagcaaggtcgtagtaacgaaaattttcagttcgtttggtctcgtggaaaggagatcgagggaggatgacgaactctttatcccggcacgcagggtggccgacggtgcgcttgtcacaggggccacggacggtgagaggggcgcaggggcgggccacgttccgcgggccagcgcttgcggtaaattgcttctcccgtccctcccacgcgacgcctcccgctcccgtgccggcaaccgatgggtggtcgtgccacactgccgcctgcaactgcaaggtgggggacactgcgcacaaccgcacccgtcgtgggctcgtgatggtcagcctggttgggggtgggcgggtgcggttggagttggagaacatgccgctgtcgacgccgacgccccttccccatccagcctgccttgcttgccatgtcacgaggcggcggcagatggtgatgccgtcggcgatggcgagctggcagacgtcgatgcgcgggtcggcggcgagcctggagttgaggtccctgatggcgacggagaacctccggtccaggtccgacagcggcgtgtccggcggcagcgccaccgtgccggcccacagcgtgttgtcgtacacgatgtgcccgccgacgcgcaccagctgcagcagctgctcgtggtacttgacgtagttgggcttgtccgcgtccacgaacgcgaagtcgaacgccgcctcgcgccccgccgccgcctcctcggcgagcagctcgtccagcttctccagccccttcccctcgcggaagtccaccttgtgcgccaccccggccttctccaagaacggccgcccgatctcgtagctctccctgtccgggtcgatcgccaccaccttcccgtcctccggcagcgccagcgccgtcgccagcagcgagtagccggtgaagacacccacctcgattgtcctcttcgctccggccatcttcagcagcatccccagcagctgcgcctcatccgccgacgactgcatgaacccccactggtgcttgtccgtgatgaggcgcagatcgcgcatgcactccggctcccgtggcagcaccgtcgtgtccaggacatacttgtacagggcgtcgctcttgagcagcgtcttgttggtgctgtcgatgtcgctgtgggcgttcttgatcaccggtgcgtcgccattgccggtcgtcatggcgatgagatcttcctccgtttgagctgttgctgcttgagctgctggtggtggtgcgagtcgattgggatggacggatctagtaggcgcttccattgatttgggcacagtgaattttctggtggcgaatgggcggcggcgggctagctcctgctccggcgtcggcgaggagggccgtcgccccgtggcatctgcctcctccggctccgggtctggctcgtcccgcgcgtcaccgaagaagttggcgtcgatgcggtcgtcggtggcgccgtcctcgtcgttgtcgccgtctccccacgagcagttgcggcgggagccgccgcggcggcggatgcggaggcggcggcagagggtgatgccgtcggagaccgggagctgcacggcctccacgcgcgggtcgccggcgatcttggcgttgaaggccacgatggagcggcggatgtcctggtcgaactcctccagcacggagtcgtcctccagcgccacggacccgccccagagcgtgttgtcgtaggccagcacgccgccggcgcgcaccagccgcagcagccgctcgtggtactcgccgtagttccccttgtcggcgtccacgaacgcgaagtcgaacttcccctcgttctcctcgttggcgaggaggttgtcgaggatgggcatggcggcgccctcgcggaagtcgaccttgtgggcgacgccggccttcttgatgacggggaggccgaggtcgaagtactcccggctgacgtcgatggcgacgaccttgccgtcgtccgggatggcgagcgcggtggcgagcacggagcagccggtgaacacgcccacctcgatggtgttcttggcgcctgtcaggttcagcagcagcgacagcagctgcccttcctccggcggcgacgacatgaacccataggtgtgctcgctggtgatgaggcggagctcgcgcatgaactcgttctcccgcgggtacaccatcgtgttcagcatgtactcgtggagggattcactcttgaggagggtcttggggctatcgttgctgtggatggccgtcttcatctccttggactgaatctgaatgccgccgttggcgccatggctggcatcgccgttcgccgccgccatggccgtgcttgatactcttgacgccggtgtcgttcgcttcagccgcctagagtgtgcagtgcagtacacagggagaagtgttcccgccccggccatatgctcctcggtgacagcttcaccagcgacggaggacaagcaaaggtagcatggagagggaggctattcccggccgg

SEQ ID NO: 23150 - DNA, 294 bp, Oryza sativa
  Clone ID: PAT_MRT4530_28258C.1
atgggccgaccggcccgagaaggcggcccaaggcacgcgcgggaggggaggagagagggagccggtgggccgggctcacctcgcgtggtcccgagtgggacccgcttgtcggtgacacagttcaccgtgcggagggagcacgcagcgcgcactagggtttgggggagggacgcggtgcacgcgcgcgactcgcggtgggtgcggttgcggcgggcccacgcgcagcctcacggctcgcggtggaccgcgtgcacgagcggggcggaggggagcggcggaccggggtcagcttga

SEQ ID NO: 23151 - DNA, 318 bp, Oryza sativa
  Clone ID: PAT_MRT4530_28259C.1
atgggccggcttccccttcccctcctccctctttgggccgccggcccagcccttttgctcctccctcgccgagaagtctataatgcctccttcctctcaattcaaatattttttagggcaggtaccacagtaattttgatgactgcaaaatatcctaacaaagaacatgtggcatatgctacttttatgagtagtaatccaagagagaaagtgggtggtgttgagatagattcaaaagatcaatggttaaatgatcatgattcagtggcctactcaagatctaatcaagaagcatgggaattcatagagattggatag

SEQ ID NO: 23152 - DNA, 649 bp, Oryza sativa
  unsure (1)..(649): unsure at all n locations
  Clone ID: PAT_MRT4530_2825C.1
gaaaaatattcctgtactccttggtttgctgagtgtgtggaatgtttcatttctcggatatccagctagagcaatactgccctattcccaagcacttgagnaatttgcaccngatattcagcagcttagcatggagagtaatggaaagggtgtctccattgatggtgttcaactgccctttgagagtggtgaaattgattttggtgaacctggaaccaatgggcaacacagcttctatcaattaatccatcagggaagagttattccttgtgatttttatcggtgtccgtaaaaagccagcaacctgtttacttgaaaggggaaattttgagcaatcattgncgganttgaatgtcccattttcttttgctcagcctgatggngtttgcttatgggaaagcntcctgaccaanggcttggcgggnaaggtnccgnaccanttatcccnctnaggcntttnagggnancgnccntnggttnggttnttgttgccnantanctgntgtgnggtngacantttggccttnggggaccggttnnggccagggttccgtgggnaaannntttgcctggggggggntggaattnttncnnaggggaatttntgtncnggtaggagcttctgggtnngtggctanngttttngngn

SEQ ID NO: 23153 - DNA, 713 bp, Oryza sativa
  Clone ID: PAT_MRT4530_28260C.1
ggcctaacatgaatatctttttttgtgatatgctctcaaaatttcagaggagtagccgggaccatgacagtgatcaacaaattggagcaagtagtgaccagcaactcattgatcacctaagagcatatcttgaggataaacgtctgaaagatcctcaggataaagggtaccttgttgtcatagatgatatttggagtaccacggcatggaaaacaatacagtgtgctcttcccacaactatccatgcaagcaggataataataacaacacgcatcaacaacatagctgaatcttgttgcactccatgtaaaggctttgtttataaaatggaaccccttagcagacagaactctgaaattttgttcgtgaaaaggatatttggtgccaacagtacatgcccaagtcagctgaaggagatcatgaatgagatactagataaatgtgatggtttgccactggccattgtcacattagcaagcatgttggctaataatcgaaggaaggaagaatgggaaagagtgttgaagtctataggttccacaaatgagaaatatggagagtgggataccatacataagatattatccctgagttacaatgacttggctttttatttaccgcctttgttattggaccttactacatttccagaagatatgaaaatgataaaacccgcttgatatggagttggatacgtggaggggttcatatac

SEQ ID NO: 23154 - DNA, 2511 bp, Oryza sativa
  Clone ID: PAT_MRT4530_28261C.1
atgtggcatgagcctggggatagtcgaacggttgtcttcgccgcatacttcactgctggccttcgccttccatgcgatgacttcttaccttcagtgcttttgatgtatgaggtcaagcttccccagcttagcccgtcggcgttcccaaagctggcagtttttgcttggatgtgccggacttgtgggtttgtccctaccgccgagcttttcgccactttattcactgcatgcgcttcgaccaaagatgtgcagacaccggcgggtccaaggaaaaccatttttggctgcgtgaacttcatgcttcgactggagcgttcagatgcttggccagtgcccatatcgatggcgaaatgggataggaattggatgcagaaatggttctacgtcaacaacccctattcctccgaagatgctcaggcgaactggctaccttttgagcattctgctgtcaccatcaatgcgaagccaaccgtggagatcgatgggactctcgagtctcggctcattttccttcgcaaagttgcccgacggctcagcaccagggatctttgcgaggagttttgtctccttcgaatttcgcctctcgcccgcacgtgggatgtttccgtgaatgagggcgaagaagttcttgggcttccccgccttgttctccctgcaggggccgagatgcggactttggaagacgctgaatttgaggcgtcgaagatgatcggtactctgactagagccgagttcacccgcttgcttcagcgccaagccgacggccgagtgaatcgtgtctttgctggcgaattaccgagccgattgaaaccctctcaggtcggcgatgatgaggctggcacttcgagaaaacgcaagcgtgcgatcgtgaaaggcggccaaatccgaacttgccgtagcacgaaggccgtcgtcgaaagtgatggggaggaggaggaagaggaggatgccgatgatatcgtcgtggcgaacacccttttggtgatttccagcacggccgtgaaaccgatgatggccgttagaaggaaaaagaagaaggggaaggttgtgcaggtttggcatggcttttcggacagtgaagggtccgacgggacccctacttcgccagtgctgcaacgcgcggcatcccgtggtagacgcatgtctccgccacctgctagtgatgccgaagcggcaacgggcgggagtgcttcagttccggccgctgggacgaacctagctgaaggcgaacggatcgttgtggtcccgtcacctattcgtcaacgagaggggaaggccccagcggttgaaggtagcatttcggacgtgacgcttaccgccccacacttcatccccgtcgacttcgccacgcggcctgaaatcactccgttcgtagatggggtgtgccaggtcatagcgccgaccgaaggccttgggctcttcaccgaactgaacgagttcggcgaaagttgcgcagctgtggaaagtctattcggccttgctgcgcatctaagcgccaagaagtctgccctagagcggcttgatgggtactgccttcgccttcggaagtccgaagaagatcttcggcacaaggaagacgagaggcgcgttgtggcagatactttgaaaaaggcaaatgctgaaaacaggtctctccgctttgatcttgaagcggcatgcgaacggaatgccgaacgagaccgtcagcttgcttcggccgaggagaagattaaatccctcgaagcctgcgttgcgtcggccgaagctactgccgcaactttggcaccagccactgagtccgccaaggaggcctgctatactctccgcctggcccttaatgatcttggggcgcgggcggaagatgctccgggcgaaggtgggactgcactcgatttttccgaatggacgcaggaggcggccggttcagttgtcgaagtggcaggtgcttacggggactgttgcgctcgcgtttcggcgggattcgttctcagcctcttgcacgcgcacggctgcgatcacatccaagaatttcccgattttgtgaaggaggaatggcctagcaacacgcagtactccggggctgcgttaagggcctttcggaaggggttttgggaggatggcggccgggattgcgcgaaggttcaaatttgcgagaaccttgagaggatcgtgaggaacgaggagggcgctgccgccaactccgaaaaggatgtccggccgtcgggacggtcccccgagcatgagggcgaaggcaacggaggccaagaccaccctgagggtgtttgccgaaagtcgtgcattcggcccccttctgggagctggcgaagtcaaaacgaggaatttgtggcattgaagggtctgccgaaggtgcgatgtccattccggcctgtttatcgcgaaatggagataaacggtcgcagctataaggtttttatggttgccggctggttgcgggcgcaccccgggcgaaccttagaagattacgattttgttcgtacaagacgtttggaggatatggctcgcttttggtga

SEQ ID NO: 23155 - DNA, 204 bp, Oryza sativa
  Clone ID: PAT_MRT4530_28262C.1
atggggcgagccagccgagcgcccgagccggcccccgcgcgggcgcggtgcgagcgggcaaaacgacacacgcaggccagcgggtggcgcgggccggggaggggaagcaggcagagaggcaggcagtgggcggcaggcggcagcgcgtaccacaggcggggcaggcgtgcaggccgcgtggtccgatattacatcaacacttag

SEQ ID NO: 23156 - DNA, 136 bp, Oryza sativa
  Clone ID: PAT_MRT4530_28263C.1
gaagaagctgaacataaattaacccaagatggagagagtttttagtaatgagtaaaggttcaataccctgaggtgcgcctgacactacagaggggtagttaacttatgctatatctgacgaaattgcccacaaagt

SEQ ID NO: 23157 - DNA, 456 bp, Oryza sativa
  Clone ID: PAT_MRT4530_28264C.1
atgaatattgtactcaccggtggcacaggcttcataggaaaagcattaacaaaagcacttctccaaacgaggcatcaattgacaattctcactcaccaaacgcaattaacctcaaattcaccaacagagactttttgtcaaaaaatgacagattggcatcacttaaatcacgttgatgccgtcattaatctaacaagtgaacctaattttgataagggttggacgaacaaacaaaaacaacaattattaaccaggcgcgtcgatttgactcatcaaatagttatttgatcaatgcggaggaaaatccaccgcatacttttatttcaggatcagcctgtggctattacggcaatttagcgaattccaaccatttctatgatgaatcaacccctgcaggcacgcactttagtgcaaagatttgtcttgaatgggaaaaagctgcattaaatgcgcaaa

SEQ ID NO: 23158 - DNA, 297 bp, Oryza sativa
  Clone ID: PAT_MRT4530_28265C.1
atggagatcgagagccagtcagtctaccgctgccattgcagtctgctgctggctgctgctggagtagcgctaacagcagtagaaggagaagattataccccgagaatggccctccgctggatggtgaggcagaattgcctccgttgttgtagtcgttcacagcacctcctcctggcgcaccagctccggatccagctcctgtcggcggcggcgtatcaccagctcctgagaaagaacgtggacgcgctgttgcagagggaatcgtgggaacgtgggttagtggctgcaaaaggatag

SEQ ID NO: 23159 - DNA, 246 bp, Oryza sativa
  Clone ID: PAT_MRT4530_28266C.1
gagccgagagagagagcaagggagaagccgagggagagaaagaagaaagaaagaaggagagaacccgggagggctatagagcccgagggaattgcggatccaagtgaaggccaagacccgcaagaatttgagcaaggcaaatcatcactattctttgaacatgttgatcccaattgcgaaattattttgtttacaaataaaattgtatgcaatgatgaacatcctatttgtgaatatgccatacct

SEQ ID NO: 23160 - DNA, 2978 bp, Oryza sativa
  unsure (1)..(2978): unsure at all n locations
  Clone ID: PAT_MRT4530_28267C.1
ggctaggaacagagagaggggggaaagcgaaacgtgcaagttcaaaatcactccccagtgtcccccgaataattccaccgtcgcctaaagccagtttcatcgggaacgcctcgaattttccgatccctangcgggcgggcgggggaggtggagtgcccgcggcgcggcgcggcggtggttagggtttggggctcgtcggcgtcggcgagggcggaggggggggggggaatggatccggagcagacgttcctgcgggtgcacgcgcggctgtccgggatgctgtcgcagctgctcacgccgcggatccgcctcgcgctcgagtacctctacctcgccggcgccgtcgcgctcttctgcctgctcgtcgtcatgcacaccaacttcgtgcagcagtgtgaacatatcgagatgaaaaagcatgagggtattgctaccctcacaactttgagttacctttttcatgtgaagcctggctgttcaagcgagttttctgggattgaatttggtgaagcgcaacttgtccaaatcaagataatcagtggtggactatgggtcagcaaaggtgcatcctacattatggatcttcagaacctggggcgttcagctgagaaaattctagaggttaatggtgataggttcaatattttggcatctaagttttggtcaacttgggttggtcctggagctagaaggagcaaaattatgttcagaacttggaagggagacaaggaatttgaaccacaaccagagaatgcagctgacacagctattaccgcaaccacttcaggagtatcggattcgaagacaactgtggagggttctgcataccatccattatccgcaaaagaatcatttaaagcagcagttatgtatttattcagaaagtggtactttcgtgttgtctcgttctggaggaatataaaacaactttcagataatacttttcaattaatgttcagatcaaactggaatgacttcctccataccatcaagggtattcaattaccaagcgtggatcatcttgtttcaacaatagtacagtggtttgagagacgaagcaaagcatttgaacctacctatttatatggtgtggagaagattcagagagttcctcccaaattggatgcgaaagctggggcctcaacatcactgctcccttcacctaatggtatggtggtgctgtcctcgccttccatgcctggttgtgtgctgtggggcaatgagatcgagaaagcatgtgcaaccgggggagcagttgcatgggaggtaggcgcagtgaagtggcgtgaaagaatggaagaggaaggagacaagttgaagaagatatggagggcccaatggtggcaacagcttttaatcaacagcattgttggctatgacactatacttacaaacagcttagtgaactcccctggtcatggctatttatacaactttcaaacaaaggagctttatgatctcagttacggacatgaaccaccagcaggtccaacaagatttggagattattttgtgacgaaatgtggtgtacttttaatgtcactctttgtttttttcacaaccaccatgtctgtttcatttaccctgagagagacgcaatcccgcatgcttaggttcacagtgcagcttcaacatcatgcacgccaccaactccccacatttcaactgatatttgtccatgttatcgaatcattggtttttgttccgataatgattgggatcctcttttttctatttgagttctatgatgatcagttgcttgcatttctagttttgactcttgtatggttgtgtgagctatttacgatgatcagtgtgaggacatctatatcaatgcagttcttcccgcgctttttcttgctgtatttcttggttttccacatttacttcttctcgtacacatatggcttctcctacctggccttttctgccaccgcggcgttcatgcaacatctaattttatatttttggaaccgcttcgaggtgccagcccttcagagattcattagaagccgagctcaccttcaccaacaaacgggtgttcagatcacatcctcaaccatctatacatcaacattacatatagcaagggtaaatatgagggaccctggcgcaatgaatgagggccttggtgctgctcgtgaagcagatgccctgctggttccggatgagcctaacaggaaccaacaagagggtcaaccaattgaaaatgcagagttagtggccaacaatcctctgcactatcaagatcaaaaccctcagcaacctggcaatgctccggcaggctctggctccttgaatccatttggttcccttttattgtggttgctaggaggcggagcttctgatggcatagtatctttcttctctatgtttagagatgtccgtgatcatggtcaagattacactgatccacctcgaaatgaaaatggtcaggtaacatagaaaatataggaaggaaaacagaagggaattgcagacgaagaacactggtggagggcggttgggcgaaagttgcctatgttattaagcaagctgatatgttgcccgctccaccatcaaaggataatgacgaatatgcattgcagacttgtgtcggctgaacataccgcgttaagctgcagaatctgttaatttcttttctttttcgttgttgagtaaggttgctgaattgtacctactcatgacatgtgtacattccctaccgtctgaatgggcaagcccggcctattcttgtacagaaatgttcttcagctcatctcattttgctttttctgttgaaatcttttgtaccctatataggttggaactgcaacatgcagtattgcaggcttgcgctgcgctcctgtgtgttctacaaaagaattgtgtagcttgtcaatgcacttttgtgctgacaaattatattcgatttggatttgttacaagacaaaaaaaaaaaaaaaaaaaaaaacctcgtgccgaattcctgcagcccg

SEQ ID NO: 23161 - DNA, 312 bp, Oryza sativa
  Clone ID: PAT_MRT4530_28268C.1
atggcgtgggcgaaaaacggggaggattgggagggggaaaaaggaagggagggcgcctgggtttatagggcggcaatgtcggtttggaaaccgaccttgggcggtcaaggcgcgagctggcgctcggcgctcgcggccaaaacggtgacagaggcggatgacgccggcggggaagagaaaaggaaaaaggaagggagaaaggggggcttaccccttgcctctttgggaaaaggagggagagagggcgatgaggaggagccctgcctcctttccttggaagcacgcgcggggagtggcggggccgagttgtga

SEQ ID NO: 23162 - DNA, 1107 bp, Oryza sativa
  Clone ID: PAT_MRT4530_28269C.1
atgccgtggctcgcgctccgcgacggcggcctgatcgacctcgacggcaaccccgtacgctgcccgcggcccatcctccgcgacggcgtcgtcagctttcaccccgtcggcggcggcaacctggtcttcctcgagcacgacgacggcggctgctccctgatgaaccctctctccgccgcctccggggacagggacgacccgcttctccctctccccgagctcgccgccgccgtgcgccgagcggttgactcgtgcgagacgcccactgtggcgacgtacaccccgaaaccatcgtatagcaccgtgatcatgtcgtcctctccggtggtggcggattcctcgtcatcgccgccggacaccctcgtcgctgccctaatcttgaacagatgcgccgtcgccatctccacctgcaagcgacacgacggcgccgccgcgtcgttctcgttcatggacgagaggagcaggatccgctcagtctggttgcgggcgacggccatctgcgccatcgccttcctccacgggaagctctacgccgtcaccagcaaagaaggcctccacgtcctcgatctcgacaacggcggcggcggcgagggcggcgcggtgctccgcccgtgcatcgccgacgaccccgagaagaagtcggtccacgtcgacgtggagaggcgcggccacctcgtcgtgcgctacgtggtggagtccggcgggcggctgctgatggtgcggtggtggaagagcctcccgccgccggtgtggagcgccgacaggccgccgagcaggttcgacgtcttggaggcggccgacggcctcggccggtggaaggcggtggacagcttgcgcgggcgagcgctgttcctcggcaaggcggactcgaggtccgtcgttgctggcggcggcggtggcggcgccggagctcgagaagattgcatctacttcatgcggaggagtttctggtatccgagcaaggaggaggatttcgggcagtccggcgtgtacgacatgaggagcggcgagatctcgccgccgcagctgccggagagagggacggcggagctgcgcctccactgcgagtatccgaggtggttttacccagcggattactcctattaa

SEQ ID NO: 23163 - DNA, 536 bp, Oryza sativa
  Clone ID: PAT_MRT4530_2826C.1
gcgactcatgcgcatacgtcagaacgaggtaggagtaatgtctcgtgcgtgaaatagacttgaagatgtgtgaacatctatctctgcttgggctctgcagggaagacagcgcctgacccagagtgatgctggcgactagcgcacaggccagaatgcgccgtgaatgggactgtgcatgaccctgctcaatgagtttgcgaggcaacaagcgtatgcagatgagcatactgtagcgagcacatgcactggctcctactgactagctgtctcaagaggacgcatacatgatggctggctatgatgtgcttggctccctgctttcattgccaggctatttgcaccatggtgcagtctatggtgcagcaagtgcaaggagatgctgtttttgacggcgagctgcaagctcatgcctatgctataggggctctaaatttgatctacatgtggggagtctacactaggtactgtggcactacatgcaaagttgctactggacattgctggtattggatgcgcgtaccatcatatgtatatag

SEQ ID NO: 23164 - DNA, 312 bp, Oryza sativa
  Clone ID: PAT_MRT4530_28270C.1
atggcttcacgacacttcatcatctgcttcaacgtgattgggggcaatgccacccatacccaatttacactgtcgacgtcattccggcatgacatcatctacttcaaccagattggaggccgcatcaccaagtcttccatttacatcgctgacgacatttcggcatgtctacaccaatcccaccgtccctctacattgtcgatggcttctcgacatgacatcatctactccggcaagatcgagggcaacttggcgccctcatcctactacggcgccgacggcatcccggcacgagtttgtctacttcactaa

SEQ ID NO: 23165 - DNA, 411 bp, Oryza sativa
  Clone ID: PAT_MRT4530_28271C.1
atgtcgctcgagcttcaacaagttttgcagcgctcaagctccgccttcgtagtgccgcctgcatttgagctcgaaatcaactttggcgggggtgcgaggtctccgatgctaagccgagaccgaatcgaggggaaggctacatgggagagcgtcagggttggggggctgggggcattgcgcaacatcccgccggcttcccagtccgggttcgcgcccccacgggccacggcgtcggcggcgatggtagcggcggcgttgaacaatggatggaagagaaagagaccaagcacctcctcggagcatctccttctccgaggattcagcgagcttcagttgtgtgaaatcgtccatgaatatgcattcccagtggacctctaccgctaccgctacaatgtagcatactgcaaatag

SEQ ID NO: 23166 - DNA, 2061 bp, Oryza sativa
  Clone ID: PAT_MRT4530_28272C.1
tgccctttttgttcagaatatataattgcaagggagagttaacaccaagaatcatctgaaaaatgtataagctgtagcacttatggtaccagctcatgtacatggattcacaagagacatccaactacagaaaagaaatatatgtatgctctgcatctgccacttctgttatgagggggttatttacatgtacatatcccctcctgcgactttaacctatagaagctaaattatctatatgatgagaaataagaatccatgtatgtagtgaaacaagtctggatgtaaatttagtagacttcaccggtgaaatctcccaagcgctcactctggtgtaggtccacagaagaactcactgatcattattattcgctatcgtcttctaacagttattattcggtccgcggtttcttcaaaacgtatgcaatctgtggcataccttgtcaattctgttcctatgatcaaatgaagctagcagcgagaagcttttcgttgattaccgcattttgctcgtcttctcttgacgtctccaagcctcgacccatacatttgcctctgcaagcgcacgctctctatcagcgccgttcggggtaactctgccccttcccggtcgatgcgaactgctccggcaattctccttgacttcttgtaccatgtgatccgtcccggcaagcggtggcatatgaactccatgttgactgggcaaggaagtgtcttggttaatctgattatccagcactcttggtacagaagggccaggcagggtatggcgagcagcagtgttctgactttcatgtgtttgtgatgctaaataagagagagcaacagcaacctccctaatggaagggcggttcttcgctttctcctgcagacacattgctgcaatagccaaagcctggaacagaccccttttcgggaagtggccgtgtaatgaggggtccgccatctttggaaatttcctttggtctttgaacaatggacgagcccatgcaaccaagtcttgttcatcaggtggccgattgctgtcaagcgctcttcgtccagtaattagctcaagaaagaccacaccaaaactataaatgtcagatttgatcgtaagctttccagtcgagaggtactcaggagcacaataaccatgtgtccccatgacacgagttgtcacatgagtcttatcaccaacaggaccaagtttagcaagtccaaagtcagacaactttgcattatacccttcgccaagaagaatgtttgacggtttaatatcccggtaaataactgctggaatggcctcatcatgcagatactccaaaccagcagctgcatcagcagcaatcttcatccgtgttgtccaatctagtggttcttggccgggtctgagatcgtgaaggcggtcttctagtgatcccaatggcatatattcataaataagcaggcgctgatctccatccacacagtaaccaaacaacttgactaaattaggatgatgcaagagactgagcatgagaacctccacaaggaattctctgtttccctgaagcccatttagatcaagctgtttaactgcaacaacctgtctatcattgagaaatgctttatacacactgccgaatcctcctcggcccaaaaggcactccgtgctgaagttgttggtagcatcagcaagctcgcgcaaagtgaagatcgttgcttcaccatgccccttatttcgccgaattccaaccatatctatcgacccttcagtcttcagtgggcaactctctgacgactttgaatattccactgagagcatatttagctccacaagaactgctacaagtgacactaaccaatcagcaccaaacatttctactgagctgactctctggccgcttcttggttcctcatcctcatctctcacctcttgaggacatgggaacaagcacgccaagaagcccatcgccccagcaggagatttcattccgcataggggcatcgaaggtcgcagcaaccatcaagaggagaacaaaaaatcgatttttttgttaggacagtcaaggaggaggaggagaagaaagaagcctgcag

SEQ ID NO: 23167 - DNA, 272 bp, Oryza sativa
  unsure (1)..(272): unsure at all n locations
  Clone ID: PAT_MRT4530_28273C.1
cgaggaagggggggaggacgcggccgtggccgtgtcggtctccgcggcggcggcggcggcggggcccagcctggcggacacgttcagggcgaggttccgaccggcgcggttcggccaccggcgctgcggcggcgtcgcgacggcggactgccgcgtctgcctggtgcggttcgaggcggaggcggtggtgaaccgnctcccctgcggtcacatcttncacccgcgcctgcctcgagacattggctttgactacgaccacgccacctgccccg

SEQ ID NO: 23168 - DNA, 807 bp, Oryza sativa
  Clone ID: PAT_MRT4530_28274C.1
atgaagggaggaagggggagcaatggcgccgccaccgacctgctcgtctgcttcccgtcgcgggcgcacctggcgctgatgccgcccaaggcgatctgcagcccgtcgcggccgtcggcgtcggagccggtcaagcgccggcacagcacgagcaggtccgggccgccgccgccgtcggccgcgctcttcaaggcggcggccagtggtaggaacccgagccgccgcgccgcggacgtccccgtcgacaacgagccgtcgtcgccgaaggtgacgtgcgccggccagatcaaggcacggcggccggcggccaagcccaagatcagcggcgccggcggcggtgccgggggagcgaaggcggccaagaaggcgacgtggctgcaggcgctcggcatcaagaaggacgcgctgccgttcttgaacgccgtgcacggcgccttccgcctcaacgtcgccggctgcttcggtagctttcccggcgccgtggtggagtacacctccggggaggatgacgacgacgaggagctcgcggcggggaaggacacagagcacggggctgcattggccaagtggttcatggtgctcgaggaaggcaagaaggggttgccgaggaggttaggaggagatgcagaggaggaggtgatcaagaactccaagaaggaggaggaagaagaggatgagaaggaggagaggcttgtgctcatgagctacgcccctgacttcttcaaggtatccgtcgacatcgccaaggagacgtggatcgtcggcggcgacgacgccgtcttgcgctgccggagctggaagagatga

SEQ ID NO: 23169 - DNA, 434 bp, Oryza sativa
  Clone ID: PAT_MRT4530_28275C.1
cggacgcgtgggcggacgcgtgggcggacgcgtgggcggacgcgtgggttttacagatctcagacccggccaagaaccactagattggacaacacggatgaagattgctgctgatgcagctgctggtttggagtatctgcatgatgaggccattccagcagttatttaccgggatattaaaccgtcaaacattcttcttggcgaagggtataatgcaaagatgtctgactttggacttgctaaacttggtcctgttggggataagactcatgtgacaactcgtgtcatggggacacatgggtattgtggtcctgagtacctctcgactgggaaggttaccatcaaatatgacatttattggtttggggggggctttcttgagcttattaccggaggaagagcgcttggcaacaatttggcaccttatgaacaaa

SEQ ID NO: 23170 - DNA, 507 bp, Oryza sativa
  Clone ID: PAT_MRT4530_28276C.1
tgtctatcatgaagaaatgcttatacacactgccgaatcctcctcggcccaaaaggcactccgtgctgaagtttgttggtagcatcagcaagctcgcgcaaagtgaagatcgttgcttcaccatgccccttatttcgccgaattccaaccatatctatcgacccttcagtcttcagtgggcaactctctgacgactttgaatattccactgagctgactctctggccgcttcttggttcctcatcctcatctctcacctcttgaggacatgggaacaagcacgccaagaagcccatcgcataaatcaggctcaaaaagctccactaaagacggatcaaaaagacagaaaatctccgatttttagccgccccagcaggagatttcattccgcatagggacatcgaaggtcgcagcaaccatcaagaggagaacaaaaaatcgatttttttgttaggacagtcaaggaggaggaggcggacgcgtgtaccatgccggcgtgcgcagctt

SEQ ID NO: 23171 - DNA, 288 bp, Oryza sativa
  Clone ID: PAT_MRT4530_28277C.1
gggcctaaaaacccccttaaaaaaaagggggccttttttatttacaggttccaaaaagttttacagatactctaacaaaaacaggaaaaactttttttcccacggggtgggaaaaaagcaatttgggcaaccaccccgaaaatttaaaaaccggggccccttgtttaacaattttgagttaaaaaaggcctcgcccgccaaagattcaaaaaaaagcgcttcccatataaattaggggccgtgcaaaagcaagccaagaaagaacccgtttttttttgttaaaggggg

SEQ ID NO: 23172 - DNA, 459 bp, Oryza sativa
  unsure (1)..(459): unsure at all n locations
  Clone ID: PAT_MRT4530_28278C.1
cccacgcgtccggctcatctaactaattgacttatgaatcctgaagccacaagctacatatggaagttctctaaataatacgaatattttggctgtgttaagtcattttcactagtgttttgccacataattgggacaatcaatggttaaggctccaaatcctgccacccatgtggttcctgatactcataactagaactggatggatggtggggttaggatttttaagcgcaagatcctgaacaaggttttgttttttaaaaaagatcctgaacatggaaaaattgtagaaacaaatatgcctctggagaaaggttattggggtgatttatgataaaatatgaacccaaaaatgctttgcaattagacaacaaatgtccaaattacagagatttggttactagagcagactgtgcactgtaacaatatagttnttatgtttgcatgtttggaccctta

SEQ ID NO: 23173 - DNA, 246 bp, Oryza sativa
  Clone ID: PAT_MRT4530_28279C.1
cccacgcgtccgggccatgtcatttcagtgtggttgtagccttcaaaataagcttgagtgttgtgggcgctaatagggaattacaagcagcattgtatcctgttgatcattaaataccatgatgagaaccatgtcgagattaatgaagacttcgtatcacagctcgtgtactgctgcctgaagtcggcacttgatcccgcaaacgttaacgctaacggaggtgcacatgcttttggggctacattg

SEQ ID NO: 23174 - DNA, 640 bp, Oryza sativa
  Clone ID: PAT_MRT4530_2827C.1
ccatgcgttcggggggcacttttttttttttttcaacccggtgagggacctgtacggtggggagggggttttttttgcaaaaaaaacaccccccaccaattattattaaggggatgtaaaaggtcaagcaaccgggacacatcattaaccggttggaaagtgacgcaaacacggaaaaacataaacaattttggggcattgtaaaaactaaacaggcaagcaaaacaaacccaaaaattacccatcattcccacgctattaaaacaaaaacatatattccgcagaaaagcggaggggataccaatggacgggttttaataatgggaaaacgcgggaccgaaacaaacccccacttaatgctatggggagcccaacaagcaccggaagcccaaacgggggctggggggggaacaaaaccaggggcgcgggcccaaccccgggggagacccggaaaaagagccttcacagaaacggggccatggccgccttaacccccaaaaaagaaaagccccggccgaggcacgaccttggccccaacaaaaaggacaggagcccgtgggggaaccccgccgacggggggcgacctaggggcccggacccggaacctaaggggggagaaccccacggggtagggcccccg

SEQ ID NO: 23175 - DNA, 831 bp, Oryza sativa
  unsure (1)..(831): unsure at all n locations
  Clone ID: PAT_MRT4530_28280C.1
ccacgcgtccgcgccggtctacgccacggcctcaccgggcggcgccggtgggacgacggcggcggcggcgaggaagaagctgctcatattcgatgccgaggagtacctcgcggagtctctggccaagtacacggcgcggctctccggggaggccgtcgcggagaggggcgcgttcaccgtcgcgctctccggtggctcgctcatcaaggccctcaggaagttgacggagtcgccgtacctggaggcggtggaatggagcaaatggcatgtgttctgggtggacgagagggtggtgcccaaggaccacgcagatagcaactacaaactcgccatggatgggttgctttctaaggtgccaattcctgcaagccaaatctatgccataaacgacacactatcagctgaaggggctgcagatgaatatgaaacttgtctaaagcaactagttaatgatggtgtggttgcaatatcagaagtaactggattccccaagcttgatcttatgcttctggggatgggccctgatgggcatgttgcctctcttttccccggtcatccggttgtcaatgaaaacctaaagtgggtcagctacatcaaggattcacccaagccaccaccagagcgaataacatttactttccccttagtcaattcgtcggcacatatcgcacttgtggtcactggtgctgngaaagctggggcagtgcataaggcattctcagataagcaaagctcttcagacttgctgcctgttgagatggtttcacagcagaagggagtgctcacttggttcactgacaaccagcagtgtcatgctgtccagcatctgag

SEQ ID NO: 23176 - DNA, 284 bp, Oryza sativa
  Clone ID: PAT_MRT4530_28281C.1
tttttgggaacaaggacaacaggggcagtgcttcatacatctcaagagaattgcacacgaccaacaacaaaggcagctatacgggacacagagtccctgggccggacgagctacaagaagagctgcatctcccacacggaggcgcactgcgactaggattgcaccgaccacgaggccgatggtggcggaggccgaaggagccctaccggggacgccggggaggggacatgacgaggacgcggatgatgctcaacgagcttccatgggcacggacacggacacga

SEQ ID NO: 23177 - DNA, 1393 bp, Oryza sativa
  Clone ID: PAT_MRT4530_28282C.1
atgtccgcctccgccgccgtctcctccacctgcgccgcggcctcctcgacgacctcccgccgctcgtcgtcgtctccggcgtccagggttcaggcgacaccccgtcggtctctaccctcccggctcgtagcatcccggacctccccacgctctcccgtcgtgccgccggtctacgccacggcctcaccgggcggcgccggtgggacgacggcggcggcggcgaggaagaagctgctcatattcgatgccgaggagtacctcgcggagtctctggccaagtacacggcgcggctctccggggaggccgtcgcggagaggggcgcgttcaccgtcgcgctctccggtggctcgctcatcaaggccctcaggaagttgacggagtcgccgtacctggaggcggtggaatggagcaaatggcatgtgttctgggtggacgagagggtggtgcccaaggaccacgcagatagcaactacaaactcgccatggatgggttgctttctaaggtagcttgccaaaatgtgatcattgtgaattactcccttcgtttcacaatgtgcgaaatggaaatactgtatgctgtcctgcatattttgctggatctggtgccaattcctgcaagccaaatctatgccataaacgacacactatcagctgaaggggctgcagatgaatatgaaacttgtctaaagcaactagttaatgatggtgtggttgcaatatcagaagtaactggattccccaagcttgatcttatgcttctggggatgggccctgatgggcatgttgcctctcttttccccggtcatccggttgtcaatgaaaacctaaagtgggtcagctacatcaaggattcacccaagccaccaccagagcgaataacatttactttccccttagtcaattcgtcggcacatatcgcacttgtggtcactggtgctgggaaagctggggcagtgcataaggcattctcagataagcaaagctcttcagacttgctgcctgttgagatggtttcacagcaagagggagtgctcacttggttcactgacaaaccagcagtgtcaatgctgtccagcatctgaagcccactgtgttatataagtttgaaactttgatccgaagtataaaaagttcaggggattttcattttattctctgttgcattagtcctctgtggaaatcttgtgctcttttcgtagtattatgcagcataagtgtctgagactccagtttcagtcaattgattaccactttatggggtatttgtcatgcgcttggaaatatctagatcagtacctgtacaatttgatgttacctatttgtttcctttgtacaaagacacttttgttcagcatttgctagttttttttttgcggttttctctgttgcttt

SEQ ID NO: 23178 - DNA, 459 bp, Oryza sativa
  Clone ID: PAT_MRT4530_28283C.1
gaggaggaggagctcgagcttgcagagagacaacaatggcggatcaagctcttctgtctggaaggcagatgctgcagaggccattgcaatattcagactccaggtcttattactacatgaaggcaccctacatggtcagggcagaggccacttcccctgccaagcaaggtgctgacaggcagctgtggctcgcatccaagcaggccctgagctacctggatggcacgcttccaggagacttcgggtacgacccgctggggctctcggaccccgaggagaccggtgggttcatcgagccacggcagctggcctacggcgaggagttcaacgagcggactgctatgatgggcgtcgtcggcatggtcgccccgtagctcctcggcaagctggtcctggtccccgccgagactgcgatccacgggttgcagaacggagtgatcccccccgggggcacctaca

SEQ ID NO: 23179 - DNA, 318 bp, Oryza sativa
  Clone ID: PAT_MRT4530_28284C.1
atgtggctcaccaccgtagctctcctgctgaccaccgtcgtcatatggacagcgctgcagaagagaaagcgtggcgaagcctgcccagccgcggtggcgccgccgccgattgtgcagggaaccgctcttgtacggttcttgcgcgccatggcaagggacgggccactagaggtgatccgcgagcagctggcgaagctggggagcgtgttcatggcgagcgccccgttggggctgttcaaggtgaccttcttggtcggggcggagctaggatttttgattgatggtgtcacagcaaagccagctcttaccaagaagtga

SEQ ID NO: 23180 - DNA, 1804 bp, Oryza sativa
  Clone ID: PAT_MRT4530_28285C.1
atgaggtcgccgcgcctccgccgcaacccgccgccggcgacggcggcggcggcggcgcctgccccggatcagttccgccccggagacctggtggaagtgctccccgacgagcccggataccgcggggcccacttccccgcctccgtcacggcctcccacgctaaccctcgcggctacaccgtcgcctacgacggctccggctgcccgctcggggaggtcgtcgcggcgtcccagctacgcccgcgcccgcccgacgcgccgcgcggcgtgccaccggcggagcacgccgtcgtggatgcgttcaagggcggggcgtggtgggtcggggtcgccctcgggggggggcgagcggcggcgggcgggagggtcgcggtgtgcttcccggagacgagggaggtggtggagttcgacgccgccgacgtccgcccccacctcgagtgggtcgccggcgagtggctctccccggagaatatggggatatctaagacaatgccatataagaaaggaacacaggtggaagttgccaagttagaaggcaattctgttgttgcttggttctctgcagctgtggagaaggctatctggaagaacagtcttttagtggattacaattgttcaaagaatgatggtagtgtgttgcccaaggagattgttgatctgaagcatatcaggcctcacccgcaacatgcatcagctattattttctgcatcaatgatgaggttgaaggcttccaaggcaatggttggtggctaggggtgattactgatgttcatcctgaatttagatatacatttaaggcagcacactcaggaaaggagattcaattggaccaaaaggcacttagacttcggtatgactggacccatgatcagtggcaacaagttacacagatgatccctggattgttttacatgctactccctacatttcacaataatgtgacaaaaaaatttgccaaaggcagcaaggtcgaagtcaccagtaatgatgatggttttcatggagcttggttccaggggactgctctaaaatatgttaacaacaagattttagtggaatatgacgcattgaaggctgatgatgaaatcactcctttgacagaagccatagaagtgcagcacgtcagaccctgtcctccagatatccctgtaaccagtggattcaatttacttgatgaagttgatgcttgttggaatgatggatggtgggttggtgtgatatccaaggttaacagtggtgacaggtacatggtatacttcaggtcttctacagaagagactgagttcgggcatgaacagttaaggcttcactgcgattgggtgggtggaaggtggatgcgggcttcgctgggattggaggcataaggcttacgaggtgcacgcacaattttgtgcagaagtgtgggttagtaccccaaagaatgtgcttcgctaacatcatccttgttattgaagttgtctgatagtacatagaaagttgtctgaatgacctttcttcgtctgcaactccaccagcagttgatctgaatgtttgtcaatgggagatcctcagcgtcactaataagctttggcattttctgtagatctgaacatgcttctataataactgactttggggaacagaaattctaatttagggtgacataactcttatttcaaaaaaacaagagaataaaaataaaaaactcgagacaaattcctacagctgcattcaaaagtaggggggttgaattgagagtaacctgcattgaactttatgctttgcactagaaatttcggcgcattgctatctgttggccctgcc

SEQ ID NO: 23181 - DNA, 289 bp, Oryza sativa
  Clone ID: PAT_MRT4530_28286C.1
aaattagggtattatttattatttgttttgatgattatttttttgtttgttcacaattatggtgtgatactactagttatgaggcaagccagagaaggctagaaatggtcggcaaaaaaaaaaaagaactgctggggcttaaaccgccaaatttatgttgctgaacagaaaaaagacactctttgtttaggctcaccaacaaaaaaacagaatggtgaaatgttcgggggcggaagcgggctaaaaaaaaaaaaaaatcgagtaaaaaagaacccacgacgacgggggg

SEQ ID NO: 23182 - DNA, 443 bp, Oryza sativa
  unsure (1)..(443): unsure at all n locations
  Clone ID: PAT_MRT4530_28287C.1
gttcattagttcatagggtttttttttttttgttgaatttacaggattttacacgcagggcggtagagagataaagattctttccaaaataaatgggcccagcatttgcacagccaccccagggggggatggagtttttttttaaaataccgaactttatttggaggaaaacgaagacccaacccccccaaagggggcccccccccgtcccgggacccgtgggacccccccggaattacggacggggaagttgagaggnccacccttttttttaagggaggagagaaaacgtggtgggtaataacggcaaaagagggacccggggggaaagaaggaggcgccaaaaatttcccaaaaactaggtggcgggaaaaaaaaatgaaaaacccggggggcctataggggggaccaacccaaaaattttggtggggccccaccccccc

SEQ ID NO: 23183 - DNA, 342 bp, Oryza sativa
  Clone ID: PAT_MRT4530_28288C.1
atgtccatcttggtctcacgaagtactgatggtagctcattatctggtcaaaatcctgatttcactgggtgcggatgctttcctctgaactgcagtcaccttgagacaatcaatcaattgactggtgcattgccaacctctttgggagacctaccttacctggaaggctggagtgttttggggccatattggttcttgttgctaacattggatattacattcttacgtgctcatcagatggttgtccctgttggggatggaaatattgttcaagttatcagcaggctatacgttattcccgataacccaaaagaatcctcagcagtgaagagattctggtaa

SEQ ID NO: 23184 - DNA, 752 bp, Oryza sativa
  Clone ID: PAT_MRT4530_28289C.1
gtccctgacaccaccctaccttcttcctcatttcttctatcttctcttctcttcgcgatctgtcggtcatggcaccagcggcgaccatctccatctccgtcggccagatcaggctagctgcaagtcctgctcctccctctcttcttcagcaaggggtcgccaagagctctccgccggcggatccggagggcatgagctcgccactgccagatctacctgcacagagatgtcgaagcatgagcttggcttgagctcgtcgccgtcgccagcggcaccaccttcctcgccggcttgagctcgtcgctgcgcggacaccctcgccgccacggacagctacctcaaatccatctcctactcacctttttttttcccccaattcagaggttagaagctcgggcctgccagatccgagtagccacaacaccctcccggccgctggactcgctgcaccgacggcggcgaacatgcctagctgggtggcacgagcggctaggtaccggcggcggcaagttcctctgcgagctctgttctcctttttttttttctttctttcttttttccaccgaatgtcattaaccactgataaatatggtttatgtacttctgtgcaactgtatatgctcatccgatactgttttcaattattgttgttaggagctccgaaatcaatgctttgtatattttgcatgtactattaaatctgatatatataccataaataaatacgcttttatttcgacggtaaaaaaaaa

SEQ ID NO: 23185 - DNA, 1626 bp, Oryza sativa
  Clone ID: PAT_MRT4530_2828C.1
atggatttattgcgtcagccgaggggaggggcgcgcggaccgggtccacgggagtggggcccacgcggcagcctcacggtccacggtagaccgggcgcacccgggctcacaccggccggcgccgtgggtcccacgcgtcagccgcacccgagggcgcgggcggctgacagccgggcccccacgcggcagccgcacggtgcgcccgaaggcggccacgccggtgcggccggcgggaggtggcgcgcccgtgcccctatggtcgccggcggcggccgtaggcacggcggagcggcggccgagagaggggaagggaagggggaaacgaatcggcggtccacggctcaccccgggtcgacggcgacgacgggaacggcgaccggagcggaggaaggcggcggcgcggctcgggtggacggggtcggcggtgccccggcggtcggcgagcgaaacggaggggtggacgaggtcggcgaggatgcggcgaagctgaaggaggcggcgccgaggcgggaaatggtccggagcgacgacggcggcggaccggagttcgacggcgacagcggagagagagagcgacggcgcgagctcgattccggcggggagagagggcggcgagtggcggaaacggtggagggaggcacggggaaggtttatatagggttgggagggggagagagcggccggacgagggggaaacgggcgcggaagatccggccgccattgatggcgccggcgaggttaggggagaggtttccaaacgaatccgagggagagagggagggaaaaatggggggaaagagggagggaatcacggggaatatttcccccctcttgattgcacgcggggcggacgggggcggcgggattcgcggcggcggcggcggcgctagggcgcgggcgaggcggcgggagcggcgggaggaaggggatgacggagtcgttttgggacgcgacaccgagttcatctccatggggagctccggttatttttgtggaaaagaaagaccatacccagaggatttccttggtcacgtcatctcagcaggaggagttgccgtcgatcctagtaatgtggaatccgtaaccaactggaaacaaccaaagacagtttcagagattcgcagtttcctaggcctcgcaggatattatcggaggtttatagagaatttttccaagattgctaagcccatgacacgactgcttcagaaagatgtgaagtacaagtggtcagaagaaacaacggagatgccgtgcttcgccgtcgctccagccgtcgccgtcgctcggggaggtcgccatcgtggtcgccaagtcgccgccgtcctcgtccgcccctccgccgtcgctgttgaccgccggaacaccgtcgccgtcgtcaagccgaaggtcgccgccgcttcttcatcgtcgccgacgttgtccgttgctcctccgccgttgctttggtcaccggtgagttcgcctcgtcgcccgcatcgtgctggtgccttccgttcgcgccgccgcgccgtcattcgccgacgagtttgcgcgaccgagccgccgagccgccgagccgcccgagccaccgccggaggtgacgtcatcgccgacgtcatcgtggccgtttgccgtgagccgccgtag

SEQ ID NO: 23186 - DNA, 1621 bp, Oryza sativa
  Clone ID: PAT_MRT4530_28290C.1
gcgtgtgtgtgtacatgggtagcttagctctagttctactagctcttgccaacagcccagctaagctgagctgatctattcacgtctgtggcgtgagctagatcagcttattaactatctctctaccaaatcaagctaagttaattagctggatagctcgctcgcagtgatggtggttgtagtcgctgtcctcatgtccggcgtgggtgagacggctggcgcctcagcagggggtgcagatatatggggaattcgcttggctgcgtggggcttggggagaggttggcggcggcggcgaaggacggcgacgcggcggaggcgcagcggctgctggcggcgaaccccgggctggctcggtgcaccaccttcggcaacctcaactcgccgctccatgtcgccgccgccaaaggccaccacgagataatttactgtaataatatgctcaatgatcaaatcacagacgagattgctgcattgctgctggagaatggagcagatgtgaatgcgaggaacatctatggacaggtgtggagggtggagaacctgagtgggcggacggcgctgcacatggcggcggccggcggacatgtcaagtgcgtcaggctgctggtggcggacgccgccggcgacagagacgggtacgtgaacaaggcggcgaacggcggcgtgacggcgctgcacctggcggcgctgcacgggcacgtcgagtgcgtccacctgctcatcgacgagcgcgccagcctcgccgcgcagacgctgccctgcgccgcgccgcccatggcatccatcggcgccggcagcacgccgctgcactacgccgcgtgcggcggcgaggtcaagtgctgtcagatactcgtgtcaagaggagcagacagaacagccatcaattgcaatgggattgtggtagtcaggtggatcccaatcgacgcagccagaatctggggctgcaactggcttgaacacgtcctctcccccaagtcgcatcttccctgcacgggcacgcctccttccggctacctctcccagccactccccagcctcatcgccattgcaagggagcaaggtctgaacttgtcttcggaggtttctgatggcttcgatgaaggagcagatgcctgcgccgtctgtcttgagaggccctgcactgtagctgctgaaggttgcgatcacgagctgtgcgtgaaatgcgcgatggatctctgctcggtgatcaaatcctacgactcggcggggatcgccggcgagatcccgtgcccgctctgccggaccgggatagcctccttccggacaaccgccgccccgccgccgccgagcctcgccgggtcgcccgcccgccgcagccgccgcaacaactccggcggcggcggcggcgagcacgaggcctccaactccggcggcagcgagaagggatacggcagcatcgaccccgacgccggcgccgtcgtccccctctactacgcgccgcccttcgcgccttctgccatcctgacctgaggagcaaggtctgaacttgtcttcggaggtttctgatggcttcgatgaaggagcagatgcctgcgccgtctgtcttgagaggccctgcactgtagctgctgaaggttgcgatcacgagctgtgcgtg

SEQ ID NO: 23187 - DNA, 220 bp, Oryza sativa
  unsure (1)..(220): unsure at all n locations
  Clone ID: PAT_MRT4530_28291C.1
agcacagccgcaacctacagccagaactaggaacgaaanctgggttgcnnggncgccaatagtgagtacagcgatagtacgacagaccaacagagcagtcttgacactgactctatacgtacagtcctatctctgtagtcgacgcggatacacatatctatatgttatttnnncgtcctatgtctagtatagagtcgctaagctacagtctagatccgnt

SEQ ID NO: 23188 - DNA, 410 bp, Oryza sativa
  Clone ID: PAT_MRT4530_28292C.1
gtgttttcgagtgtgacatgttgggggtgggaactgaggctgtggcaaaaaagttggcagagcttaccgccaagggtgtcacaactatcattggaggtggaaactctgttgccgttgttgaaaaggtggaagtggctgacgttatgacccacatttacacgggaggtggcgccatcgtgggggtggtaaaaagaaaagatcttccaagagttggtgcattggatgaagccatccctgtggctgtatgaaggaagctatcattttggatcatcatcatcagcagctgccattgaatacttgctacattcttgcttgctcctcgacagccgttctagaatgaagagatcagtgtgtagatgcagctactggaaattgtttgaacaaccaaacatattatgattgcttaccca

SEQ ID NO: 23189 - DNA, 549 bp, Oryza sativa
  Clone ID: PAT_MRT4530_28293C.1
ccgacccaagggacgtctgcgatgaccaggatggagaggaggcgatgccgaagacgacgtcgctggctcgccgctgcgatgccggaggtggtggtggcacggccgacggcgcacggggatggcagaaggggctgccgaaagcgacgtcgacgaggaggaaagagaggccggcgcggcggcggcgggctccggacgaagacgggcagcggtcggggtggagggtgaccccgtggagccggggaaggagatgacgacgacggctgccgcaccgatgaggaacagtagccggccggaggcaggaaggtactggacaccgacaaggagaccgctctggcgagcttcgggcgaggaggaggtgaggccggcggttggaggcggccggcgcgggggaaagagaagggcgacggcggggaggggtgatacgaccatggggaggctcgggatgaggctaaaactatagaacggaggatggggattccattttataggcgcggggagggagccggccaggggaggagcggggaacggcggtggagtatgtggccggcg

SEQ ID NO: 23190 - DNA, 355 bp, Oryza sativa
  Clone ID: PAT_MRT4530_28294C.1
aaagccagagcatgaaggatccaattacagtgttcagttcaaagaccaatgcaaactccattggtgaccacccttgcagggaagaactctaatattccggtccatgccaagtcgatgtgatcgctaatgcttaccgcatatcgagggagcaagcatcgaacccgttaagaataataggggagaagagctcggttccttcactccgtagagtatcacacagacctacccaggctgtctcaaagtgaggtcggagaatgagccctcagagtgatgtacgtataggaaagtagtagtagggttactccaaaaaaaaataaatccaccaagtatgtgaaactttgtgccggttctgttc

SEQ ID NO: 23191 - DNA, 2412 bp, Oryza sativa
  unsure (1)..(2412): unsure at all n locations
  Clone ID: PAT_MRT4530_28295C.1
ntttcggtttcgtgggcgggggagagatggcgccggtggaggatggcggcggggtggagttccccgtggggatgaaggtgctggtggtggacgacgaccctacatgcctcgccgtgctcaagaggatgctcctcgagtgccgctacgacgcgacaacttgttctcaggctacaagagcattaactatgctgcgagagaacaggcgtggttttgatgttataattagcgatgttcatatgcctgatatggacggattcaggttacttgaacttgttggccttgagatggatctcccagttattatgatgtctgctgattcaaggacagatatcgttatgaaaggaataaaacatggagcatgtgactacttaattaaacccgtcagaatggaggagttgaagaacatctggcaacatgttataaggaaaaagtttaatgaaaacaaggagcatgagcattcaggtagcctagatgatacagatcgtaccagaccaaccaataacgataatgagtatgcttcatctgcaaatgatggagctgaaggtagctggaagtctcagaaaaagaaacgggataaagatgatgacgatggtgaattggaaagtggtgacccttcttctacatcaaagaaaccaagagttgtttggtcagttgaactccaccaacaatttgtaaacgcagttaatcatctggggatagacaaagctgttcccaagaaaattttggagttgatgaatgttcctggtttaactagggaaaatgtcgccagccatttgcagaagttcagattgtatctgaagaggattgctcagcatcatgccggaatagctaatccattctgcccgcctgcttctagtggtaaagtaggctcactgggaggacttgatttccaagctttggctgcctcaggtcagatccctcctcaagccctggccgccttgcaggatgagctcctagggcgacctacaaatagtttggtattgcctggaagggaccagtcatctttacggcttgctgcagtcaaaggaaacaagccccatggggagagagaaatagcatttggtcaacctatatacaagtgccagaataatgcatatggggcattccctcaaagcagtccagctgttggaggaatgccttcattttcagcttggcccaataacaaacttggtatggcagactcaaccggcacattgggaggcatgagtaattctcagaatagcaatatagtcttgcatgaattgcaacagcagccagatgccatgctgtcaggaacccttcactctctagatgtcaaaccttctgggatagttatgccttctcagtcattaaatactttctcagccagtgagggtctctcccctaatcaaaataccttgatgatacctgctcagtcatctggttttctagcggccatgcctccatccatgaagcatgaacctgttcttgcaacttctcaaccatcgagtagtctgttaggtggtattgatttggttaatcaagcttcaacaagtcagcccttaataagtgcccatggaggggggaatctttctggccttgtaaatcgtaatccaaatgtagtaccttctcaagggatcagtacttttcatactccaaataatccatatttggttagtccaaattctatgggaatgggctccaaacaaccacctggtgttcttaagacagaaaactctgacgctctgaaccatagctatggttatcttggtggtagcaacccccctatggactctggcttactctcttcacaatcaaaaaatacacagtttggtttactgggtcaggatgacatcactggtagctggtcgcctctgccgaatgttgacagttatggtaatactgttgggctaagccaccctgggtccagttcatctagttttcaaagttctaatgtggctcttgggaaattgcctgatcaagggcgaggaaagaatcatggatttgttggtaaaggtacttgcattccaagccgctttgcagtggatgagattgaatctccaactaacaacttgagtcacagcattggaagcagtggagatattatgagccctgatattttcggatttagtggacagatgtgaaggcttcttgaatttgtaagtagggtaatcactggaaacaatttttagtgggttgatgaacggttgccgtgtttttcatttcatccttttttttttccttctgtaattggtttataaagggaataatttatgtgacagcatgtcgaatcttggtttatagaaggttgcggtttaaacaactttggattaaaaagcctcaaaaaaaaaaaaaaaaaatcctttgttcaggggatccacacagttttctgattttgttgccaatcttcttctctcaaaaaaaaaaaaaaaaaactcaagactagcctcgtgc

SEQ ID NO: 23192 - DNA, 261 bp, Oryza sativa
  Clone ID: PAT_MRT4530_28296C.1
atggtggaggaaggaccaacaacggccaggctcggcagtggaaaggggaaccgtggcgggctcagcggtggcaaggagaaggcatcgagagctctagttctagtggtggcggtctttgggagctctggatctgctggtggctacagcggtgatctcggcggctcccgaaagggcgtcttccacccatttggcgacaccgccatcgacgacgtcgactttttcatcgaccaagacgtgtggatttggggattgggaatttga

SEQ ID NO: 23193 - DNA, 263 bp, Oryza sativa
  unsure (1)..(263): unsure at all n locations
  Clone ID: PAT_MRT4530_28297C.1
tttctgttcactagaccaatgtcttcgaccgttggtgaaagatgctttaacttaagttcatccttgtcgtatgctgactagcacctgttatatgtctgcttaccttgctgaatttcagttctcattttctgttttgtttgggaatggttgtatacctttcagtaaattatgccatacagcagtacctttagttctgtactgtgtattgataaaggcacattttctgatttacgaacttcgaactncntaaaaaaaaaaaaaaa

SEQ ID NO: 23194 - DNA, 103 bp, Oryza sativa
  Clone ID: PAT_MRT4530_28298C.1
atggcgagcacaccggcgacgcggggaaatcggagctccggtggtgattcgcggcaaagaagcggcgtccgaggtagctctcgcgtcggcgaagctggcggag

SEQ ID NO: 23195 - DNA, 651 bp, Oryza sativa
  unsure (1)..(651): unsure at all n locations
  Clone ID: PAT_MRT4530_28299C.1
gggggttgttttttaaaggaatcatgcaacattcaaatattcaaatcattcccagatccttcaattttattgaattcgaaggaggcatgctacatcatacaccacctcctgctttaaactacatcatcatgctacaacagtgaaacgctcggctccccgccgaagcagattcatcgcgccgcgaccgcgagcccagccaccgtcgtcgcgcgcccaggcgacgcgcgacgcgagcgcggcgaccttggggcggaccaccagcgccgcgcgcacggcggccctgaccacggcgtagacggcgagcgcgcgcgccagcctcaggttggccgcggcgacgtcggcggcgcggcacgcggcgtgccccgcgacgagcctgcgcgcgtcggacgcggcgagcgcgaccgtggcgagcagcgcgcccgccgcgaacgcgagcagcacgagcgccgtggcggcgaggagcgcgccggagaagaggcagccgtagaggagcgcgacgaggaggaggtccagctgctgcaccgccgcctgcatggggaacaagctggtgatgatcgccggcgccggcgccagcgaccagaggcgcgccggtggccgacccggagaggaggccggcccacacgtttattataaggagaggaatcntcttgc

SEQ ID NO: 23196 - DNA, 1511 bp, Oryza sativa
  Clone ID: PAT_MRT4530_2829C.1
atggcggccgacctcccgcgccggtttcctcccttccccggccaccctctctcgccccggctctatttaaaccctccccgcaccccctccgtccggttccgcctctcgccgttctctctctccgccggaatcgagctcgcgccgtcgctctctctctccgccgtcgccgccgagctccggtccgccgccgccgtcaccccggacctcctcccgtttcggcgtcgccttcttcgggttcgccgcaacctcgccgacctcgtccacccctccgtttcgcccgccgaccgccggaacgccgccgtcctcgtcgacccgagccgcgtcgccgccttcctccgcttcggtcgccgttcccgtcgccgccgtcgacccggggtgagccgtggaccgccgtttcgcttcccccttccctcccctctctcgggcgccgctccgccgcgccggtggtcaccggcagcgaccatcggggcgcgggtgcgccgcctcccgtcggctgtgccggcctggccgccttcgggcgcgccccgcggctgccatgtggggcccggccgtcagccgcccgcgccctcgggtgcggctgacacgtgggacccacggcgccggccggtgtgagccgggtgcacccggtccaccgtggaccgagaggctgccgcgtgggccccactcccgtggacccgatgtttaacagagaaaaaggaaagaatgtcagcgggtatgcctcaagtaactcaagttttcaactcaatccaccactggcctcaagagagttaaccagggcacacccttggtccattccgagcatgctgcttggttcacagctaccattggttggaagtcaagaccaaaatcagtatgtgtttgatcgagcatttgccacccaggtcgatgagcttccaatgccagaagaggatgtccccttttgtcacgattgtagagagcaaggacactatgccctgaattgtccatgggtatatgccaaagaagctccttcctttggtttagcagggcaggcatcgctaaaccagcctcctcgcaccaagtcaagcttgcagcctagtgtgcaaagtagagagcccaatggagagaatccattgaatcccgagaattgctttcctcctagcctttcgtaccacgtggggtcacgtactaagcaagccaaaggcaagaagagtaagaatcagaagagaaaagcaccgatgcgaactgaagaagaagtacagtatctgatagtgaagggtcagatcaagtctcctcggatgatgaagatgagtctccccgacatctcggcgaggaagaaatggaatcaaaggcatgcacccgttgtggagaaattggacacgttgctagcatgtgtctcacactctgccctcattgtgaggaagaccatccaccaggccgagcaaagggcaatcaatctcaggagggcgataccaagcagaataccgttctctgcttcaaatagcaatcagaaggaagcttctcctgtgaatgatagcaatatgcagtcctaa

SEQ ID NO: 23197 - DNA, 426 bp, Oryza sativa
  Clone ID: PAT_MRT4530_282C.1
atggcagagggcgacggcgacttggcgagggtggaggcggagggcgtcgtggcaggagcggaaggcggtgaagtggcgctcaatctgcttcgtcttccccctgctgccccgccgccctccggcacgtcgatggaagtggaggccgcatggcccgcatccggtctcgccgccctcgtctcgcgcgtctcctgctgctcctctcctcccacaacgaagacccgccgccacagtgcgagatgcggaggcggagggcggagctgggtagcgagcggcggtgcacatggcgacgctgctcggctagctcgctcgggcatcgccatcacgcaccacccaccggacgagggtggcatcagcatggtggacgctggcacactgctcgcggcaatgacgcgatctacccgtggcaatgtcacggaagaattctga

SEQ ID NO: 23198 - DNA, 536 bp, Oryza sativa
  Clone ID: PAT_MRT4530_28300C.1
tcgcaagacattaaaaaccaagtgtgtgatgtcggatgctcttatagagtgtaaatgcttgttggtatttcttacgaccacagataaatccgcaagcgcacggaataccactgtagcacagtcaccttcgggtgaccctaaaaggatattgaactcagggaacgattgctaggacaggattcagggctgtcaccacctgtcgtctacctatgacaaatctatgggatacacaacaaacaaagaagaagttctccgaacccagagcagggtgtaccgacagctccggtacttctcccgaattcctcctaggaagctacactcgtcgaggtagaagttggatgagcaccaaacttccgggcactcctccagagctttccctcactgtcaaccttattctaatgtacaaaagatacaatagagcctcttgtaattcagctcaaagttgtgtgttggaaattagagtgaactcctccttatataggctccaaatgatggttgttgctatgggaaatgacccaactaccccgcaaccacca

SEQ ID NO: 23199 - DNA, 683 bp, Oryza sativa
  Clone ID: PAT_MRT4530_28301C.1
aggcccggtgaggtgtacgacaccggacttcggctcgccgacgtcaccgcgcgctcgtgcagtctctcctgtgccatccagcacactgtgacagcggtgatcgcaaaggaggaagatatcagatgagattctatcgactggatgaagactacaggcgtgcttatgcagaagaatgcaagtatcgatatattgcaagcatttgagccaattcagagtgggaagtcctctgctcgccacaactgagatcttcgatgtctctaatgaacaatttcaatgtaccgtagtatctgttgtccgtcgagttattggacctagaggccttctactaccccattacactaatgctgcatctctagcatatatcatccaagggagatgtatcacagggccaactttcccagtgtgtcctgagtgctaccatccacagttcctactatctagacaagaccaattgaccgaaagtcttagccacagtctgaagttcaaggatgaacatcagaagatccaccgtttctgacaaggagatgtaattgcattgcctgctgctgtatctcattggtgctacaatgatggtgaagtgccagctgttgccatatatgtctctgatctcaacaacggtgctaatcaacttgaccctaggcaaagggatttcttgttagctggaaataagataaaccctcaag

SEQ ID NO: 23200 - DNA, 270 bp, Oryza sativa
  unsure (1)..(270): unsure at all n locations
  Clone ID: PAT_MRT4530_28302C.1
cggnacgcgtggngctcgctgggcctcgttccgggcgggtggtgcaatcgccagtgcgtggcgccacggtcgcacccggcggcgccgtggtaccagcaacttcggcaggactgctgtcggcagctcgccgcggtggccggcagctggtgctggtgcttggcgctcaccctcattgttgggggggggggggggggctccgttcccgcctgtttggcactccctgggcgtggtgttctctggcttgtttggaggggtctttgggctcgcgct

SEQ ID NO: 23201 - DNA, 2148 bp, Oryza sativa
  unsure (1)..(2148): unsure at all n locations
  Clone ID: PAT_MRT4530_28303C.1
atggacggcaacaagcggcggcggacgcggaggcggctatccctggccaccgccaccgccggcgacggcgacggcgacggcatggctgcggcgccgcctccggcgaagcggcagcgttgtcatgcggtggaggagctcccgtcgccgaggagggggctcctgcggcagagcgtgctcgtcgtcgtcttcctcaggcgcgccatgctcctcgcctgggggggcaggaaggcggacgacgacgacggcggcggcggcgcggcggtcggcgtctcccggattggtggcgtggtgagagatgaactccgtcgctgtcttggaccaattgcgaggagcttctcgctgcagtttagcaaactggaaaggaaactggaaagcagactggaaagaattgaccagcggattgagaatctcaaccataaagtggaccaaataacaccgttacgacgtagccactgcaatcaccagcacccaatgcaggggacaaataatgaaggggccaatgctgaaggagtggagacaaatgaagacgatgacaaaaacacatgtgttcggcttcgatttctgaatgaaatgaaacctcctatttaccatgatgatgagttaaaagctgagaacagcgaagatattcggattggcatatttgatggtgaacagatgataaaatcaggccctctttcgaaggtgaaacttgagatattggcccttgagggaaattttccgtataatagcatggagagttggactactaaggagttcaacgaacacagagcttgtggccgggatgaaagaggcgatgtgttggcaggtgaacgcactgtccagctgatcaatggagaggcctctcttggtgccatcaaattcagagaagggtcatgcaaggcccgcaaggcaaatgaaaagagtcatcctccaaagctggacgacaaggttcatcgcttggaggaaattgcaattaatggaatatactgcaagaggcttgtggagaagggcataaaaactgtgaaagacttcttaaaggctctaaacaaggatcctgataacttggccaatattctccacatgaagaaaggatccaaagcctgggagaaaatggtgacacatgccagggactgcagcctcgaaggcaagcccgagctgaaatcgtatcccgttgctcagacaaacgtggtgctcatcttcgattgcgtgaattctcttgttggggcatggtttggtggcagttacattgcatctgacagcctcagttcagctcagcaggtcatagtggacaagttgaaaggggaagcatatcaactattagatcagcttccttttgattatataatggaaggcgggtttccaatactgaatcctatgaatgcgaatgccgattatcgagctcaaggtactgaagcagttgggggcttggatcatgctcagattgatccatcatttgcaaatgcaaactatcaagatcaaagtactgcacaagctggtcaggagcaattctcctctgctgctgtagctggttggtgccaggattcaattgcgcaacctagctcttctcaccagacaaatcatgtagtctaccctggtggagctcaagtgaattacagtcaccaaactaactgcgttgcgccttgtgattacccatgccaaggagcatccatggtaccaggatttgatcaggtggaacttcaggggaggcccttcttgggcagagatgacttggaagcatcaacttctgctcacaacaatctgccatttccaccacagcagcagtttacattcagtggtgatccaggatcatcagctcaggtgaacatgcagagccaggggcactcaaagccatcaacttctactactcaaggcaatcttccaacacaacagcaatggtcccaatctcaataccatggaaacaactggggataaagcagaaatgtagaatatgtcatttcatttagttcaccgatttttttaggaatcaattgtgaattgtcacctgtattgtaatttgtaatcctctcnctttttggtctctgagcagcttagactattgctctgtacttcacccattgatgtgaaactctggctgaaagagtggcgctaatctaaatgttagatttccaagattttcctaaaagttatatttccaaaaaaaaaaaaaaa

SEQ ID NO: 23202 - DNA, 362 bp, Oryza sativa
  Clone ID: PAT_MRT4530_28304C.1
ctggtgatttggtgaaagtcttggaaggtgctaatcagcatgtccctccagagttgcaagagatggctgcaagaggtgcagctggagctccaagaaatcaagctggtgggatgagccgttgggatggacctggtggtggtggtaaccgttttgaatctgctgttggtattcctggtagttatggtggaattagggatggcccaggcggctttggtggccgtgatggcccaggcggttttggtggacgggatggcccaggcggctttggtggtcgggatggccctgggggttttattggtcgagaaggtcctggtggctttggcggtcgagagggtcctgttggctttggtggtcaggagagt

SEQ ID NO: 23203 - DNA, 447 bp, Oryza sativa
  Clone ID: PAT_MRT4530_28305C.1
gccaggaatcacgatttcaaccctttctatgtttgctccataaaagattaaaaccgtgtccataacatcgttaaatatacttgggagagcttggtgttgatacaacctttgataaacaacaactccggcggattgtatcccctaaatattccaccctcgtcaccttctacgacctttcaaactgtgacagctacattattccctatagaacactggaattaccgaaagttgctgtttcttgacttcccgtccaattcatcctgcttatccgagatttattacactctttgttgggatgtaaactattcttgcccactgtgacatcccaactattgatagggacgtaccgaccccataaacgatcgggaactaaacgcgcctgctgccttccttggatcttggacccttatctcaagctccttgtcctgatcctttacctaaatatcc

SEQ ID NO: 23204 - DNA, 783 bp, Oryza sativa
  Clone ID: PAT_MRT4530_28306C.1
atggatagcaaaggaaagggaggaagcaaccatgcttcatggacatctgcaatgtcctcttttatgttgtctcatctagccaatcttgtggctagtgggacgaggacttcctctggcttcaaacaggcccatctcaatccatgtgcgagggctctcaatgagatgttttgtactaattttaccggtgatcagattaagaatcacttgaaaacatggcaaaagaagttcacaaagatgaacaggcttaggaaagtgagtgctgctggttgggatgaagttaattttgttattactcttgatgctaagcactacaatgaatatatcaagatgcttacaatctttgggagcacaatggctacaggaaagtttgcaaaggactcaagttcagttcttggtactgaagatgtagaaactgaaaacgaaaaggtgaatcgtgctccaaccactattgatcttgatcctgaaacttcatctgcaagcaagccaaagaaggccaaaacaattgaaagtgaagatgatgggctgattagggcaatcaccaatgtgggtgacaagcttgctgctgctatagtgaaggctggtgagccagataatacgctgccggtaggtttatttgacaccctgaaaagccttcctggttttcaggacatccacttatcattttactatgcttatttggtggctaaccctcacattgctagagcttttaatggacttccattcgaaaacaagttacattgggttgctatgttcattagtgacaagtttactggatcaatgtag

SEQ ID NO: 23205 - DNA, 605 bp, Oryza sativa
  Clone ID: PAT_MRT4530_28307C.1
atagtctcataggtcctatctttgggattgtatggttcagttgaagcctgttcgcaatatgagagtgtagagcgactcgtggtttgcggacaacctccttcgagttgggaatggcattgaggaggtgaatgaggaaggacacatacacctgacttcggatatttgtgtgccatgcaaagggattgactcggacctcgatgggctcatggataccgtgttccccaacctaaatgataaccttacggacccaaactacatcacatctgatgaccctcatagctattacctgcccgaattcttgaactctctaactccaaacgggctacctccgcatgtgctaaagctgaagttaaactacccatcatgctattgaggaacattgacccagccaacggactttgaaacgggacaaggccactagtggttcatgggttcggaagaaatgctattaacgtggagattgtggtagggcagcatgctggtaagggagttttccttcctcggatacctctatgccttttagatgatgaaatgttcccgtttcactttaagagaaagttgtttccaattagactatgtttcgaattgacgatcaataaggcata

SEQ ID NO: 23206 - DNA, 857 bp, Oryza sativa
  unsure (1)..(857): unsure at all n locations
  Clone ID: PAT_MRT4530_28308C.1
ngagctaaatatgaaggaaatggatagcaaaggaaagggaggaagcaaccatgcttcatggacatatgcaatgtcctctttcatgttgtctcatctagccaatcttgtggctagtgggacgaggacttcttctggcttcaaacaggcccatctcaacgcatgtgcgagggctctcaatgagatgttttgtactaattttaccggtgatcagattaagaatcacttgaaaacatggcaaaagaagttcacaaagatgaacaggcttaggaaagtgagtgctgctggttgggatgaagttaattttgttattactcttgatgctgagcactacaatgaatatatcaaggatcacaagaccgatgctgagttttttaacaaacctcttctgcactatggtgagatgcttacaatctttgggagcacaatggctacaggaaagtttgcaaaggactcaagttcagttcttggtactgaagatgtagaaactgaaaacgaagaggtgaatcgtgctccaactactattgatcttgatgctgaaacttcatctgcaagcaagccaaagaaggccaaaacatctgaaagtgaagatgatgggttgattagggcaatcaccaatgtgggtgacaagcttgctgctgctatagtgaaggctggtgagccagataatacgctaccggtaggtttatttgacaccctgaaaagccttcctggttttcaggacatccacatatcattttactatgcttatttgggggctaaccctcacattgctagagctttcgatggacttccatttcgaaaacaagctacattgggttgctatgttcattagtgacaagtttcctggatcaatgtag

SEQ ID NO: 23207 - DNA, 495 bp, Oryza sativa
  Clone ID: PAT_MRT4530_28309C.1
ttcgataaagtctgattgaagaagactcattgcgggtgccctttgggcttcatctttcagagcccctccctcctctggggcttccttcccctaaagagcgttggcgggctctgattctaacagcaacaagaccaagtttgcttcttgatggcttcttgcgggtgccttgaacttccatagccttttgatgcctttcttctattctggcatgcttgtggctgcgtgaggaaatggatgttgataagctaggattttagctttaggtttatggtctttggttgggtaatttcgcacggtgtcgttcgtcaattgttatcttttgggaggttttctttctgtgttttctcctctttgtattccccgtgtactctattctcctatcctccagggccctgcgcttgcgtagtgaaccctgcccctgtgtaagatcatttggcttaatatattcatgtggggactctctcccccccgtgatttagtcaaaaaaaaaaaaaa

SEQ ID NO: 23208 - DNA, 594 bp, Oryza sativa
  Clone ID: PAT_MRT4530_2830C.1
atggcggccgacctcccgcgccggtttgcttcccctccggccgctctctcccccttccaaccctatttaaaccctccccgcacctcctctgtccgtttccgccactcgccgcccttcctcctcgccggaatcgagctcgcgccgtcgctctctccttcctccgtcgccgccgtcgaccccgtccaccccctcgccgagttcgccgaccgccggaacgccgtcgaccccgtcgacccgagccgcgccgccgccttcctccgctccggccgcctttttcgtcgtcgccgtcgacctaggacgctgcagcttcggaagatccgctcttcgtggaggttgaagccgatgtttgggaaagtaacattaggtggttttacaactctagatttcgggaatattctcatcacctggacactatggaatggatggattattcggaattggattcacacctccccctctattcaaaaccctcaaaatggttttaggctggactcggggtgcatggttttgatagtagcacctcggccatataaggaccggtcttcgggcctctgttgcaaagcactaccgtacttccacatatctagtgggtaa

SEQ ID NO: 23209 - DNA, 534 bp, Oryza sativa
  Clone ID: PAT_MRT4530_28310C.1
ctctgcacgaacattttggtcagtccaggcgagagcttggagctcttcttcctctgttccggcgcgcacatgtaagcctagggctaggatatgtggacgtcggaaggacggcgactgagatgaccaacggggctaacactgtggggcacgactagaaagtgtgtctgcttctcgacgagtacaccacggtggggataagacgttgtccatccggagagagctaccagcttgtatagatgcactggggcactcagggctgagtacatctgtctcatggggaatacaccgtcatacgccgctgcatgagagggctctccggcaactccggcaacaaggtgatcctcgagctactgccacttcttgggggaaaggttgggctgatcttcaccaagggtgaccacaaggacgtccgctaggaggtaggccagaacaaggggggagctccagcgagcgacgaccgtggtgctcctggcgaaggggtggttgccgctggaccactggtgcgtgaccattccagacgtggttcttccacgt

SEQ ID NO: 23210 - DNA, 313 bp, Oryza sativa
  unsure (1)..(313): unsure at all n locations
  Clone ID: PAT_MRT4530_28311C.1
gcaatncgcacatcacttttgtctccatgcaagtntgaacacggtttgtacattggagcaaccaaagccatgcagctgttgcgctttgggtctctattttctcttcgctggattgcactagcatagtagagtagtatttatcaactgggagaataaagnagcagttcgtggttgcattatcaacaatgcatttctgaaaaactcaatttttcatcttctttacaggttatagaaaaggaccttattaatgtctgaactggaaccgaagattgtgngagctttggatggattctctgttcgctttattcgtgct

SEQ ID NO: 23211 - DNA, 336 bp, Oryza sativa
  Clone ID: PAT_MRT4530_28312C.1
atgcctctactgatgggcatcttcgttttcttcaccgggtgcctcatctgttatcgactgattatttcactgttactcaactttttaggagttggtacaatgcatcttaaaaggtgtcaaacagtaaagttttatataactgccccgctgacatttttatataagtcaaggtgctgtttgggtttttaagcaattgattggatacaatatcattgatttttgctacccctccacagtgttcagatttggtaaaagtactcgggggatcatagcaaagatgattgaagcactcggcttcggagtaatctagttcgagagaagattatcttttcgact

SEQ ID NO: 23212 - DNA, 1083 bp, Oryza sativa
  Clone ID: PAT_MRT4530_28313C.1
atgtcgacgtcgaacaatggcgggccaacggttgctgtcaagctgtacatcgacaaggagaagaagaaggtgctgttcgcggagtctgacaaggagttcgtcgacgtgctcttcagcttcctcactctgcctctcggcacgatcgttcgccttcttggtaagcaatcacagataggatgcctcgatgagctgtacaagagcgtagaggccctcagcgaagattacttccagaccaaagcttgcaaggccatgcttcttagaccccgcaatgctgcaggaagtcattgcgatcggcttaaggtaaaagttgatgacaccaatgaaagattaatttatgtttgcccaacatccagttgtgatgctcgtagttttagctcattctggggtgtctgcaactcttgcactgtcacaactacactgatattgagggaaaagccagtggattgtcgaactgttgaatccaacgatgatggggtttttgtcaagagtgatctgaagttcatcatctttgatgatctccatgtagctcctgcttctacaagtaccatgtttcccttgcttggtaagtttgggctacttgagcaacgcaatatcgaggaaaaggttcttgagcttaattcgcacaagataattaacttactcaagagggcactggtcggctatgattttgtggatcttgtcttcggcctccttagccttccacttggatccacaatcaaggcttatggacaggtgacctccggtggaagtagtggtcttgataacctctacagaagtataaatggaagcggaataggatgcgtaaaacaagaatgccaaagcctgctactgtccccaatgctagcacccttctttggttgcggtagcagtgttctgctacaagttcaagaatcacctataaaaagttgttcgctccgagtaatccgtgcagccaagattccgaacgagatgcttgtgaagaaagagctcaccctcgacagaacccaggttttccatttgctgctacaggttctgaagctactgagggctgcattggtgactcgcaacgcactcagcagcgtgcttttgccaccaaagaagtga

SEQ ID NO: 23213 - DNA, 1420 bp, Oryza sativa
  Clone ID: PAT_MRT4530_28314C.1
gggcgaaagcgcggacgccgtcgcggagaggagaggagggcgacgagggggaggcgattcccaaaccctagctaccctcaccgccgccgccgccagcagcgatgatggcctacgcgctgcgcggtgccgccctcgtcgggcgtcctcctcctcgtcgtggcctccccggcgctcgtcccggtggcctccgccgtgcccttcatcgtcctgcacgggatcggcgaccagtgcgagaacggtgggatggcgtccttcaccgaaatgcttggggaatggtccggctccaagggatactgcattgaaattggaagaggagcatgggactcttggctgatgccacttcaagagcaggcagacactgtttgcaagaaggtgaagaaaatgaaagaactccgtaaaggttacagcatagttggcctttctcaggggaacttaattggtcgggcagtaattgagtactgcgatggtggaccaccggtaaagaatttcatctcgattggtggtcctcatgctggtacggcatcagtaccactttgcggttctggcatcgtttgtgttcttattgatgctctgattaaattggagatatattcaaactatgtacaggcacaccttgctcctagtggttacctaaagatacccactgatatgacagattatttgaagggttgcaagtttcttccaaagcttaacaatgagataccaagtgaaagaaatgctacgtataaacaaagattcagcagcctggaaaatctagtattgattatgtttgaggacgacgcagtgttaataccccgggaaacggcatggttcgggtactatcccgatggcgccttcagtccagtgcagccacctcaaaagacaaagttgtacacggaggactggatcggcttgaaggctttggaggaggctgggcgtgttaagttcgtatcagtgccaggaggtcacctgagcatctccagaagtgacacgaagaagtacatagtgccatacttgaaaccggacggatcatccaggttcggcattcgtcgcatcttgtcggattgattcacgagaagaaggcgttccgagtgaccagttctaacgtcacatggacatggattgtatgtaagctctgaattgtggacttaattgttgatgccatgtaaataccttggtaaaggtaatggggtaatggaatacgtcgtgtactgtagggcaggtggttagcgtacctgaactgcagaactggcgatgctagaattgtgctgcctattagcaaaacgcaattgtgggcttttatgtagcagacctcactaggaaaaagtccaattcgacaatctcgtatatagttcggatttaattcaacaacagaaacagctataatgattcctccagttaggcttcctccaatggtgccttgtaagctaaaaaaaaaaaa

SEQ ID NO: 23214 - DNA, 558 bp, Oryza sativa
  Clone ID: PAT_MRT4530_28315C.1
atggcctacgcgctgcgcggtgccgccctcgtcggcgtcctcctcctcgtcgtggcctccccggcgctcgtcccggtggcctccgccgtgcccttcatcgtcctgcacgggatcggcgaccagtgcgagaacggtgggatggcgtccttcaccgaaatgcttggggaatggtccggctccaagggatactgcatattaaatgtattcctcctcagtgaaattggaagaggagcatgggactcttggctgatgccacttcaagagcaggcagacactgtttgcaagaaggtgattcagaacctccatcacttctatttatgtactgtgaagaaaatgaaagaactccgtaaaggttacagcatagttggcctttctcaggggaacttaattggtcgggcagtaattgagtactgcgatggtggaccaccggtaaagaatttcatctcgattggtggtcctcatgctggtacggcatcagtaccactttgcggttctggcatcgtttgtgttcttattgatgctctgattaaattggagatatattcaaactatgtacag

SEQ ID NO: 23215 - DNA, 1489 bp, Oryza sativa
  Clone ID: PAT_MRT4530_28316C.1
atggtctgtccgcctcccgggaatcgggcggcggagccactagggaaacgggagcccctctcgccatactgagtactaaacgaaataataaatgataaagtagctccagagagatacagagagagagagaggaagcagacccggacctcttgatttgtcggctacttctctgatatcatcgaatcttgggactctaggggtttgaatcggctcatttccatacggcgggagcagcgctgtcgccaaatcgaaaccaaatgtcatcttgcattctctgatacagcaaatggatatccctacaatcatctcaattattgtttcagcaatagtcatagatattgttctcaagaactcccgctgatgctgagtctagatatgataacgtaccagttcctttgataccctgtatgtgttggtagcgtggactgggttctgtcttttcttctttccctctgttccgtacgtccatcagttgaggttgttagcttgagaattttgactagtataaatctatgtttggagcgtaagacggatagagagttaggaattctcctttccaattctttagttttggagaagttgggaatcaaatactgcgacaagattaattgcctgaagataccttgtgttctagagaggctcagttcactggaagtgtttgaatgttacagcctacaaatggtagagagcaaagctccaaatttatgcagtttttgctttggaggtgaacaggtacagttctcaattggagaaccgctgcaaatgaagaacctgcaagtgatcttccccaacagtatcagttttggccgtgctgaacttccatttagtatgcctaatcttgaaactcttaatatcagttcacgttgtgagatgtcccatacaccaactgcacctggcaaattccttcacctcagatacttgagtattacttttgcgggatggagattttcacgtgcctacgattatttttctcttgtttcttttcttgatgcttctcctttgttggagactttcatcctatgtattttacagaaaggaaagcatgacttaactttaagggatcctatatatccaaggcaaatgtctgaacgccagcatgacagcctaaagaatgtgaagatcaatggtttcagttccacaaaaagcttggttgagctaacatgccatattcttcagaacacaacttcgcttgagtgccttacattggacactactcgcattgagtttcggtgttctgatagtagtgttgatgtatgtctcccatcggacagggatgctatcaagggagcgcataaagcgctcttggctatcagaacatatattgagggtatagttcccgctacagtcaagttcagtgttctagagccttgccgccgttgctacgcttggtaactatgccaaatcattgtaattaaacagtatttaattgtgtaacttcagatgcgttgtgctttctgttttaaaatcagtggtgtactggtgtccataa

SEQ ID NO: 23216 - DNA, 523 bp, Oryza sativa
  unsure (1)..(523): unsure at all n locations
  Clone ID: PAT_MRT4530_28317C.1
gtcaagatggtctgcatcccttgcgaaggacagagtgaagagaaattttgtgtcaaaaccagctaggtgaaggatacaagggcaacggcaatttgtagttgtgcaaaggtgttgtcagtgctgaatgttgagagaatgcacaactcacttgcacatcaacaagcatcgcaagggcgaggctctatgttgagcgaatccaaatttcggaaagcaaaacaggctgtgcagcccaacttgatgtacctccagggtcagcagcttgagaatgaggaagaaattggtacacttgtctggggcgaggctgatgtatctgatccatagatatttagttcactcactagtccaccttttccgaccatagatgctatgtgatccgctgcggcggcagcattagcattcgcagcagctgtagcaatgtgaggaattggggagatccctgcttcttgcgcagttcgatctcactggctcgagcggcctttgagggttaacggttgccgatctgtggngttttttgttaaccatg

SEQ ID NO: 23217 - DNA, 518 bp, Oryza sativa
  Clone ID: PAT_MRT4530_28318C.1
gccgcccttttttttttttttttttttttttttttttttttttttttttttttttcttttttttttttttttggaaatctaatctcagcattcccctttattgggtcccgtaaaaaacgtccagagataatttagtagataaagagttttgatatgatttatatggcatataacatcctaggaaatccagacaagcggccttgtaaaacaatccaagatgaaggtacccaagaaaatggctggaaaaactggtggttcgatcagctcccgttttcaaacccaaaagggaacggggtgaacatttccagaaatatgttctaggacctcgcttcaccagagcaaatttatttgatttggccaaggggccaaaaccaactttatacaaggggggaagatgatcaaacattaaacagccccacagatcccaaagcattaatagtttagatccatgttttcagccatcaaccaaatggaaatgcctcaggaagggatggaagacctggccgaaaacatttttc

SEQ ID NO: 23218 - DNA, 1697 bp, Oryza sativa
  Clone ID: PAT_MRT4530_28319C.1
cccacgcgtccgcccacgcgtccacagaaacctcacaaccctagttcggcgagagccggaagctatcaagctaagcgagatacgaaggaaagcggttcttgcagcagaaatttcaaggctttgccgccaaatttggcccaagtttggctcaaaatccaccattgcaggcccctgcccctcgggaggctaaagcgagacgaaggccatgtcgcggcggtctgggtatcgcgcggcggagcaggaagaccgccaggttgatctgatgggcgactccgacttcgacgacgacgagtacggacaacctatagagtccaaagaagatacgtcggcggtggatgtgaagaaagggaaggacatacaaggaattccatgggataatttgagcttctcaagggacaggtataggaagactaggatggtacagtacgtctagggtggtatgcacacctgtagataaaggggcactctactatgagtttcagtacaacacaagatcggtgaaaccgacaattcttcatttccagttgagaaatttagtatgggcaactactagacatgatgtgtatcttctatcacaacgttctgtgcttcattggtcaccattcgccagtgagaagcacaaagtcattgatcttcaaggacatatcacgccatctgagaagcaccaggggaatgtctccgaggggttttaccaggctcaagttagtacactagcagtgagaggtaatttgcttgttgccggtggatttcgtggagaactaatttgcaagtttttggatcgtgaaggaataagctattgttgcaagtcaacacacgatgacaatggcatcactaattctctggagatatttgagaaacccagtggttcggtgcacttcctggcttcaaacaatgattgtggagttcgagactttgacatggaaaaatttcaaatttgcaataatttccgttttccttgggctgttaatcacacatcattgagcccggatggtaaacttgttgctattgttggggacaaccctgaaggacttatagtcgatactaattcaggaaaaacagttcatgaactccgcggtcatctggactactctttcgcgtcagcgtggaacccagatggccggacattcgcgactggtaaccaagacaagacatgcaggatctgggatatccgaaacctttccaagtccgttgctgttctgggtggcaatatgggagccatacggtcgattcgctacacatccgatgggcgattcttggcaatggcggaaccagcagatttcgttcatatattcgacgtcggaagcgggtaccgaaggaagcaggtggtggatttctttggtgagatttctggcatttcgttcagtcccgacaccgaggctctgttcatcggtgttcatgatcggacctatagcagcctcctccagtacaaccggctacggttctactcataccttgattctgctatctgaatttgctacttgcaatcactggcagagtaatgtgagttctgaatcacaaaaaattgtagaagctagtaaagtagtagagaagatgtagatatgtccatatctgtagctgttactgtaaaggaacctgaaatgcatctgcaaatggcctgttgcttttgctggaccaaactgtatccatcagacttcagggtgagcaatcatcctacggaagagaagatgttatctggt

SEQ ID NO: 23219 - DNA, 1080 bp, Oryza sativa
  Clone ID: PAT_MRT4530_2831C.1
atggatgacctggccgccccagtcacagccatacaggtagagagagagagatcacttcacaagcaagaatggaagcacctccttgttgccactccaagatccttcactaccatagctaagcgagctactcgtatcctcttctctctctgtttctgctcttccgacgagtagagcataatccatccggaggaagagagtgcaatcgatcagctgagttaagcttgcctggagatcgatcgatcacagagctctcccccggcgggggggggggagcagacgaaggattagcagctgagcccggtggccgtgaccaacttgcggcaacggtcgctacggaggctctgcaccagcggcgacgacaactagtggttctacgccgtccactggcgaaacatcaaccgcaactacccctggaacaaccctgccgattctcatccgaggacatgggaggcgcagttccagtctggtatccagaccatcgccctgatcgctgtcagagaaggcgtcgtgcagctcggctccatgaaaaaggtggcggaggacctgagctacgtggtggcgctgcggcggaagttcgggtacctggagagcatcccgggtgtgctgctgccacacccgtcgtcggcggcggcggcgttcccgggagggccgccggacgccgcggggtggccagccggaatgatggtgtcgccgccggtgccaccggagctctacgtcgacccctacggcggggcggcggccggggccgtgccgccgccgtccatgcagataatgccgtcgatgagcagcctcgaggcgctgctctcgaagctgccctccgtcgtgccggcggcggcggcgccctcgccgccgcccggggtcgtcgtccatgccacctaccggcgccgccgccgcgtcgtcagcgccgcccaaggaggaagcggccgaggacgactacgtccattgccacggcatggacatggcgacgtcgtcgaccaacggcggcggcgagagcaccggcggcgctccattgccgtcgtcctacttcgtcaacgtgggcgtcaagcccagcgaggggttttagcctcagtccctagctaa

SEQ ID NO: 23220 - DNA, 599 bp, Oryza sativa
  Clone ID: PAT_MRT4530_28320C.1
ctcacattaacctcacaaccctagttcggcgagagccggaagctatcaagctaagcgagatacgaaggaaagcggttcttgcagcagaaatttcaaggctttgccgccaaatttggcccaagtttggctcaaaatccaccattgcaggcccctgcccctcgggaggctaaagcgagacgaaggccatgtcgcggcggtctgggtatcgcgcggcggagcaggaagaccgccaggttgatctgatgggcgactccgacttcgacgacgacgagtacggacaacctatagagtccaaagaagatacgtcggcggtggatgtgaagaaagggaaggacatacaaggaattccatgggataatttgagcttctcaagggacaggtataggaagactaggatggtacagtacgcgaactttgagaatgtacccaactccgggaaaaattcagagaaggtatgcacacctgtagataaaggggcactctactatgagtttcagtacaacacaagatcggtgaaaccgacaattcttcatttccagttgagaaatttagtatgggcaactactagacatgatgtgtatcttctatcacaacgttct

SEQ ID NO: 23221 - DNA, 195 bp, Oryza sativa
  Clone ID: PAT_MRT4530_28321C.1
tctgtggttcatgtaccgtgttggtatatgcactagcttgaaccactgtctctttgtgttcatataccgtgttggtatgtatgcactagcttgaaccactgtctctgtgttggtatgcccaccaatgcactcttgtctttgtgatgatgcataaataaatgaataaaagataaataaaaaaaaaaaaaaaaaaaa

SEQ ID NO: 23222 - DNA, 3203 bp, Oryza sativa
  Clone ID: PAT_MRT4530_28322C.1
atggaggcggcggcggcggcggccgccgtgccgcgaggagctgcggtgcaagcgctccgacggcaagcagtggcgatgcagcgcgccctccatgcccgacaagaccgtctgcgagaagcactacgtccaggccaagaagcgcgccgcctcctccgcgctccgggcctccctccgcaggtcctccgcctccgcctccgccgcgcggggcacgaccccgcctgcgcggatggcggtcgcgaggcccatctacggcagggtcgcgggggagccggtgtacgtggcggagccggcgctgccgccgccgccgccgccgccacggaggaggcagccggtccacgggctgcccatgggcaatgctgccggcgcgcgcaccgcggcggagctggtcgggaggggctcggcggggctggttgcctgcagctcggcggcgggggcggcagcggccgcaacctgccatcagtgccggagggtcgctaataccatttgttgtacaagctgcgacagaagggggtactgcaccaactgcatctcgagatggtactctgatatcccaattgatgatgttcgaaaggcaagggttcaggagatatctgctgtagataagttggaatatcttcatagcattctggcatctgtccttccagtattaaagcagatttattctgatcaatgtttcgaaattggtgttgatacaaaagcttatggacttaggacagatataatcagggcgaaggtcaatcctgatgagcaaatgtgctgtgatacctcaaattatcctcgcagtgacttctgcaaagtgccagtatttgattatcaccgacactgcccaaggtgtttgtatgacttatgtcttgactgttgtcgagacataaggcgatctaggaccagtgttgcaagaggagaatatgctgaaggtcgtgtggtagatagaagtaaagatacttcgaataaaagagcaagaatggaaccatctgcagaaagtgcaaatgataagtcagtcccacaacgaagggacataaaaaatattgacattagatctttattccctacatggagagtcaataatgatggaagcattacttgtgggcctcatgaggctggtggttgtggctcctcgaagttagtgttaaggcgaatattcaaaataaactggattagtaagcttgtaaaaaattctgaggaaatggtcaatggttgtaaagtacatgttcttgagaatggatgctcatcctgcaatgatggcagaacattagagttaactggtcatcgtaactttggtgtctcaacatgttcaaataatggtggtattgatcggttctgtgtgttctctcctgtattagaggacttgaaatctgaaggtattattcattttcgtaaacactggataaaaggagaacctgtagttatcaggaatgcgtttgagccttctctgtcatcaagctgggacccactaaatatttggcgaggaatccaggaaatcatggatgaagaagtggatgacgatgtcattgtcaaagctgtggattgctcaaaccaagcagaggtggatattgagctgaaacagtttatcaaaggttattcagatggtcacaagggggaagatggggaattgatgatgctgaaattgaaagagtggcccccacccagtgtattggaggagtttctgctatgccaaagaccagaatttattgtcaattttccattagttgattttatacattccaggtgggggctcctaaatctttctgctaaattgcccccagacaccctacaacctgaagttggcttgaagctgttaattgcatatggaagacatcaagaagctggtaaaggtgattcagtgacaaatctaatgattaacatggctgatgtggtgcatatgctaatgcatacagccaaagggcatgacgtatgtccaaagaggctacaacctgagcgatctgaaaagattgccaatggaatgacaatgcatgtaaatgctcatgcacctgttcaaaatttgaatgtggatatgggggaacaatcacctgaccatgtaagctcaaagtttgatgaaagagcgcatgcgtctgccttgcgattacaagagaagtcttcagatgccaaacttaattgtggtttcgaaggctcttcaactgagttatcttgctcgtcacattcagaggaaccaaaagttaatggttcagaaagaagtcaggctggttctgtttgggatgtgttccgcaggcaggatatttcaaagctgaatgaatatttaactgctaactgggaagaactggcagctagtagtcaggttaagaatcctatttatgaacaatctatatatctcaacaagtatcataaaaggatactgaaggatcaatatggaattgaaccctggacattccaacaacatatcggtgaggctgtatttgttcctgctggctgcccattccaagtgaaaaatctccagtctacggttcaattggctcttgatttcctgtcaccggaaagtttgggggagtcggcccgaatggcccaggagattcgctgcctaccaaatgatcatgatgcaaaactgaagatgctcgagattggaaaaatctctttatatgcagctagttctgctgtcagagaaattcagagaataaccctcgatcccaagtttaatctagaccttaaattcgaggatcagaatctaactcaggcggtttctgagaacttggctagagtcaccaaacaacggaatgtaccatgcagctgagatactccatttaaattagatatagcaattgtacatgtattacatggtgtcatatgaaaggaacacaatgacacattctaattgttatcagatagcataagccctcacctgtatattggaattggactaggactaacggctgagctcatgtaaacagaataaacgtggagcaattatttagcattagattgtcagaatgagatttactgggttgcttagagactgtcactttgatacaactaattcttctgccgcttctgggagaaattttacatctgttgactgttattaagtaactttgcttaacatgttgaacttgttacagtgagcaatctgtattctggagattggcactgttttatcatggtgaatgtgcattttctcgaaagagaactagtcaccaaccaaagcaaaaaaaaaaaaaaaaaaaaaaactcgagactagttctctccctcgtgc

SEQ ID NO: 23223 - DNA, 367 bp, Oryza sativa
  Clone ID: PAT_MRT4530_28323C.1
cttggtttttctttttttttttaacattttttacagggacctgcacactactcaggggagcggtgccaacagcaaaagagagggaaaaaagcaaacacggcagacagctggggaagaaaggaggacactaaacgccgaaaaacaaaacaaggctagcgaaggggagcgcaaccagagatttttcgaactgaagaggggaactaaggggccgacccaatgaagggataagcgcggcccaccccagggcagcgaactgaagggaagaagcaagcatattcagcgcagccggtgaggagtaggaggagcacgaggagaagaacgaggaggagcgaagaagcggtgacttctgccatcggctgcggaaggg

SEQ ID NO: 23224 - DNA, 426 bp, Oryza sativa
  Clone ID: PAT_MRT4530_28324C.1
atggaggccatggagcaggcccacatcgaaatggcgtggtggagtcgggggcgccatcctaggggacccggttgccggcggcctagactggtggaattgggggcgtcgtcgggagcaacgcggcagagggaatccaacgacaccggccttggccctcgacgcggtcgtccccccagcagctgcgtagacggatcgctcgggcgacggcggtccccggccgtagaggtgacgtcgtcgtcattgaagcggaagcagttgggcggtggtggcagtcaggcaaccggcggtgatgaggtctccggggaaagggtgaccggcggtgcgatggtgtctgaggagaggcaggggtcagcatggccggcagaggagtcaaggtggtggtggtcggctgagggtgacgttgacagtggcggcgcagtcccgtga

SEQ ID NO: 23225 - DNA, 316 bp, Oryza sativa
  Clone ID: PAT_MRT4530_28325C.1
gcacgaggctcgagttttttttttttttttttttttttttttttaagttagtgtaggaatgccttctctttgttttgtttgcaatgtaccttaatagcactggtacaagattgattatgtattgcaatacaagtaggagatactagttcatcaaccaagagcaagtagctgtaggcaggtcattacgttaaatagctcttgggttcttggcagtctggtaaatctgttgatgcaaatatctttgtgttttctgactgattcctgcttctctctcagcgcaacaatggccatctatgatgtactgcagctcgtgagg

SEQ ID NO: 23226 - DNA, 1187 bp, Oryza sativa
  Clone ID: PAT_MRT4530_28326C.1
aataaagaggaggctggtggagaacccctcccgcattgggttttgacccctccccctctcacttgccctgcccaagcccaagagaggaatccaagctgctgcattgacggcggcggcggcggcggcggcgaggagatcgggagcaatggcggaggaggcggcggcaggcgggctgtactactgccacatgtgcgcttcgacggtgagcgccgtggcggcggcggagggggaggtggagatcaagtgcccgtactgccacagcggcttcgtcgaggagatcgagtccgcgcgcggcgtcgccaccggcggcggcggcgcgatctcctccgtctgggcccccatcatcgacggcatggttggcggcggcggcggcgacgccgtccgccgccaccgccgcagccgtcgcctcgcggacgccgccggcgcggacgacggctactaccgcgacctggccctcctcgacttctccgagagccggcggcgcaccgccgcgctgctgctgctcatgcaggagtttcgggagcgccagctccagcgcctcgagtccgccaccgccacgatctccgccgccgcggccgaggccggcgccgtcgtcgggacctcgagagacgcggagggcgtggcgctggccgactacttcctcggccccggcctggacgccctgatgcagcgggtgggcgacggcgacgcggggcggcagggcacgctcccggccaagaaggaggccgtggagtccatgccgacggtggaggtggccgccgggggcgactgcgactccgcctgcgccgtctgcctcgaggactacgccgccggcgagcgcgccacggaaatgccgtgccggcacaggttccacgccaagtgcatcgtgccgtggctcaagatgcacagctcctgccccgtctgccgcttccagctccccaccgacgacgacgacgactcctccaagtccgcacgcggcggcgccgcccactccggcggcggccggcggttgtcccagccgtcgccggcgtcgacgggggaggcctgggcaggttgccggccgtgaaacgttatatttgtagtggtttttatcatgctgaaattctacaacacttctacttgaaccgagtctctaattttactttgtatttgacggcagtttccttcgcgcaatatatatgaatagattgttgtatccactattgccg

SEQ ID NO: 23227 - DNA, 629 bp, Oryza sativa
  Clone ID: PAT_MRT4530_28327C.1
gcggcggcgggcgctcaagggtccaagcggccgcggcggtgagcgggaggagaggcagcaacccggcggcggctcggcggcatcagcgacgtagacgaaagagggagccacgaaggactcgaggaaggagaagagcaagaccaattcgtcctccaaaggctcgctgccgccgccgtccccgacgcgacgacgaggcccactatggtggccacggtcgccgcattccttgagtccagcaacttcccccgcgtgctcacgacgctccagtctgaggccaagctcgagtttatggcgctattggctcgtgctgtgccttgccattttgggcacgccgtgaaatgagaggatttcacacaagacgaagagaaatgggagaaagagaaagagagagaagggagaaaaagggaggaaggaaacaggaatgacatgcgggctccacatatcagtgggtctcacattattttggtgtgaatgacaaatggacccgcacatattttttttaattctataacacataagcgccacgtcaactccacgtggaccgcagactgagtcaacatcgctacgtagacgccatgtcagcgaaaccgccctccaaaaccgccgagggagtcaaattgtaccggttt

SEQ ID NO: 23228 - DNA, 317 bp, Oryza sativa
  Clone ID: PAT_MRT4530_28328C.1
gttattttctctggaacccttctagcttgcaccatgaaagacaagcctcatttgatcaaagcaaaggatgggcacgtcaatctataatctagactggcacaaggagaagaggctagggatcctgtgcttgagatgatagaacatataagacaactaactatggttgtcccacaggcaggaacggactatctaagtcgggtcactggccaaggcaaaaacattctttaggtgaagaggagcttgtgtatcttccatatgaaaggtaagaaatgatactggatcctgaaagcaagactgagaatgttgctatcgaagga

SEQ ID NO: 23229 - DNA, 1362 bp, Oryza sativa
  Clone ID: PAT_MRT4530_28329C.1
atggccggttttgatctaaatccacccatcatcaattgggacgaagttgaggatttcaatggagatatatctgatttgaactatgactttgtttgggattatgacaatgaagatggtgaagatgtcaatggccgcagcagtggcaacgacggtggctgcaacggcagcgacgacgatggcggcggcagcggcggcggcgacgacgacagcggcggcggcggcgatcaaaccaccgatggagcagtcgatgcaggtggaattgaagctttcgaatcgaagaagaagaagaactgtggccgcaagaaactttcttttaaccctgatgccatcaaagatgtaccgcttaggcaacgccgaacactccgtgacctagctaacgctttgcatatgtcaaaaaccacattgtttaggcgtttgaaggaaggaaggtttaggcgccatacaaatgccataaagttcaccttgaccgaagataacatgaaggcccgtgtgcaattttgcatacaaatgcttgatagccaaagcataccggacgagccaactttcaaatctttgtacaacattgtgtatatagatgagaaatggttttataggacaaagccggacgaaaattattacttgtcacttgatgaaccgaaccctcgaagaaatgtgaagagcaaaaatttcattgataaggttatgtttctagcagcgaaagcccgtccaaggtttgatgagtatggcgaatgtacatttgatggaaaaattgggatttttcccttcacttactgggaggcagccaagaggagtagtcgcagtagggagaggggaaccatggagctcaaggccatgacatctgtcacgagggacattatccggaactatctcattgaaaaggttttgccggccatcaaacataaatggcctaatgaggaacgaggacttccaatattcatccaacaagacaatgcgaagacccatattgcagttgatgatcctgcatttttaagtgttgcacaagaagatgggtgggatatacgacttacatgtcaaccaccaaactctccagatcttaatgttttggatttaggtttttttgcagcattgcagtcattgtttcagaagtcatctccatcaaacatcgaagaaattgagacaaatgtgatcaaagcatatgaagaatatccggcgaatagatcgaatcatgtgtttcttactctacaagggtgcatgagagagattatgcttgcaaaagaagggcagcactatgcaatcccgcatatgaagaagagatcattagagagaaatggtcaacttccaataaggttgcaatgtgataagcaaatttatctagatgcggtagatttcatcaatacatag

SEQ ID NO: 23230 - DNA, 459 bp, Oryza sativa
  Clone ID: PAT_MRT4530_2832C.1
atgtggaaggtgaacaagccgcacccgcgggcgcgggcggctgacggccgggcccacttggcagccgcgagggcgcacccgagggcggcctcgccggcgcggccgacgggagtggcgcgcacccgcgccccgatggtcgccgccggcgaccaacggcgcggcggagtggcacccgagagagaggaggaaagggggaaggcgaacggcggtcttcggctcaccccgggacaacgacgacgacgagaatggcggccggagcggaggaagacggcggcgcggttcgggatgacgatggcgacggcgctccggcagtcggcggacggagcggagcggcggacggggtcggcggcaacacggcgaagcggatggaggggtcgccgagtaaggaggaacgtcgggaaggagagagggcggccgaggaggaaggaaaccggccgcggggatttcggccgccattga

SEQ ID NO: 23231 - DNA, 297 bp, Oryza sativa
  Clone ID: PAT_MRT4530_28330C.1
atggagattattgggaagagtaggcttgttgcggacgtcaaggatgcctggaagtcgtggccgagggtggagcgtgaggagtcatatgcctacggacgctggcctgttgacggtgaagttgagagctccgaagcagaattcggcccctacagcgaagcggagtgtctggacagattcgaggacaccggggcccacctggacaagttggccggagttgttggcgaaaaatttgaaggagttgaaggagaaaagtttggcggtggggaaagtggcggtttcgcgaacgtggccccgtga

SEQ ID NO: 23232 - DNA, 609 bp, Oryza sativa
  Clone ID: PAT_MRT4530_28331C.1
atgcggcggcggagacacgggagaatgggagggcggcggcagggcgaggcggcgtcggcgggcgagcgcggtggcggagaggcggcggcggcgacgacgccgtcgcggctcccactccctctcccactcctccccaagcagcggcggcggcggccaccgagcagcggcgcgacgagggcatcgttcgccatggcggcggcacttgggctcagcggcggcgaggcgttccggctgtcggcggatgcgggcgcgggcgcgctcaagctgcacaaggacgacatcaccctctggtccgtcgacggcgccaccgtcgccatcgttaatgctgctaatgaacgaatgctaggaggtggaggtgttgatggagagacgcggggctggcagattctcctacgccgacgagcttctcaaggcgttctgcgctgcctttccttcttcttcatcgtcgtcgtctctgccgacgcctgcgccgccgccgacgcagccgcagccagagcagcagaaaccagtggtggtggtggtgtaggagaatctgccagccccgacgacggcctctccggcgaaggcgaagctggcggccgcgaggcaggtgccaggcggcgtggctag

SEQ ID NO: 23233 - DNA, 1073 bp, Oryza sativa
  Clone ID: PAT_MRT4530_28332C.1
atggcgaggcttcctcacctctgctctctctccgctcccgttgtcgttctgctcccgccgctccgccgctccgccgctctctccatcttgctcgccgccgatgataaagcaggaggagttggtccaccgcggaaaagaggatgggccgtgtgtccagttccgccttccgaactccaaagccttatatttggctgtgggctacatcgctctgtgatggacagccggtcgacggtggggaggaggtcgccggcgatgcggtggcggagacacgggagaatgggacggcggcggcagggcgaggcggcgtcggcgggcgagcgcggtggcggagaggaggcggcggcggcggctgcgacgcgggaagccgaaggcgacggcgtgggtgagcgtggaggcaaagtgaagaaagctcacctcctcttggatctagccacgccgcctggcacctgcctcgcggccgccagcttcgccttcgccggagaggccgtcgtcggggctggcagattctcctacaccaccaccaccactggtttctgctgctctggctgcggctgcgtcggcggcggcgcaggcgtcggcagagacgacgacgatgaagaagaaggaaaggcagcgcagaacgccttgagaagctcgtcggcgtaggagaatctgccagccccgcgtctctggactgggcagggctctacgagttcaggtccagcagctcgatgtatagctccatcaacacctccacctcctagcattcgttcattagcagcattaacgatggcgacagtggcgccgtcgacggaccagagggtgatgtcgcccttgtgcagcttgagtgcgcccgcgcccgcatccgccgacagccggaacgcctcgccgctgctgagcccaggtgccaccgccatggcgaacgatgccctcgtcgcgccgctgctcggtggccgccgccgccgctgcttggggaggagtgggagccgcgacggcgtcgttgccgccaccgcctctccgccaccgcgctcgcctgccgacgccgcctcgccctgctgctgccctcccattctcccgtgtctccgccgccgcat

SEQ ID NO: 23234 - DNA, 128 bp, Oryza sativa
  Clone ID: PAT_MRT4530_28333C.1
gcattgagatcggaaagaacaccaacggcgaaagcactctgggtgggccgacactgacactgggagtgataccaaatggggaggtctaaaggcaggtcatgtaatgatggagccaaagccagtttttg

SEQ ID NO: 23235 - DNA, 198 bp, Oryza sativa
  Clone ID: PAT_MRT4530_28334C.1
atggcgctcgcggtgacggcggcccgcggtggaggcaaggaggtcgtcaccgaagaggctgacgtggcgtggaggaggctccgttgccgaaaggctggagcgggcgttggcgatgacagggaggctattgcagtgaatccggcggcggctgaggccaaccgagaaggcgtgcagagagcacaacacggaggctcgtag

SEQ ID NO: 23236 - DNA, 309 bp, Oryza sativa
  Clone ID: PAT_MRT4530_28335C.1
atgcgctggattggagaatttgacctcctttccttccaccgtcttgctgagttgtgcggcaggtactgccgtttcgccggtgatgtgaccctccaggcgtgcgccacgaatcacctcccgctagcgtgctctcgcggcatcgcgccgccgtcagcctgctgctcgcgcagtcgtgtcgtcgcgtgctccgacgctccgcggcttggctgccggctgccgcagtgccgctcgcagccttgcgccaatgcgccatcgctcgctggcactgtgcgccgcggtgctgctagccagcccgcgctcgtgcggtag

SEQ ID NO: 23237 - DNA, 3418 bp, Oryza sativa
  Clone ID: PAT_MRT4530_28336C.1
tctctctctctctctctttcctctccactttgaatcaatcaaaacggagaagaagaagaagaagaagaagaagaagaagaagacatcaagaacacgtggagcagaagcttctctgccggcttctatcgtagctctcaaggataaagaaaatctgctgcagaggtacaagatctagtggcagaacatgatgagcaatcttaagcttggggtggaggttaccagtgctcatgacctcctaccaaaagagcagggcacatgcaacccctatgtcgagatcgaattcgatgaccagaagttccgcacagccatcaaagagagggatatcaaccctgtctggaacgagcagttctacttcaacatatctgatccatcccgcctcactgagaaagacctcgaggcgtatgtgtaccacgcaaaccgcgccagcaattccaagacttgccttggcaaggttcggatctccggtacatcctttgtcagccactcagatgccacacctcttcactaccccctggagaagcgcacgatcttatcccgtgctcgtggtgagctcggtctcagggtgttccttacagatgatccatcagtcagagtgtccgctcctggtcaggagttcgacttcataagcacgcctacgactgcccaagagcaggtagccgccaatgccattccaaatcctttccaggagaccagagcagatcaagtgaggcaattccaacacttaccaaaagaacagcaccagcaccgtccgcagccaatgactgcgcagccatactaccctgaaagttcatacggacaacagcaacagaaaacctactctgctgtcgggaacaaagctgaaggtcctccacctccagtcatgaggatgtatgctcaaggtccacagcagcagcctgtagaattccagctgaaggaaacaagcccaacacttggtggcggacgtgttattggcggccgggtgatccccggtgaaaaggcaggggcatacgaccttgttgagaagatgcagtacctatttgtgcgtgtggttaaggcccgtgatctgccccacatggacatcactgggagtcttgatccttatgttgaggtgcacctcggaaactacaaaatgaagacaaggcactttgagaagaaccagaggcctgagtgggatgaggtgtttgctttccctagggaagtaatgcagtcaacgtcacttgaagttattgtgaaggataaggacttcattcgggatgattatgttggccgggtgtcaatagatctaaatgaggtaccactaagggtccctcctgacagcccattggcaccagagtggtatcgacttgtggggaaggaagggcacagggataaaggggagctgatgctcgctgtctggtatggaactcaagcagatgagtgcttcccaagtgccatccacgcaggatcagaaccaattgattcccatcttcacaactacatccgtgggaaggtctaccctgtacccagaatgtggtatgtgagggtcaatgtaattggggcacaggatatatttccaatggagaaccacatacctgatgtatttgttaaggtgaggctgggccaccaaatgctgaagacaaggccagctcgctcaccaaccagaaacttcatgtggaatgaggagatgatgtttgtcgcggcagagcctttcgaggaggacttgatcatacaaatagaggatcgagttgctcagaacaaggatgaagtgattggtgaaactatgatacctctcgcaaggcttccaaggagggctgaccataagccagtgctgccagcatggtttgatctcagaaggccaggactgattgatctgaaccaactaaaggaagataaattctatgcaaaggtgcaacttcgtatttgccttgaaggtggttaccatgtgctcgatgagtccacacagtactgtagcgatctccggccaacaatgaagcagctgtggaaaccaccaatcggtctgcttgaagttggcattctaagtgcaaatgggctcaatccaacaaagaccaagcatgagcgggggtcatgcgatgcatattgtgttgccaagtatggtcagaaatgggtgcggacacgtactattgttgacaacttgaaccctagattcaatgaacagtacacatgggatgtcttcgaccatggaacagtgctcaccattggtttatttgacaactgccacatatctgcagacagcaaccacagtagttcccccggccatatggacaagcccatcgggaaagtgcgaattcggctttcaactcttgagactgggagggtgtacacacacacgtatccattacttgtcctccacccatcaggagttaagaaaatgggagaactccacctggccatcaggttcacagccacatcccttctcaatgtgctcttcacatattctcggcccctcttgcccaagatgcattacgcgcaaccactgtcaatagtgcagcaggaaatgctccgccaccaagctgtgcaacttgtcgcacagcgtctagggcgcatggagccaccagttcgcagggaagttgttgagttcatgtcagatgcccgctcacacctgtggagcatgcggcgaagcaaggctaacttcttccgtcttatgcaagtcttctccggattcattgctgcaggaaagtggtttggcgacgtttgtcagtggaaaaacccagtcacaacagttttagttcatgtgctatttatcatgcttgtcttctacccagaccttatcctcccaacaatcttcctctacatgttcttgataggattgtggaattaccggttccggccgcgtttcccacctcatatgaacacaaggatatctcatgccgatatgacaaacccagatgagcttgatgaagaatttgatacattcccaacatcaaagagtccagatctggttaggatgaggtatgacaggctacggcatgttgctgggaggatacagacagttgttggggacattgcaactcaaggagagaggctgcagtcgctgctcagctggagggatccaagggcaacatctatgttcctattgttttgcctgcttactgcagttatcttgtatgtgacaccattccaagtgattgcactctgccttggtttcttctggatgaggcacccacggtttcgtcataaggttccatcggcacctgtgaacttcttcaggaggctacctgcaaagacagattctttgctataaatattttcagagatcaatatccaattgtgtatttattttttgtttttcagtatattgttgtatgatagcattaagggaaatacattaatatttgtaattgttgcttcatctgagaggataaaataagtccagttcaacagataaaaaaaaaaaaaaaatattgaaattcaaattgcataaaaaaaaaaaaaaaaaaaa

SEQ ID NO: 23238 - DNA, 406 bp, Oryza sativa
  Clone ID: PAT_MRT4530_28337C.1
tcctcaacttgttgcactcctagagcatcctctccttgctggaattccaggtcgccctcatgggccttttcgagggctaccgcatcaacggcctcccctgctttctcaacagctactatccttacccctgcggccattacttctacccgctcggcctttccgactacccctgtaccttcttcgagctcaaggtcaaggagatcaagaatggccgcctcgccatgttctccattgttcgacttcttctttcatgccatctttaccgtcaagggccccttggagaacctgctctaccaccttatcgaccccttcgtcaacaactcctgggtctaccccaccaagttcacgccggtctcgtaaatggcccattcgtcattgtagactactctctctctccattgctcga

SEQ ID NO: 23239 - DNA, 108 bp, Oryza sativa
  Clone ID: PAT_MRT4530_28338C.1
cctacgcgtccggccataaagtgaccatggggtacatgacaacggtggccaacactgtctatgtcctatacttcactgttatgccccgcatgctcttgcctcttgctt

SEQ ID NO: 23240 - DNA, 152 bp, Oryza sativa
  Clone ID: PAT_MRT4530_28339C.1
tagttttcgagagatcaatacatacatctcatcaatgtggggttgctatttgagagagaggatgaggcagaggaagagaggaggagaagagcacggtcgctagggctgcttgggcctggccggccgccggttgctgctggcctcggcggtgg

SEQ ID NO: 23241 - DNA, 2985 bp, Oryza sativa
  Clone ID: PAT_MRT4530_2833C.1
atggtgaacactcgcagcaacgggaatggtcccaacctcaacaaccccaataacaacaacaatggagagaatccaacccttgctcaagttcttgcacaacagactcagttaatgaacatgatgatgcagcaacttcagaaccagcagaaccagggaaataaccatgcacctccccagaacaagctagcagaatttcttcgtgtgaggccgcctattttctctagtaccactaatcctgttgaagctagtgattggttgcatgccttagagaagaagttggatttgcttcagtgcactgatcaggagaaggtctcatttgcatcacatcagttgcatggccctgcctctgaatggtgggatcacttccgtctgaataggactactgctgaacctatcacttggcttgaattcaccgctgcttttcggaagacgcatataccatcgggagtggtgtctctcaagaagaaggagttcaggtcgctcacccagggatctcgctctgttacggagtatctgcacgagttcaatcgtctggctcgttatgctccagaagatgtgcgcaatgatgaagagcgtcaggagaagttcttggaaggacttaatgatgagctttcttacccactcatgactggagattattctgatttccagaaattagtggataaggctattcgtcaggaggacaagtataatcgcatggagcagaagaaacgccggattgctcaattcaagatacaacaggggaataatcagaagccgcgtcttattttaggacaccagtctatgccacatggaggttcttcgtctgttgttcgtccgcagcgtcagttcttcaacaacaatgctggcaacaacaaccgcaatcaagctccacgccttattgcagcctcgacacagcaacaacctgccaagagggagcaaggcagcaagcttgtggtgtgtttcaactgtggagacccaggacattatgctgacaagtgtccgaagccccgacgcgtgaaggttgtccctgcccagagcaactctaccgcaccagtatcaaaggcccgtgtcaatcatgttgctgctgcagaagctcaagatgctctagatgtgattttggacgatttacctgccaatgagttggcagaagttaagaggcaagtagatgatttgcttcagaaaggatacatcagaccgagttcatctccatggggagctccggttatttttgtggaaaagaaagatcatacccagaggatgtgtgtggactatcgtgcactaaatgatgtgactatcaagaataagtatccactacccagaattgatgatttgtttgatcagcttaaaggtgccaccattttctccaagatagatcttcgatcagggtatcatcagttgagaatcaaagaggaagatatacctaagacagcttttaccactaagtatggattgttcgaatgtactgttatgtcttttggacttaccaatgcccctgctttcttcatgaacttgatgaataaggtgtttatggagtacctagacaagttcgtggtggtctttattgatgacattcttatctactcccgaaccaaagaagagcatgaagaacatcttcgccttgcattagagaagctacgagaacatcaactgtatgctaagtttagcaagtgtgaattttggttgtttgaagtgaagttccttggtcacgtcatctcagccggaggagttgccgtcgattctagtaatgtggaatccgtaaccaactggaaacaaccaaagacagtttcagagattcgcagtttcctaggcctcgcaggatattaccggaggtttatagagaatttttccaagattgctaagcccatgacacgactgcttcagaaagatgtgaagtacaagtggtcggaagaatggcgtgacattgatcaagttagagaagcccaaattaatgatcctgatattcaagagatcaagaagaatatgagaagaggaaaagctatcggtttcttggaggatgagcatggaactccgtgcgccgccgtcgctccagccgtcgccgtcgctcgggaaggccgacgtcgtgttcgccgtcgcgtcgccgtcctcgtcctccccttcgccaccgccgaagaccgccggagcgtcatcgccgtcgtcgacccgaagagcttcgccgcttcctcctcgtcgccgtcgccgtccgttgatcttccgccgtcgttttggtcgccgcgaagattggagacaatccccttcttcgttgctgacattactgtccctgccgccggccgccaccccgccagatcaggccggggcggcacggatctagcggtcgccgccgccgccaccggggcgactcccctggccaccggagcaggctggcgagaagccccgccgccgccatccttacggtctttgctggcgaccgctcaggcagcggcgaggtggaggaggaagaaggagcgggaaggggtggccggacttgtcgcctccggagccgtcccgggggtagggcgacgcaagagcgtgacggttgacgctgtgaggtcccttcagcggtgggaacttcatggctgcggatcaatggaggcggtggcgatgaccacggatcctgaggcggggcccccatttgccaccccttatggcggatctggctggtggcggcgcgccaacggtgttgccaggaggccggtggctggggccggcgcgactcgggaaggtggcgacaacgggcagccgaagaaggagaatagatggggaccgacggcagcggggatggagatgatggcggggatggaaggcggcggcgaggatggtgacagcgggccggatccagtcgcgccggagtcgggcagatctggtgtgaggcaagcccgcagtggtggcggcgctgcggagttcgcgggctcatggcgatggtggtggcagcgactggacagcggcgacaacaggtggctggccaacggtagcatcggctgccggctactgtggcaacgacgctag

SEQ ID NO: 23242 - DNA, 1032 bp, Oryza sativa
  Clone ID: PAT_MRT4530_28340C.1
atgagacggcggctgttccggcggccactgccacggccatggggtgcatatgcgcggcgatcaaggcggtggcgggttccggccgtcacggcatggtacggccacgcgcgccgtgccgaggtctgccgcggcgcgcggtggggccagaagaagaggtgggaggagggaggtggtggtcgggcgcgggggtttggtttccacggcgaggttagttcggtgtgggtggtagtggtggtggcaactgcccattcggtctctccccgcgtgcgtgccgctgacgggcgggcctgcccgccaccctcgcttacgggtggggcccacccgtcatccccgtcctcccgccgctctcgccgccccgcccgcgccgagcgccgccgccgccgccgccgaatccgccgcatcccgccgcccccgcgtgcaattaaaatcgagctcgcgccgtcgtcctctctctcctctgtcgccgacgacctccggccggccctctccgctcgccgggaccgtctcccgcctcggcgtcgccttctccggcttcgtcgcatcgccgctgaccccgtccaccacctcgccgagctcgccgaccgccggagcgccatcgtcccagtccacccgagccgcgccgccgccttcctccgctccggccgcctcctttgtcgtcgccgtcgacccgggcgatgctttattgagttccacggcgagattcgcgagagttgtggtcgatctcgacgagagttcatcactaagatgtcgccaatcgaaattacaccaatatattctcttttggatttggatatgcacaagatggatagaaaagtggaagaagaagaagaagcagagccaatgatccaagagatggacgagctggggttgggggagagtatcactgacgaggagtaccttgcttgtctcggaaatctgcctcacgggcctcctcgtcctgacaccaagactaaactacaaggtgaacaactacatgacctctacattcgccacacagtgtatcgcctcaaatactacaaggtataatactta

SEQ ID NO: 23243 - DNA, 192 bp, Oryza sativa
  Clone ID: PAT_MRT4530_28341C.1
atgaactccacgacgcagaacacggtgtggcaggccgggccgggcagcaccggggcgattgcgtcgcacccgacgtcggggcagaacttgcggagcatgcagaggcttgatttcttgtccgggaagagcgccggagcctccaactccaggatgccgttttcgtgggcctacagcctcaacgcgaaggaataa

SEQ ID NO: 23244 - DNA, 813 bp, Oryza sativa
  Clone ID: PAT_MRT4530_28342C.1
ggtcggcagtctgggccgacttcgatttctgtcgcacatccgtctcccacctgactcgttctaatcggcgaagagaaacccacacaagaggaagatggcggcgccggcgaccggcggcgggatctccgccgacgtccccatcctccactcggagaacctcaccagcaacgtcaaatccatctactacagtcggacattcttgtcaattatcagtggagttgttgccggaatctggggattcacaggcttgatgggattcgtgttctaccttcttgtaatgatggtggcatcccttgggcttttgctgaaggccaaattttcaattcatacatactttgacagctggaacaggattttgattgaaggagtttttggtggccttatgtcttttgtgctgttttggacatttgcgtatgatattgtgcacatcttctgatgcacggcataaagaactcaactccgaagacttgaagggagctgtggggtttctccttgaactgaattaacgtgtaaccgcaccaaccctggaggactacattcgttggactgctgtcctgttttgttccttttttttccactccacatgtatcagttatagctctgtactttagaaagatgcaagcttattaagtttaatttacaaattgatgtagaagtgaatccaattgctggcaagtatggtgcttgatcttttgaacatcagaacttgctaggtaggggacaactggtcattgatacatctattgctgcccagcgtgctgatactatactccactaatagtatgttatattgttaaaaaaaaaaaaaaaaaa

SEQ ID NO: 23245 - DNA, 870 bp, Oryza sativa
  Clone ID: PAT_MRT4530_28343C.1
atgctggccggagacgagtccgaggacgtcgcgccgctcaagatagccgtggacgtcgtgccggccggagacgagcctgaggacgccgcaccactgctccagatccgcggaggacgacgaggcaactgccgaggttaccgtcgtcagccgagccgccgccgccgtcgcgtgggccgctgcgtcgccatctcgaggctaccgcgccgcctccttcgtcgtggggataaggatgaggaagaattccatggcacagaaaaagggtctggcagggcagggcaggcaccagctggatgtgatgaggatatggcaatggcagccacatacacggccgtgcaagcccatgtgtcgatacgcgatcgtggtacagcgggcagcggcgagcccttctttttctcctcctacagggtcactggaaacagggcaccgacgcgtccatgtcgcggcacccgcgcccccacgggccacggaccggaggatgataaatactacttgctacatttcacaatacccgtgttagcagctaacgccttccaccactcatggactgtcaaagctatgctccacattatcagtttgatctgctcaagcgagatccatgttctctttgtgtatctttgtcccgttagaagatggaaggacatcaccaagagccaaaaacgatgctttgtaagcggatcccgccttatactccccatggcttgtgtgagcttccaagtgattccatcatgtttgtcggcagcaaggttcaaagaaatttcttttctcagcatagttttatggaactatttctactggcaacctagaatatatggaatgaaagaaatggccttatttttcaaggtattcagccatcagttcacaattggatga

SEQ ID NO: 23246 - DNA, 1272 bp, Oryza sativa
  Clone ID: PAT_MRT4530_28344C.1
atggcggcgccggctgctctccggagcaactcgcggccctgtgggcggcttcggctccccggtgccgcccgcggccctcagcgccggttggtgtccgcggtccagctgcagccccgcgggtcgggaatgaggctgcgttggaggagctggtgggtgccactgaggcttgcgcgaggggccggaggcggggtgctgggattcgagaccagcgaggtgccgctggcggcggcgtggtagtcgggaaatagaggccaccggtggacggagctcgggggggtgctgatgttcgtcaggccgtcagtggcgtcggcctagcgaatgaggatggcggaaactctgatactctggaagcacgttatccggccgttgcaaataggctccacggggactgggataatcgtcctgctattgcaatcttcgctggttgtctcggaaagggatggaaaactggtgcaggcgccacattaggcagcggtggtagagaaattgcatctactaccattggcaaagccttgggattaagagaaatccagttccggcaaaatatctgagctatcttggctcttgcagttatatttatcctctattgtaatccttaggcccccttcaatgcttacgaaaggaggcagcttgtacctgtaccagcacaaattagagaccttccaccaagcaatgaagatggctgtcactctgttcggtcgtggaggtggagtggccactgcttcaggaatcaggcgtcggcagatggagcgccggtgtattaggccgcagaaggttggcggcggcgtcgctttgtcggagatcggtgaggtgtcgaaatcggcggcggagggatggcagcatgagtacgaatcgacggaggtcgaggaggaagagggcggtgcggtttccggtgtcaacgtcggaggcaggtgtcgaagaggcgctcgtgacctgggaggggtgagcgcgatctgggtggggagggagtatgatgcatttgaaataggctttataaccactgatgatttcacaaacgctgatattctggaagcaacttatcctgccattgcaaagaggctacatggggactgggttactggtcctgctattccaatagtcactggttttctcggaaagggatggaaaactggtgcaatcaccactttaggcaggggtggtagtgacctgacagctactaccattggcaaagccttgggattaagagaaatccaggtcttttcaatttttgaagatttgggcatctctgttgattgtgtagctacaagtgaa

SEQ ID NO: 23247 - DNA, 2213 bp, Oryza sativa
  Clone ID: PAT_MRT4530_28345C.1
ttttttttttttttttttttgattcgaaaagatgttaagcgctgaagaaatgtacaaagttcagtactgatgcaaaagttacatttgccgaagagggctatattacaagtgagttcaataaatctggcaaatgcagatctactgagcaatgcaacttatccaataaatctgtaatcagatcattactggtacaaaggtgtatctcccagaatacatttacaatggcggttggaagccagcagcataagcatatagtttcgacaaagcgcattgaggcaagcaaatatttacccattttttctgtcgatgtacagagcaatgcttttgcagatacccgatcgtcgcgatgcttcggtgctgaagatgaacagcacagataactcatggatccatcaggttttctcttccacgaaactgaaattagtttggagccacttcacatggacctccagcccggcgtctcggaggctcctcaacacggtcaggtacagcctcctgtccagtcgtgtgccttgcatatccttcagaagctcgatgagctcgttgaatcggctgcatttagagaacacccctaccatgagcccagccagggccgtgtccacctttcctcctgtctccctgaactcctggtacaaatccatgcaccggtccagttctcctgaccggttgaacgcgttgatgatcgcggtgtagctgatcctgtcaggctgaatcttgcggcgcatcatctccttccagatcttctcagcctgcctcgaattcccgagtcttccgtgcatgtccaggagggagttgtacacccagatattaggctcgcaccccttcttcttcatcacagcaagcagcctcatcgcgtccgacgctctactgatcttcccatacatggagatcatgttaccatatgcaaccacacacttgtcaaagcctcgatcgatcatctccgagaagaccgattccgccctgtcgctccgcccaagctggcagtaaacgttgatgactgatgcataggtgacctggccaggctcacatcctaaagcaatcagcttgtcataagctctgatagccggcttgaggcctctcctcttcacaaagccattgacaatggttgataggatacaatcggtgaccctcagaccagtctccctcatgtccttggcaactcccattatcttctccactctcccggcctcaacatgcatgacgatcaccttcaggaacatgtccggatcccccagcctccctttcttccatgcttcgttgtacaggtcttctgctgcagaagattcatgggcatctgccaaagatctgatgatcgaagagtagattgtggcattcggcgcgatgccgtctgcttccatctctcgcaggcatttcagcgcatccgaggctctacctgctcgtccgagtgcgtcgcagacgatggcgtatgtctcgacacagctttcagaggggtaccatttgtgggacttgtactgcttgagcagtgaagccaccatctccggcttgcccaacgccccgcacgccgccatcacggcgcggtaggcgtcggcgtcgcgcgacaaccgagccgccctcatccgctcgtacaccagcagcgtgctccggtacatgtgcagcttgttgtacgcctgcatcgccgagctgaaggcgacagcggcaggtgcacccctcttgccttcgaggaccccgagcaccatgtcggcgagcccgaacttcctcgccttgacgcagctcgcgacgagccgcgcgcacgtccgccgctccggcatcaccccataggccctgaaatcttcaaccaggaactccagcgagctccactgcttagccctgagcagctgcacggtcagggcgttcatcgtcttcttgtccggcaggaactccggctggtgcagagccctcctgtagcactcgaaggcgagctgctcggtctgccggtcgctgcagaggccccggatgaacttgttggatatgccgagcttcggagcatccggaagcggggacaccggcaccggcgccggcgtcgaggcagacacagcatggaactcatcgggcaaattcttgggctcaagaagaggggaagcacacgacctggagcagtgcaagacgaacgacgcaagctgcctcctgatcgtccaaagcgaggtctgcgatggtgttcgtctcggtggatggagaggggggagaggaggccactccgagtagcatttggccat

SEQ ID NO: 23248 - DNA, 420 bp, Oryza sativa
  unsure (1)..(420): unsure at all n locations
  Clone ID: PAT_MRT4530_28346C.1
tngagggnttncgctttaccccngncccccnacaagcanaagggcatcaccttgggacgagaaacaccccttgttcgactaccttgagaacccccaagaagtacattcccggcactaagatggctttcggtggcctcaagaaggagaaggaccgaaacgacctgatcaccttcctcaaggagaacaccaaataaatgacacccacgaccactattactacctagacgacttcgacgcccttgtggcatgtacttttaatggcacatttgtttaagcaacgcaatagatacgcagacaggacagacgaaaactggcggcaattttgtatcactatagactagacgtagttttacggcatcgcttcgtcagaacgtcaaaaaaatggaaaattttcccctctcaaaaaaaaaaaaaaaaaaa

SEQ ID NO: 23249 - DNA, 553 bp, Oryza sativa
  Clone ID: PAT_MRT4530_28347C.1
gcacgagccgggccccttcgcctgctccgctggcgcggggggctcgtgcccgcggcgccgccgcgggccggcccgccggccggccgcgcggccgcgcgcccgggcacccggtcccttttccccaagccttcaagccctcacctcctcccctccccccctctctcgccctctcgaccccccgttgccccgtgccccccgccgccccccgccctcccgcccccccccgccgctcctgccttgtcttccgcagctgcgggtctcccgcctccgtgccctgttgccccggccttccgcttcccactcaatcccttccgtgtagttcacctggagatattggcagctgccggactctggaccccgctcctggtggcggtggccgccgcctgtctcctctaccgcagggggggagtgagcgcggaagtgcccccaggcgactcctgctgacgccggctcctgcacgtggtggctgccgcttgtttccaatacagcagagagagagagagagcagaagagcccccaatcaaatccagctgacgcggtgtccatcaattaa

SEQ ID NO: 23250 - DNA, 327 bp, Oryza sativa
  Clone ID: PAT_MRT4530_28348C.1
tgattatggtcgcgtgctaaaaaaaaaaaaaaaaaaaaaaaaaaaagacaaaaaaaaaaaaaaaaaaaaaaaaaagaaaaggtaacaaaaacaatggcggttccggcacctgtcgactactcttactcgccttttgctcggttggagttcctgacgttctctcttacgatctatagcgcactgtgtctcggtaccacccttgtccgtgttttgtcctctttgatccccttcccgtcccctccccgtggctccataagctcaggtatcatcgtatgtgacatgtgaaacttacggtgatataaatagaaataaaattatctttcatac

SEQ ID NO: 23251 - DNA, 464 bp, Oryza sativa
  unsure (1)..(464): unsure at all n locations
  Clone ID: PAT_MRT4530_28349C.1
gatcaactagctagcacttgatngatgatacancgctgcgtgcttcgctccggngtcagcgtgttcttccacgtctgcctctgccgagcaagagnatcagctagcttnaggtgcagcggctaggntaccccgtcgaggtcntcgaccattgggaggacgcacacgccgnccgggctcaccgccatacgcaccagcaattgagccagagggggacggatggcgagttcaggcatccctttatctggcatctgcgccgccgcccgacacacgtgagcggctgcaagattcatgtaggggttctgtactctactaattcatcattggtgcaattcatttgtactgtattatatccagtgttctaaatctccggagatttagagcattgattatatcaaaacacgtataacgaatcatatatatttttcgatatacaaaaaaaaaaaaaaaaaaaaaaaaaacaaaaa

SEQ ID NO: 23252 - DNA, 136 bp, Oryza sativa
  Clone ID: PAT_MRT4530_2834C.1
tcactatagttaaagctggtaccgctggcgggaccgcggcccggatttccggggttggcccaccccgtccttttggaaaaaaagggtggtttcagaaccaaacgggaaaatgggtttggcaggaccactttggaaa

SEQ ID NO: 23253 - DNA, 4014 bp, Oryza sativa
  Clone ID: PAT_MRT4530_28350C.1
atgtggaagactttgcagttatgcagctcaatccatctccggcggcatctaaggcaagaacctaagataatatgccatggttatgctaatggtgcttcagagctgaattccaacgcaaggagcttgttgaaaggtgaaatctgctacactgggaagaagaaagagagcatctctgtttccagttcaaacatcgctgtctcttcacagggcattggatttagtttggagcaaagaactggagagaagtgcttagccaattcccatttggatgtaaagctgtgcactggaattgtaaagctggttatagataagtgctcttatatttttaagagtaaagggggcatctttgatgggaactgcagattgcaagatgttcttaagcttggtttctggctctcaccagagacactccgcccattttggcgtgcttcagagctgaagcctgatgatttccttaacatcttgattggctttgggccagatgctgcagaagtgaagaaggcaatatttttgtggaatttgtactggtgggcttcgtggcagagcaaggcattccaacatcttccaaggtcgaatgaaattatggtgtcaatacttgcaaatgctcatatgcttagccaagcggaatcattgcttctcttgttggatggcaacagggttctggctgatgcaggtaaactgtttagtcaggttatccaagcgtatgcagaagctggcaaccttggtaagtcaatttcaatttatgactgtgcacaggataggtgtctgattccttcaggctcatgctaccaggtacttcttcatctactgatggaaaggagaaaaaatgacttagttttaagagtatatttggacatgcttggagctggattaggttcttacacggaaggagatattcttgatattgttgtcaaggctttaatcaagaaagacaaatttttgcaagctattggtataattcggcagttaaaggatttgaacattcaaatgagtaagggatccttatcagctgtcacacaagaattttgcaagaagaaggatattggagatatgatgaatttcttagaagagtggaggtatctacctgacttgcttctcagcaatagaattattgcctctttatgtgcaaatattggtactgatgaggcatggttggttttccaaagattggaagtcttagggtttgtgccagatgcaactacttttggaatcttcatacgttacagctgtagagaattgaagctgaaggctgcatttctatatttatctgagtgcttttctagacatattaaccctaaagtttgtgcttataatgctattataggtggtatttttaaggagggattatacaggcatgcaaagtatgtctttgaagacatggctgaaagaaaaattattccagaactgttaacatacaagatacttttggcaggatattgcagatataggcagtttgatgaaatagaacaaaccttgaggactatggaaaccaatggcataaatgatatcccgtctggaaattgtgtgctttctaaggccttatcattcttggggctagaccacctaggggtgaaagtcaagagagataatgctgcaggctatccaaaggctgagtttttcgattcagtaggtaatggtctatatttggacactgattccacaaagtttgaggcttcattggtacagattatcgattatgctctttacccagatattagcttgaatctagtcagggcatgtcggcaaggtgatatcgcaagtgctcttgtactcaaagatgaaacttttcaatggggacatgacatttctacagctagctactcagaactattaaaggccttaagcgcgagccctgctcgtgcaatggatgccattaaccttattgacgagatggcagatacacctgacaaatttgatgctcaaaatctaaatctggctgtccaaacattgagtaggaatgggaggtcagcttgtgcaaggttggctttcgacagattgcttagagatggcttccctgctagtcaagatacctatacttatttgatgatagggttctgcatagaaagggacatagcaggattttgggaatgttggagtctggcaacaaagcatggatggtcacctggtagcagggatgtgatcccccttatcagtcacttgagcaaatggggggtaatcgaggaagccttggagtttatcagcgtgttgctggactgttaccctagtttgtttttcagtgcatactgccaacttctcgaagagttatgcatgactggttgcacaagtgttggatgtgcaatgcttgaggctctcatagaaaagggtgtggctgtggatccttcgctaatttgtaatgtgatggaagggtttctaaaggagcataagattgctgaaacaattggaatgtatgacatgttgcttaacagaaacaaagtattaaatgtgtccacttaccaatctgcattgtcttcagtggcaagaattgatgcagaacgagccatggacttggtacaatctgtgatgaacatggaatctactgatttctcaacgtgcagttctatcgtgaagaacttattgcaatcaggaaaaataggccaggtaatgtcagtctttgaggaaacagttttggggaagaagttcaatgctaccttgctaaattcctttctacaagcatattattgtgtaaaaaattggagaaaggcagatgcagttctttgcatgatgttaaagatgcagaatagcctttctatttctagttaccgctttcttgtccgtagaatgtgcgagcaaagtcggatttccagcgcattaagacttaaagagctgatccaagatagggacaagtcaacagaactaattttatacaatattctgattttttatcttttccggagaagacacattttacaggttcataatttgttgaaggatatgaaaagcaatggtttttctccagacaccaccacttatgacttccttgtcaatgggtttcacaagtctggagatgtcgatcattcaattaatatgcttgattcttgcattgctcagggattaacgccaagcaatcgtagtctcagagtagtattgagtcaccattgcaagttaggaaaccttgagaaatcactagaattatttcatctgatagaaagcaacggatggaagcatggtttagtcattgagacaaccctcatttcaagtcttctctcatcagggaggttttctgaagcaacatcttgtctgaacagcatgaacaaaagagagctgattgggtttgacatacattttgatgtcctaatcaaggaactctgcttactgggagatgtggaaatgtctgttagtctgctaaatacaatgctaaagaaaggcaaaattccgagtgaagttagctacgactctgttgtgtacaggctatgtatgttgaaagaattcgatcaggcacttgattttcttgctgagatgcaatttgcgaacctaaaaccaagcgacatgtcctgcgatgtgcttatacagggcctttgtgccatgggaagaacctgtgatgctatgaatattttggaaatgttgaccaccattggctcttcaccatcctatcacatgtatagagttgtttttgagaactgttgcaggagtaacaatctacagaaggctgcaacacttctgcatgacatgcagcaagctgggttctcacccaactttgagatgcactggtctgttattagcaatttaagtagtaatgctaagaggactacaggatatgagaagcctattttgtccaaccttatttcttcaactcaaacaccagtggaactgacagaactccatgagatcaagctaatgcaattgaatgttccattcacatctgaaggtcatgataaggatgtactttcgattatcgtttatgttggcggagataatgctgatattatatcactccatcaaatcagagtgttactactagttgtgcttgcgcagacacttcttctagccatgaaagacacactggagctcacttga

SEQ ID NO: 23254 - DNA, 1864 bp, Oryza sativa
  Clone ID: PAT_MRT4530_28351C.1
aatccaagagacaagggatggtttatctataatttgattaaagcgacaacattgtgcatttcagatagcttatcgcatagtcttaagaaaataataagggatagttaaagatgaaactacaaagatcttatgactaacatatactatcatttattgaaatacatatcacaactaagataagttatgacatcttccaccttccagcagcatagggatcatccaaaggcaagggaatgacagcgcgtgcaaggctccacaagagtcagggttgttgtaggtgaaactttatcctcgatgtaccttcgtacagcaatggcagctcttgcggattccttgagcacagcgttgctaacaggccagcaaatcttcccattactttccccacaacacctatcatcaccacctctaagtgtgtccaacacaagacgctcaagtgagactgcggctttgacgatgcaacatgttagctcaaccaagctctttgcggagttgaaccctaagatcttcacgctcttgaggcagtcatggctgagctcgggcagctgcctcaaatgtggggaagaactttcaataatcgattcatgtgccatatcgtcctgaaaaacatccaagtataaagtctccaaggaaggagatgcatcaaggaaagaaaccagaaagaaataatcataggatggggaaaaggtccctcccgcaatctgaattgttaggtgcttgaggtagaggaatttggtaggcaacattggtatattaaccgcctcagagtccgaacctaattccatactctcaagatttggcataatggatggaagctgagcacgagcatagcacacgacattcggtcggatcatggacaagaccttcattgtcagtgtttctccaagtgagaacttgatccctccactaagggaaatactggacaaattcggagcttcacacacaatcacttgcatcctgcggcatgccataacactcaggcagctgagatgattaagtctcaactgctccaaaacaagggagttcaaaagaagggactctaactcgtcacctgtaatatgcacaccacacagatgcagttttgttaggcttctcaaggggccaagttcagccatgggatggaaggcacagaaggtaagctgaagacatcgaattgagtctcgaacaccatcagataaaagtgagcatgcaaagatgtactttttatgtagcgtaagagtgagctcttcaatccctggtgtaacagcaacctcaagccatctatcaatgtaaggatatgtactgtcctcatcagctacattaagcttcaatatcttcgcagtgcccaagtggtttctcagaatgctgtcaattttgcacttgaaatttcccctagatgtcctcgggcaaagtgttttgaaattcaagctgaggttgggatgaaatctccaggaattcagaaaggaatgagaaaggcaagcagcacgagcagcagcactcatcggcattaaggaatgtatgtgacgccagatgtcctcaggaaggtacgggagtgaataaatcagtgaatcgccatggccaacttgttcagagggggagttattagtgctacccactgtacaattcgatttatctgcagcggccgtcgtcgctgctgcacaaggtgtggccggccaattggaactgcaactctcttccatggcagatctgccaatggagctcgaagtagttgcctgctcccacgccgatggagcccttagagctggaggcggcagcatgggcagcatcgcagcgatggacggcgttcgctgctggatggatgggcgacgagtaagtcccccgcggtgacgagagtagccctcgtgccgaattcctgcagcccggggat

SEQ ID NO: 23255 - DNA, 1325 bp, Oryza sativa
  Clone ID: PAT_MRT4530_28352C.1
ggatcaaggaaaatgccgcttttgttgtttaccgttctgttattgattataacgtctgtcctcagtaattccgttaatgcattcaagagctatatatagcttgcagaaacttatctggcactatggctgaaatgagaatacagctgtgcataacaatagaacgctacgcaagtgaagaatacggctgtgcataacaatagaatgcaagtgacgtgctgagtatcttctaacgaaattgtaacggaaaagctctggaccttttctttctgtaggagggctatgcaaagattcatcatgctttctacctcaaccaccatctttgaacagctgaaatgggtgtgttgaggaacggtgcgtagcgatggatgtagggatttacggcccggcctattctcgcccatgcgctctggtgatagccagatgttacgggtgcatggtacatcagcttcaatagttgcctgtacaaagaggagcgtgcaaagttacgccttaggaatctagcaacatgatcaagtgcccagcaaagcacaggaagaagagcaattttatagtgcacattagatgtgaacatcataagggagaacatcaaatgaacaaagtccttggctacaattatagattgcaaccaaggctgaattgcagccatgttccatgctcttggtttcccataggtgacataaagagaatatgctgaggagcatattgttcctagtaatgagagtctataggctttgcttgcaatatgttttggtagaattggcaatattccaagactagcaactaccagtacccaggcattgatagagaaatgtatagtccgcccatccaaccataaagaatttgcagtcctttccgtttgtgatggttgggaggcagcagttgatcttgcacttgatcctgagtcacgagctctgacattctcattggatggtgttgctgaagaccttgctgctggtttggtggattgacttgaacttgtggaagacattggctcaacaatcaaatcaggatcgatgtaccgctggtagaacttgcgcttgaagtggtcgacgacgtcggggcgggaggcgaggtgaggcggcacgaggacgttggaccagtaccccgcccaccgcgagtcgttctcgtagtcgtacgccgcggccccgatccgcttcagcctctgcggatctccgccgcccccgccgccgccggtgctcccctccccatcccccatcgccgccggtgctcgcctccgcctcccccctcgctgccgctggggtacgggactcctccgggttcgttcgagagagtccgtcgcgtctcgagacgaagagggagatgag

SEQ ID NO: 23256 - DNA, 360 bp, Oryza sativa
  Clone ID: PAT_MRT4530_28353C.1
atgggggtggctagattaagaggaggagtggcggcagctcgacgaggagtagggtgggtggcggctcgacaaggcggaggagcggcggcagcagcggcatgggagggatggcggtggcttgacgaagaggaggagcggcggctcgacgaggcggagaagtggcagcggcggctcaacgggcgactaggtggatctggcggaggctcggcaacgaggcgacgaattcggtggcgccgaggcacgcgcatggcgcattcggcggcgtcgagatgcgcatgtggtgcatctggctctggcaggtcggcggtggcggactttagtggggagacgacggttctgcaaggagggagggagcactga

SEQ ID NO: 23257 - DNA, 435 bp, Oryza sativa
  Clone ID: PAT_MRT4530_28354C.1
ataaaattgctcttcttcctgtgctttgctgggcacttgatcatgttgctagattcctaaggcgtaactttgcacgctcctctttgtacaggaagtatttggaggagccttgtctgtgggtagaaacaaacaacacaacactcagcctcctttgttcaaatgctgaaattactctgggtttccttatgatcgtatctcttttctcgtggagacgcaacataattcagactttcatgtacttccatctattgaagctgatgtaccatgcacccgtaacatctggctatcaccagagcgcatgggcgagaataggccgggccgtaaatccctacatccatcgctacgcaccgttcctcaacacacccatttcagcttgtcaaagatggtggttgaggtagaaagcatgatgaatctttgcatagcccttctacagaa

SEQ ID NO: 23258 - DNA, 1001 bp, Oryza sativa
  Clone ID: PAT_MRT4530_28355C.1
atgacctatttggatgcgaaggtgaccatggcatctgttagaggacgtgtattgcaacaaacagcagaaccagacgaggaagaaagcatgtatttcttgaagggcgtagctccaatgagtggttctgaatattcaagttctgactcagaggcgactctggatgacattcctcctatagtgattgatgcagatttagaggaagaggaaaatatgtctgatatgtcatccatgttgaatcttcaaggtccagataagcttggcaataatcaacctttggatattgtacctttgaactccattcccttcaggcaagaggtggcttttcaccaaaaagtggattcgagtaaagaagaggttccggttcctcaatggatgaaacaactcgataactacaaagatggggactggacagtgttccttcaaataagggatgatggacatatggcgtggaaaatagttaaatattggttaccaaaaatattagaaaaagttaaccgagctatttgggtagaaactccatcatgggtcattacatgctgcggttggcagctaaagcctgtggtgctaattaatgttgacgcctacatcgacaaagcgcatatctatataactccagagcacatgtcttcatacagtttgtcattgccatcaatcatcaagtccaccaagccaagctcttgctcaagggaaatgggcttctgaaagaagctgactctgcctcatggttttgtgtaatttcgattccaactgcatatgcccaaagctgggagagggaaccacgaataagcctattacttggctagctaaactattttcccactggtacccttaagaataagtgcactctgcatcaaaccgttgatgatgcttctcagttatcagttgttttttcgttgatgtttgcttgtaactcgagtactgtaccgttaatctgcatgtgctagctatatggttggattccaatttgataaaaaaaaaaataaaaaaaaaaaaaaaaaaaa

SEQ ID NO: 23259 - DNA, 460 bp, Oryza sativa
  Clone ID: PAT_MRT4530_28356C.1
aattcggcacgaggtgaatcaatattaaaaaaatgaatgaagaaaaggaaagaaaataataaaggagcaaccggatctaggctggttgttaccaatcgggactaaaaaaagctctatctwtagtcccggttggtaacamtaactgggactaaaaatgaatttttactcctgggtatttcamccgggactaaagatagcgatttttagtcctagattcgttttacaactgggactacagggggttacgaaccgaaccggaaataaaaactacttctccaccaatactttaattaaataaattttcataatacatagtcttgtgttaaaaatattactacgtaaaacttagagtaatttgacttagactaaagcaaaacataacctgaaatggagggaataggaggcactaggggagagagctcacgcacagttagcaactaagtaaagacgcgtcccctaa

SEQ ID NO: 23260 - DNA, 544 bp, Oryza sativa
  unsure (1)..(544): unsure at all n locations
  Clone ID: PAT_MRT4530_28357C.1
tcgttcctcggagctatgagatcagagtatgtgggcgaagctcggaaatatggaagagatggctgtcttacagaccttggtgcatgcagttatcatttggatatgttctgttgcttgtaagacaactggccagctggcatttcattacctgtatacattctttcctatggatttgcaagatatacacatgatatttctcttcattttgctcaacagtgtgctgaattctgtccgaaaatctaggttatatctataaatgtttttgtactggaggtggtttttccaccagggttaacctactctagggatcaaacccaggtcagctgggcacccccacccctagtgccttactgcctgaacacattgangggttgtctattctatgtattactaataatttagtgcgtatattcataaatcttcacgtgcttgattttcttacgaattgggcacaattttcttttggtcttctttcaaatactgtcatgtttatgttgcctgctttgtatgctcagcatcaggcatttactcatctggatatgcg

SEQ ID NO: 23261 - DNA, 1524 bp, Oryza sativa
  Clone ID: PAT_MRT4530_28358C.1
atggcagcgacctcagactcgacgccggctgctgctgctgctgctgctgcttcttcttcttcttctccacttcacattgtggtgttcccatggctggccttcggccacatgatccccttcctcgagctctccaagcggctggccagccgcggccacgccgtcaccttcgtcaccacgccgaggaacgccgcgaggctgggcgcgaccccgccggcgccgctgtcgtcgtcctcccgcctccgcgtcgtgccgctcgacctcccggccgtcgacggcctgccggagggcgccgagtcgacggccgacgtcccgccggagaaggtcgggctcctcaagaaggcgttcgacggcctcgccgcgccctttgcccgatttgttgccgaggcctgcgccgccggcgatggggaagccgtcaccgccgccgccgggttcttgaggaagcccgactggatcatacccgacttcgcgcacagctggatatggccgattgccgaggagcacaagatcccatatgccacgtttttgatcgttccggcggccttggtggccatcctcggcccaagaagagagaatctgactcatccacgcaccacggcagaggactacatggtccagccaccatggatccccttcccctccaacatcgcctaccggcggcgccatgaggcggagtggatggtagccgccttcagagccaatgcctccggcgtgtctgatatggatcgcttctgggagtcagagcaacatcccaattgccgtctcatcatctatcgtacttgtcccgagatagagccacggttgttcccgctcctcaccgagctctatactaagccggccatcccctccggcctccttgtgcctcccgctcttgacgacaatgatattggtgtgtacaatagatccgaccggtccttcgtggcagtgatgcaatggcttgacaagcagccaaacaaatctgtcatctatgtttcactcgggaccgaggcacctatcacagcagaccatatgcatgagctcgcatttggactagagcttgctggtgtgcgcttcctatgggcactccgtcgtccgagtggcatcaactgccacgacgacatgctcctccccagtgggttcgagacacgtgttgctgcacgtggcttagtgtgcacggagtgggtaccgcaggtgcgcatgttagcgcatggtgcagtaggtgtattcttaacacattgcggctggggctccaccgtggagagcttccactatggtcagccactggtgatgctcccttttatcgctgaccagggcctaattgctcaggcggtggcggcaacgggggtaggtgtggaggtggcgaggaactacgacgatggctcgttctacagggatgatgttgcggcggcgatacaaagggtcatggtggaggaggaggggaaggaattggcacacaaagccatagagttgtgcggcatcctcggggatagagtccagcaggagatgtacctttatgagcttatcggctacttacagtgctacaaatga

SEQ ID NO: 23262 - DNA, 277 bp, Oryza sativa
  unsure (1)..(277): unsure at all n locations
  Clone ID: PAT_MRT4530_28359C.1
aggagtgtaacattatgtcagtaaaacataaaggccaaatagagaacccaagcatgtacatgcagacatgcagtatcttctgtacaacagaacatgacagaaggaagcaagtacaggaaccaatacacgattgcttctactgacatcatacgcaccaagacaaatagcagtaaacagtgtctatgtcgcgtttctgactcaaagctggaactcaacctaatgtaacctncaaaagagaagcgaatttttgaatggacatgttcatcagaatgctttg

SEQ ID NO: 23263 - DNA, 1107 bp, Oryza sativa
  Clone ID: PAT_MRT4530_2835C.1
atgacgtcggcgatgacgtcacctccggcggtggctcgggcggctcggcggctcggcggctcggtcgcgcaaactcgtcggcgaatgacggcgcggcggcgcgaacggaaggcaccagcacgatgcgggcgacgaggcgaactcaccggtgaccaaagcaacggcggaggagcaacggacaacgtcggcgacgatgaagaagcggcggcgaccttcggcttgacgacggcgacggtgttccggcggtcaacagcgacggcggaggggcggacgaggacggcggcgacttggcgaccacgatggcgacctccccgagcgacggcgacggctggagcgacggcgaagcacggctggagcgacggcgacgacggcggctcgaggaatcttcaaaggctgcagcaaaccggcaggtttctgatgttctgccttgactcgctgacaaacatcacatactgctacgtattctgcgatttcacgcttcatacttgcccaccaaaatctttccttgagatcctgcgccatcaatggcggccggatcttccgcgcccgtttccccctcgtccggccgctctctccccctcccaaccctatataaaccctccccgtgcctccctccaccgtttccgccactcgccgccctctctccccgccggaatcgagctcgcgtcgtcgctctctctctccgccgtcaccgccgagctccggtccaccgccgtcgtcgccccggaccatctcccgcctcggcgccgcctccttcggcttcgccgcatcctcgccgacctcgtccacctctccgtttcggtcgacgaccgccggagcaccgtcaaccccgtccacccgagccgcgccgccaccttcctccgctccggtcgccgtttccgtcgtcgccgtcgacccggggtgagccgtggaccgccgcttcgtttcccccttcccctcccctctctcgggcaccgctccgccgtgcctatggccgccgccggcgaccataggggcgcgggcgtgccgcctcccgccggccgcaccggcgtggccgccttcgggtgcaccgtgcggctgccgcgtggggcccggctgtcagccgcccgcgcccttaggtgcggctga

SEQ ID NO: 23264 - DNA, 578 bp, Oryza sativa
  Clone ID: PAT_MRT4530_28360C.1
gtacttattaggcttaacaactatatacttcaagaatggatgcaagagctggaaccatcgtgctggtagccctacttatcatgcacgcaaatacatacttctgcaaacgagtcctgcatgatcactggggcaagggatcgcaaatgggtcctccaccgacatgacttctggcgtctgtgagcgtcaacgcaccattgcttaatgcacagttcaaaaactccatgtgtaaatgctattccagaggctttcgacgatggcacctttgcattaacagcaaagtcttcaatagattgctgtatatcgagaactcttataccgaggggaatataaggttctatatataagattccaagcatggagactgaagctaaaaatgaaagaagggggccaccgctcgagctcactgacaaggatacatctgctgatcactagaagggcgctgccaagaatgatggcattacatgcccgctcagagaaactgcgatgcgctcacgatgccacacagaggacaagcccactgcatatattgataatgccgcagatgctaactgagccacaaactgacatgattctcttgg

SEQ ID NO: 23265 - DNA, 333 bp, Oryza sativa
  Clone ID: PAT_MRT4530_28361C.1
gtgacactatagaatactcaagcttgcatgcctgcaggtcgactctagaggatccccagtggttcttatttaagtcctcgcgcaggaggcaaacctatgccgcgaagggcaaatataacatttaccgaggcgcagctctctctaaaaacctcgggaacgccagaactcctctcgctgctgataacgttacgttcagagcgcatgaggatgagagttcatggaacagttgatacagttaaacatgtcggtttccgaatatttagttttgggatccgacacttgacacgtcggaccgcgattgccccagctgctgctcatcgcgttcagcacggc

SEQ ID NO: 23266 - DNA, 334 bp, Oryza sativa
  Clone ID: PAT_MRT4530_28362C.1
agctctggaggggtgcccggaagtttggcgctcccttaccggagctgtcggtacactctgctccgggttcggagaaacttctattataagtgctctagtactaggactctaaataaagaaggaagttcctgtacaagtactatagtagtaattaataacttagatgtggtgtctaggttagagattacctttgtttgttgtgtaacccacggatttgttagaggtgaagtgctacagtgatatacgtgcgcttgcggatttatatgtgactgtatcaagtaccaataaggagacagcaccaatggtgatgccagccgtgccgcattaagccctc

SEQ ID NO: 23267 - DNA, 1809 bp, Oryza sativa
  Clone ID: PAT_MRT4530_28363C.1
atgcaaaccccgagcgtccccaagatactcaagccctgcgcagccgtgctcggcttcaccacattacagatggacctcatcgtggcgcgctgtagcgccgccttcttccgctcaccgacgctcctcgttaatgtccagttctggctcgggtacctccgcggctgcgtcgactgggaggcctcaccaacgacgacatcggctgccaaggctgtcctagtgatcgccgacgagttcggggtgccgcgcaggatgcgaccattcaaggacgtcattgtcgcagcgttcctcttgaaaccggagcatctcgcctggaaggcggccttcttcagggacgagcagagctcgggtggacggaggcgcagggtgcaggcttggcggctgtggcgcggcagggatttcatcaacgtcgccaccatagtagaggaagacttcgtggccaaatttataaggcctttcttggttaaagactccaacttggacaagcgcgctctgtcgccgccgcggcgcaaaatccctcgcaagtgcaagcgcggccgcacggtcggcgccgttgccccaaatggtgccgcgccctggatggagtctccctgggcgtcactggatggagatatcatccgccttgtcgccgagcacgcgctggctggcgacgtggcggattacctccggctccgcgctgtttgccgccattggcggtccagcaccgtcagcccgcgcggccgcagcgtcgtggacccgcgcttccatccgcgccggtggatcttgttccccgagagccatggcctcttccctggccaccgcaagctccacgggagggttcgcttcttcaacgtctccacgggcgccttcgcgcgtctcctcctcccgttcttcccggatcacttcgtcatcgactcggtcgatggcctcctcctcttgcagcgggatcgggacagtgctatccgtatcctccaccctttcaccggtgacattgttgagttatcatccctggagaccctacggccgcaggttgagcccttcttcaccagcactgagttggcttatatgagagccatggagcgaaaagagatgggcatattctcatatttcaatcgtatttgcgctgctcttagcttcggccctgacggagtcatcactatcatgttcgttgttaccagagtacagcgcgttgcctttgccacctctgcggatcagcaatggaccttgtcaaattggcagaccaacctctcatggaaatacatggcattccagggcaagatttatgcagcatcaatatgggtaaacttctctccaaacagaattttcgtgatagacccaccccgggtggaggcgaatggctctgcttcgtctttttccctaccagaaccaaaattgtttgctacatgtccagtagaaaagctgtttgggttcgcttatctggtgaactgtgaatcagaggtcttgctgatcggtcacactgatcgctcgtactcgcaggccgtggtttacagacttgctgacattatcttgggaaggttcatcccgttaacaagatttggggactacaccattttcatggatgaaaggagcctgtgtgtctcctcgaaggctgttcctggcattgcagatggctctctcatctacaggcaccacgggaaattccttgcacaataccatgttagaagtggcaccctgtcgacagctgctgagggtagaatcgaggaaggctacagactggctccgtacagcctcatccaccatctttttgcttgctgtcttatgacttttggtaagtctcctggctatgctgttcttccatgcctagttcctgca

SEQ ID NO: 23268 - DNA, 1391 bp, Oryza sativa
  unsure (1)..(1391): unsure at all n locations
  Clone ID: PAT_MRT4530_28364C.1
aagtagctagggaacataatacagttcatctacttgacacacatacaagtatatatgcacttactatatagaccctgaggatgttttcaccggggcctctaaccacatgggatcccaaacctcccaggaaggcaagcaaaacaccaaccaaatcacgctctctctccgcttcggagagggctacctgggcccacatgccagtcccacgcactattaggcaggtatcatcaatagctatagctacacaaaacaagttactccaatctgcaacgcaagaacgacacaattcatccgaaagtaaacacgccgtatgggcctccttggggagcccagccaacgaaacatcaaacatgggccggaggggcctcctctaggcgaagttgaggcgagaggtgtaggtggccttgggggtccagttcttggggatgacatcctgggccgagagggtctgcctggtggtcagggttgtcagcctcaccgagaagggccccaccagtgggcccggggtgaggctccaggtggccccccagatgtgcttcatgtcctgccattgtgccgagtttgcctgttttagctgcatggatccaatgtcgccgtctccatcctcgaattcgacgagaagcgagagccagaaggtcgtcgagccctcgttcacgtggaaggcaatgttcttccccccgtacttgcacgccgtcctgcggtacaccaccgagatctcgcctcggttctgcagctggccgccgtggccggcgacggcgagcctggcgaaggcggcgccgctgaggtcgaagtgcgtgcggccgaaggcgcagacgccgccggggcactcgtcggtgacgatgaccgtgacggcgcggcgcgagcagatgctggcgtcgaggcaacgcaccttgtagcaggcgccgcacccctcgccgcccttgaacagcacggggctcaccgcgcccacccgcgtcttcatcggcaccacgtccaccagcgtcccgtatccacacgcgccgccgtcgctgccgtcgccgtcagcgctgccgtaccaggtggccgtggccgggtgccactccgggtcgaccaccctgtgcgccgcaccagcctcgccggagtcgaagacgaacgcggcggacaggagagacacgaagagcacggagcgtatcaacatgggagcagacgagctcgaggagaaggctgccatagcgaagagctagcntgatcgaagcagctatcctgtcgctactgccgtcttgtttgtgcaggagcagctcactctcactcctctcactcccacctgtgcgtgggtcgcttttaagccttcgagaagccccagtccccgaagctctgagagctcaggatggacgctagctcgctgcacaaatggcaccaacgggacacagggg

SEQ ID NO: 23269 - DNA, 785 bp, Oryza sativa
  Clone ID: PAT_MRT4530_28365C.1
gattgatgaaatattggagaactatgaactccttgagttccctaaaagttacggcatagattttcctgctataactccaacaggtcacgatgatgccttccccgatcctcacagtggtattggtggtggcagcagccagcatgcgtccaaagcaggaggccccccttcaaaggccaccttcctaatcgtatttgaagcacttcgaactgctagattgcaaatagcttatcagacattgcctgtaaaaaccacgcgcacgtccgacacagcgccatgggtaagctcccgcggcggcggactcgtcgtctacgacactgctctggcgggtgcaaacgcacgcgcccggcccaactccacccaggtcgttggcttccaactccacccaggtcgttggcttcctcacgctcaccgtcctcctgctcccgaccaggctcacgctcaccagcaccgtcgtcgtgctctgcccatcgtgctgctcactagccccatctgggtgcatgtcgccatcgtcgttgcagacgaggcagcaacaaccttccatagtttcatggttgggcccggagggcgcactgcgtgtgccatcggaggcggcggcggtggaggcgttctgtggcggaccgtgcctggtgcttggctgcgtcgatgccatcatggacagcttccgcctcacgctcgaccttggttgtggggacaccgcttttcagtcgctctcgcatttcggcacccgctccaaggactatgaacccccattgcgccccggcactcctaacccctctgccggatag

SEQ ID NO: 23270 - DNA, 208 bp, Oryza sativa
  Clone ID: PAT_MRT4530_28366C.1
cccacgcgtccgccaacgcgtccgccaacgcgtccgcccacgcgtccgattaaatataaaaaaagaaaaacaaaccaaaaaccaaagcgaggggaaaaaaaatactaaagcaccggggtggccgttttagaagaacgggcggttactttatagaatcgaggatttcttagccgtgagttcgtcttaaaaaatttaaattagcgggact

SEQ ID NO: 23271 - DNA, 108 bp, Oryza sativa
  Clone ID: PAT_MRT4530_28367C.1
atgaagccagtcattggcttccattgggttgatggtgctggagaaagtgggtggcctgacatggagaaactaaacggtggaggtggaccattgctagttgcaccactg

SEQ ID NO: 23272 - DNA, 619 bp, Oryza sativa
  Clone ID: PAT_MRT4530_28368C.1
tttttttcataaacttaattaaatttaatttttttccaggtgtcgaggatcgtctcgtttggcgttggacatctaaccagcgctactcagcgcatttggcataccaggctttcttccatggccaacattcctttgcctgtggtgatcttctctagcacgcaaagggttgctaaatgcaggttcttcttttggtttgctttccagcagcgctgctggacggctgatctcctccagaagtgtggcattgatagtcactcagcctgccctttttgcgctcaggatcttgagacggcgaaccacatcctcctcgactgtgtgtttgctcggcaggtctggctccatgtgctgtcgcctcctggctgggctgccctctctccccccctgtggcagctggttccaggactggtggtcgtcctccagggcctgcttacctgagcatctccggcgctgcttcgactccctggtgctcctggtctcttggcagctatggaaggaacgaaactctagggttttcaactctgcgctctcttcggtctcagtggttctggagtccatccacccagagggctatctgtggtctttagctagcgttgccgcttttggggacttgttgggagtg

SEQ ID NO: 23273 - DNA, 3093 bp, Oryza sativa
  Clone ID: PAT_MRT4530_28369C.1
atggcggaggtggtgaccagcatcgtggtcaagccactgctgtccatggtgaaggataaggtctccagctacctcctacaggagtacagggtgatggagggcttggaagagcagcacaagatcctgaagcgcaagctgccggccatcctggacgtcatctccgacgctgagaagcaggcgtcagaacaaagagaaggagcgaaagcctggctcgaggagctcaagacggtggcctacgaagcaaatgacatcttcgacgagttcaagtatgaggctctttggcgagaagccaagaagaatgggcactacaccgcgctcggcttcgatgtggtaaaactctttcctactcacaaccgtgtcatgttccggtacaggatggacaaaagactttgcaagattgtgcatgacattgaagtccttgtcacggagatgaatgcctttaggttcagattccaacctcagcctttagtttccatgcagtggaggcaaactgattctgagatctttgacccaacaaacattattagcaaatcaagaagccaagaaaaactgaaaattgttaatattctccttggtcaagctagcagcccggatctcttggttcttcctatagttggaataggggggctgggcaagacaacattagcgcaactagtttacaacgacagtgaaattcagaagcatttccagttgttggtatgggtatgcgtatctgacccttttgatgttgactctattgctgaaaatatagttaaactagctgataggagcaaggaagtaaaagaggatggcaaacaccaaatagattatcatgtgagtcaagtgaccaaggacaagccactgcagaagcttcaaaaattagtgagcggccaaaggtacctccttgtattggatgacgtttggagcagagatgccgataagtgggaaaagttaaaggcttcccttcaacatggtagcatcggcagtgcagtattgacaacaactcgtgatgaacaagttgctcaactaatgcagacaactgatgcatataaccttactgctctggagaacagcattatcaaggaaatcattgacacgagagcatttagtttgagaaaggatgaaaagcctaatgagcaagttgaaatgattgataagtttgtcaacagatgtgttggatctccattagccgcaacagcactaggctctctacttcgtaccaaggaaactgtgcaagaatggcaggccatattaatgagaagcagtatatgcaatgaggagactggaattttacatatactcaagctcagctatgatgacttgccctcatacatgaaacaatgctttgctttctgtgctatgtttcccaaagattatgtgattgacgtagacaatctaatccaccatttggcaaaatatagctctgtgcgagcattgaaactgagtaaagagatgcggttgatccaactaaaaccaaagattctacatcatctaagtaatgttggagagctgcagaaattagacattggcggtcacctagagctacaccagctacagaatgtaagagagtcagatgcaatacataccaagcttgacagcaaaaggaaaatcatggaattgtctttagtatgggacaatgaagaacctcgcaatgaaacagcagattctagtcataacaaggtgatggaagctctacgacctcatgataatctgttggttctgaaggtggcctcctacaaaggtacaacattaccatcatgggttagtatgttagaaggtcttatagagcttgatctcagtactagttatacaaggtgcgaaaatattccgcagttgtggcagctgcagtacctccaacttcttcgactggctggatttgatagattgcaatatttgtgtagcattggtgagaacagcacgacatgttcaatatttccaaaattgaaagagctcacactagaaaatctgaagagtttcaagggatggtgggacaaaactgagaggcaagaacagccgagttgtgacaacgacaacaataagacaccaactgcgctgccaaattttccacaggagctccaactcattgagttaaataaaatcgacagatggcaacaggtggaagcaacacatgtcaaaacaccaatgttccctaaccttgagaacattcgtattatggattgtccaaagttggcaagtctacctgaagcacgaaagcttagtgttttacacataacgaagggctcccaacagttgctcttttgcataccaagatacattacttcattgtccactctgagcttgctgcaggaaggtgtagaaacagcgcctccagctgaacacaatttgattgagtgggtggacgacaatgagaattggaaaggtgaatcccctctggcagatatgcgcctagataacttcaacatgttcttcctttctggtgcacatgcactatggacatgttttgcacagcttatagttttgagaatttgtagatgcgatgtgctcatccactggccggagaaagaatttcagggcttggtatccttgaagacattagggatagtgagctgcaacaaactgaagggatacgcacaagctcctgagcggtcaacatcaggtggaggccaactcctaacacgtctggagtcactaacaataattgagtgtaaaagtttggtagaggtcttcaacaccccaccatctctcaagtatttgcacatacgacgttgccctgagcttaagtccatattcggcaagcagagacgtgggtcaacattaattgaagggccttgcagtgacaacattgtgtctgctcctgtgttggaaccgtcatcaccagctggggaccacttctctcctcctgaatcactggagtctcctcactcgggcgagctcccatcgttggtaaaactcacgctctgttactgcaaaagcctggcatcatcatcactacccaattcaccgcaagcgtactcatccctccaagggcttataattatggaatgccctgctctaaaagtgctccctacatgcctgcggcaacggctgggcagcctcgagtggaaagaactagacgcccgtcatgaagaactattcctgcagtccgacaaataa

SEQ ID NO: 23274 - DNA, 5951 bp, Oryza sativa
  unsure (1)..(5951): unsure at all n locations
  Clone ID: PAT_MRT4530_2836C.1
atgcttaaattggtaataatttgattagctcctggtttggaatggtatattcctggtttggagatagaactgtgcagccgatgccgcgctacaagcctgagtacttgtttggtgttgagggttttgtccaggagttgcgtactatgtcctttgtcattggatttgggactgcccctttttatgcctagattcgtcatgatcgtcatgaagagaagtgccgagtcaaagttaccttgaacagtaacagtgaagatatcccatcagtgatgttcgaagctggaggaaggaactacatccatgcatgtcaggaagtggcaaggatcgccataggagagctccgtgatcgctacagtgatcagttggccgacactgagtatcgttaccatcctcgtcaaccgcagggaagtgaccgtggcagttaccttgagactgaaggaattgagaatgatgctaccacaagacatttggttgagatgctatgggctatggatgaaagtcgtgcggagactgtgttagcagctcaagatcgtgaagatcggaatcgtggtaagatttgcgagctagaagacaaggtggatcgtttggagaaggaactagccgcattgaagggagaagcaccgccgcagaaggccaggattcgtcttaccgcaaggaagagagctctatttgtccctcgctatcaattggcgccaaaggtccgtgtggtggagaaagaagttgccccagcagatcctccgatcatcatcataagtagtgatgaagaagaagaatccaagcgcaaccattccaagattgagtgggtagcaactcaagatgatgaagacgagccgaacgagccttcaatcgaccttcgatgctcggaagaacaagacaacaggaatggtcccaatctcaacaaccccaataacaataacaatggagagaatccaacccttgctcaagttcttgctcaacagactcagcttatgaacatgatgatgcagcaacttcagaaccagcagaaccaaggaaataaccatgcaccccctcagaataagttagcagaatttcttcgtgtaaggccgcctgttttctctagtaccactaatcctgttgaagctggcgattggttgcatgccatagagaagaagttggatttgcttcagtgcactgatcaggagaaggtctcatttgcatcacatcagttgcatggccctgcctctgaatggtgggatcacttccgcctgaataggactactgctgaacctatcacttggcttgaattcaccgctgctttccggaagacacatataccatcgggagtggtgtctctcaagaagaaggagttcaggtcgctcactcaaggatctcgctctgttacggagtatttgcacgagttcaatcgtctagctcgttatgctccggaagatgtacgcaatgatgaagagcgtcaagagaagttcttggaaggacttaatgatgagctttcttacccactcatgactggagattatcatgatttccagaagttagtggataaggctattcgtcaggaggacaagtataaccgcatggagcagaagaaacgccggattgctcacttcaaggcacaacaggggagtnnnnnnnnnnnnnnnnnnnntttaggaccccagtccatgccacaaggaggttcttcgtctgttgttcgtccgcagcgttagttcttcaacaacaatgctggcaataacatccgcaatcaagctccacgtcctgttgcagcttcgacacagcaacaacctgccaagagggagcaaggcagcaagcctatggtatgcttcaactgtggagacccaggacattatgctgacaagtgtccgaagccccgacgcgtgaaggttgtccctgcccagagcaactctgctgtaccagcatcaaaggcccgtgtcaatcatgttgcagctgcagaagctcaagatgctccagatgtgattttgggtacgttccttgttaactcagttcctgcaacagtacttttcgattctggtgctacacattcatttctatctatgagttttgcgggaaatcatgggatggaagtagaagatcttagacgtcctttgatggttagtaccccaagcaatcaagcactctctttgcaacgtagcccctatgtcagaatagaaattcaaggggtaccatttctggccaatcttatattgttagaatccaaagaccttgatgtcattctagggatggactggttagctagacataaaggtgtgatagactgtgctaacagaaaagtaactctcaccagcaatgatggtcgagttgtaactgttcatgcattgtcttctgagtttttaaggtcaagactgaaccagataactttggaagagattcctatagtccgggagtatcctgatgtgttcccagatgatttacctggtatgccgcctaaaagggatatagagttcagaatagatttggtacctggaacaactccgatccataagagaccttatagaatggtagccaatgagttggcagaagtcaagaggcaagtagatgatttgcttcagaaaggatacatcagaccgagttcatctccatggggagctccggttattttttgtggaaaagaaagatcatacccagaggatgtgtgtggactatcgtgcattaaatgatgtgactattaagaataagtacccgctacccagaattgatgatttgtttgatcagcttaaaggtgccaccgttttctccaagatagatcttcgatcagggtatcaccagttgaggatcaaagagtacaggttgttcgaatgtactgttatgtcttttggacttaccaatgcccccgctttcttcatgaacttgatgaataaagtgtttatggaatacctagacaagtttgtggtggtctttattgatgacattcttatctactctaagaccaaagaagagcatgaagaacatcttcgccttgcattggaaaagttatgagaacatcaactgtatgctaagtttagcaagtgtgaattttggttgtctgaagtgaagttccttggtcacgtcatctcagcaggaggagttgccgttgatcctagtaatgtggaatccgtaaccaactggaaacaaccaaagacagtttcagagatccgcagtttcctaggcctcggcaggatattatcggaggtttatagagaatttttccaagattgctaagcccatgacacgactgcttcagaaagatgtgaagtacaagtggtcagaagaatgtgagcagagttttcaagagttgaaaagtcgcttgatatcagctcctattttgattttgcctgatccaaatgagggtggccaactgtattgcgatgcatccaaactggggttacgttgtgttctgatgcaagatgggaaggtggttgcctatgcatctcgtcagttacgtccgcatgagaaaaactaccctactcatgatcttgaattggctgcagtagttcatgcgttgaagatttggcgtcattatcttttcggtactcgtacagaggaatttgaaagattgaatttgggaattgtcagtataggtttcgttgcagccttagaagcgaagcccactctaattgatcaagttagagaagctcaaactaatgatcctgatatccaagaaattaagaagaatatgagaagaggaaaagctattggtttcttggaggatgagcacggaactgtatggttgggtgaaagaatctgtgtccccgacaacaaagatttaaaagatgcaattctgaaagaagctcatgatactttatactccatacaccctggtagtactaagatgtactaggatctcaaggaaaggttttggtgggcaagtatgaagcgtgaaatcgcagaatacgtagcagtatgtgatgtttgtcagcgagtcaaggcagaacatcagaaacccgccggtttgttgcagccttcaaagattcctgaatggaaatgggaagaaatcggtatggattttatcactggtttgcccagaacgtcattaggccaggactctatttgggtgatagtcgatagacttactaaagtggcacacttcattccggtaaagacaacttattccggaagtcgcttagcggaattgtatatggcaaggattgtgtgtttgcatggcgttcctaagaagatagtgtctgatcgaggtagtcaatttacttcaaatttttggaagaaacttcaggaagagatgggttctaagctgaactttagtactgcttatcatccgcagacagacggacaaactgaaagggtgaatcagattttggaagacatgttgagagcttgtgctttagatttcggtggaagttgggataagaatctaccttatgcagaattttcatacaacaacagttatcaagctagtcttcagatggctccttacgaagcactgtatggtcggaagtgccgcactccgcttttgtgggatcaaacgggagaacgtcaggttttcgggacggatatcgtaagggaagcagaagaaaaggtaaagatcattcaagaaagattgcgtgtggctcagtcgcgtcataagagttatgccgacaatcgccgcagagatttgagttttgaagaaggagattatgtgtatcttcgtgtcacgcctctacggggagttcatcgttttcataccaaaggaaaattggcactgcgttttgtgggaccttataagattgtcagtagaagaggagaggttgcttatcagttagagttacctcaatctttggcaggagtccataatgtgttccatgtgtcgcaattgaaaaagtgtttaagggtacctaccgaagaagctaatcttgaacagatagaagtccaagaggatctgacctatgtggagaaaccaatccgtatcttggaaacaaatgagagaaaaaccaggaatcgagttatccgtttttgcaaagtccagtggagtaatcactcggaagaagagtcaacttgggaacgagaagatgaattgaatcgtggaatcgagttcgattcggatcggcctctttccttcaagcccgagctttccttcctcgtcgccggcagccatgggccttcgccttcgcctccgagcccctttaaaagcctccccagtgtctcctccacccgccgccaccctcgccttcgcctctcgtcgtcagagtcgctctagcgccccgtgtgccgccgtcgattcagccgtcgccgtcgctcgggaaggacgtcatcgtggtcgccaagtcgtcgccgtcctcgtccgccgcttcgccatcgtcggagaccgccggagcatcgtcgccgtcgtcaagccgaagaactccgccgtttcctcttcgtcgccggcgccgtccgttgcttctccgccgtcgttttggtcgtcgcgccgccgttcgccggcgagcgtgcgccgcccgagccgtccgctccgccgagccgccgccgccgtcggtgacgtcattgctgacgtcatcaaggtcgtccgccattccgtcgtttccggagagtccgttttcgccggagaagagtttgaagagttccaaggccagcaaggcaagtcacacagatcccaaacaacccgtgatgtgtgccagcgtgtcaaggcagagcaccaacgaccggccggacttctccaacctctccaagtaccagaatggaaatgggatgaaattgggatggatttcatcaccggacttccaaaaacccaaggtggatatgattctatatgggtagttgtggatcggttaaccaaggtagctcgatttattcctgtgaagaccacctatggagggaacaaattagccgagctctacttcgctaggatcacggatggacagaccgagtgtctaaatcagatcctagaagatatgcttcgcgcatgtgtcctagatttcgggaagacctgggataagagtctcccctacgccgagttctcctacaataactgtcgcgtcccaaaacgactc

SEQ ID NO: 23275 - DNA, 301 bp, Oryza sativa
  unsure (1)..(301): unsure at all n locations
  Clone ID: PAT_MRT4530_28370C.1
tgtttngtngtcgggcttgtctcgctgggtcgggtttttcccgtttctcgtttctatggcgatggaagttgaagacggtggcggtggcgcgtttgtggccggtgtcggtggtggcgttctggttggcgacggcggcggcgcggttccggttcgcggcggcggcggcggcgcggctccggtctgcggcgatgtttgtggcgcggtccctctccgcggtttcggtggtggttcgttcgcggtccgtgcccacggtgttggcttcgttcctgtccgcggtggcgccgcctgttcggtcgctgtt

SEQ ID NO: 23276 - DNA, 214 bp, Oryza sativa
  Clone ID: PAT_MRT4530_28371C.1
agtgcacatgggtgtgagagctcttggaagggttcaagataatgcaatggagtgccaaaaccttgcccttgttgctggggaaccgtccacggctcagtcagaccgccaggggctcggtctgaccggctgcggctctagcggctctggatcgccaagacgagacctccttcaaaatcaggatgagcagtcaaaccgccatgggagtggtggttag

SEQ ID NO: 23277 - DNA, 534 bp, Oryza sativa
  Clone ID: PAT_MRT4530_28372C.1
gctgctctacggcgagaaggacgcctactggcctcgtgcggcgtttactagctctcgggcacccttctctctcctcattggccgggacctgcgcagcttgctctcgggacagaagtcatcgcagaatgacttgcatgactgcttgcctcgatccacgagcgtgagtgcgactagtactctgcctcgttggctcgttgcagccgcagctcaatctgcacgctgcatggcatgcgtgactgtctacgacgacatatctgaacactgcaaaaggtccgtttcagagcgtgacgaactaaccattgaggccagcacatgctattactcggttggtgatcactctgatgggcggcccgtatttgctcattgaacagcggcctgaattgctgcttcgctttatgcatatattcatcatgaatgaacatattgcgagctagcatcgcagtttactacctttcacgaaatgatgatattgcgtactcagcattcaacaaaattcatcctgaggcgattcctcgataagaaaaagaatctgga

SEQ ID NO: 23278 - DNA, 11360 bp, Oryza sativa
  Clone ID: PAT_MRT4530_28373C.1
atgaaatggtcgacattgctcagtaaggtcgtcttcgccggccagcaggagcaggagcagccgcctccgccgccgccgccgccgccggggtcgtcgtcgtccccgctcaaccgccagaagcagggcgaccccggccaagccaccccgcggctcagcgccgccgacgagggtgggtcggtcggaggtggcggcgtcgcggcggcgtccgggagctcgccctccgccgtctccgcgtcccctgccagctcaagcttcccagattatattcatgtccctattggaaacaagggaaaaaatgagttggagttggacttcaggaggttctgggaagaattccgttcttccagctctgaaaaggagaaagaaagggccttaaatttggcagtagatgtcttctgtaggctagtgaaggagcactctagtgtagctgaattagttacaaagttagtagaagcacatgtttttgcttttgttattggaagagctttcgttacagatgtggaaaaactaagaattcacagtaagggaagatctttgcgtgttgctgatgttattggtttcttttcggagatcacagagcttggcatatgtccaggttcaaatttgttatatgcagttgaagttcttgtgacacagactatcgataagcagcctctgttggattctggtattttgtgctgccttatatatatcctcaattccctattgagtcctgatgaatcctcccaaaaatcctctcctgttggtcaagaagtttcaaccagtgagaagagtaaagattggggtcctatgctatcacggcgccttgagatcgaggcaagtgtagtacatacaatgaaggcactagcgagccatccatctgctgcaccaagcctaattgaagatgatgctctacaagttctattccacatggttgcaaatggttccctgaccgtgttctctcaatttagggagggtcttgttccaattcacacaattcagcttcatcgccacgcaatgcagattaaagttctccttatggccgtgaaagatttcaatccgcagaatggtgatgctgcttacaccatgggcattgtggatctcttacttgaatgtgttgagctatcttacaggcctgaagctggatccgttaggctcagggaagatatacataatgctcatggctatcagttccttgttcagtttgctcttacactatgtagcttacataagaaccaggttctccaatcttcgcccaagttagcatctgaggatggagtgaatcctcctcacagatcagaacaagatacattcacatccgatctttcaccacagctatcaagattgcttgatgttcttgtaaatttgtcgcaaactggactgtctgaaaattatgttggtaaaagtatgaaatcttctcatgggaagggaacaggccacaacagaagccggactccatctgttgacaagttcgcagatgagattttggagattaacagtcccaaagtaaaagatcttgaggccattcagatgctacaggatatatttctgaaggcagacaacttggaagtgcaagctgaagttttaaatagaatgttcaagattttctcaagtcatcttgagaattacaagctatgtcaacaactgcgaactgtgcctctttttatcctaaacatgggtggcttccctccagcacttcaagaggtcatcttaaaaattttagaatatgcggtcactgttgtaaactgcatcccagagcaggagttgttatcactctgttgcttactgcagcaaccaatttctaccagtcttaagcatacaatactctctttctttgtgaagctcctttcctttgatcagcagtacaaaaaggttctcagggaagtaggtgtacttggagcgttgttagatgacctgaaacagaacaagcttttttttggagaggagccacaaaacaggacccctaagtctgcacagaggatgtccagtgcaagtagttttcgaaaaaccatggataacaaagatgcgattctttctccgaagctaatggcttctggttccaccaaatttcccatgtttgaagatgaagggacaataactgttgcttgggattgtcttttttatctgctgaagagagctgagcctaatcaacaaactttcagatcttctaatggcgttaatacgattcttcctttcttggtatctgaaagccacagatctggggtattacggctattgtcttgcctgataatcgaagattctcttcaggctcatccagaggaaatagggtccctgatagaaatcttgaagagtgggatggtatcaacttcgtcaggttctcaacagaaacttgacaatgatgcgaagtgtgacacttttggcgctttgtggcgtattcttggggcaaacagttcagctcaaagaatttttggagaagccactgggttttccctgctactaacaacgcttcacagtttccagaatgacagtgaaaacgaggagactgaatcatctttgcttactcatatgaagatctttggttttctaatgcgagctatgacagctgcagtatacagcaatcctgttaataggataagactgcatacaatcctgtcttccaacactttctatgatcttctgtctgaatctgggttgctctgtgtggattgtgagaagcatgttatcttgcttttgcttgagcttgcacttgaggttgttcttcctcccactagtaacctgcaggtagagagcatttcatctgaaaacccagaggatgaatcaggtttcttgtctgcaacctcatttggactatcaaggcttgacaaggagcgtatatataatgctagtgctgtagttgttttgatccgctctttgctagtatttacacctaaagttcaactcgagctgctgagattcattgagaagctagcaaatgctggtcccttcaaccaggagaatttaacttctgtaggatgtgttggtcttctacttgagacaatcaacccatttttggagggctcatctcctatccttaatcacgctttgagaattgttgaagttctgggtgcttataggctgtcttcttctgaactaagacttctggtgaggtatatacttcagctgaaagtgaagtgttctggtcatctttttgttaatatgatggacaagttaatccaaattgaagatgtcagacaaggaagtatttctctagcccctttcattgagttggacatgagcaaagctggtcattcatctattcaagtttcattaggagagaggacatggccacctgtttctggatactctttcgtttgctggttccaatttcagaacttctttagaagccatcctaaagaagcagaaaaaacatcaaaagggtcttatagtaaaaggaatggacaagttatgcgcatcttttctgtaggtgcagttgatgatgccaacactctgtatgcagaactttatctccatgacaatggtgtttttaccattgcaacaagcaattcaagttcattatcatttccaggcattgagatggaagaagggaaatggcatcatcttgcagttgtacatagcaaaccaaatgcattagctggcctctttcaatcaagtgtggccagtctatatcttgatggaaagttgaggcacaccggcaaacttggatactctccatccccatttggtaaatccttgcaagtaacacttggtacacctgctatccgagccaaagtttcagacctatcatggcggcttcggtgttgttatctttttgaggaagtcttaacacctggcagcatttgcttcatgtatattcttggacaaggttacaggggattgttccaggacactgatcttctgagatttgtccctaactgggcctgtggtggggaggtgatggcaattcttgattcattggaattggaagtaattgcaccttcaggcagccagcgtgttgatagcgcaatgaaacaagggaactctagacttgagagcagtggaatcgtttgggatatggaaaggttaagaaatctttccttacaactgtccgggaagaagctaatatttgcatttgatgggacttcatcagatgcttttcgagcatctgggactttgtccttgctgaaccttgttgatccaacttctgctgctgcatccccaataggaggtataccgcggtatgggcgcctaagtggggatgtttatgtgtgtaaccagtgcacaattggtgacactgttcaaacagttggtgggattcctgttgttcttgctcttgtggaagccgctgaaactagggatatgctgcacatggcactagaactgcttgcactatctcttcaacagagccatcaaaatgtgaaggacatgcagtccttgaggggttatcatcttcttgcactttttctgcataggagaatgtcattatttgacatgcagtctcttgatatctttttccgtattgctgcttgtggagcttcatttcctgagccacaaaagtcaaatatgaaccgaacagcaagctatgcatctggaatctccccagagtccagtcttgatgatcttacattacccaagtttggtgatgatatgtcttctattggatcacatggagatctagatgatttttcagcacaaaaggattcttttagccatctgtctgagcttgagaatgccgacttagctggggagacttctgagtttatagtcttgtcaaatgctgatatggtcgaacatgttctattggattggaccatttgggttactgctcctatatcagtacaaataactctccttggatttcttgagaggatggtatcaatgcattggtttagaaatcataacctcacaatactgcggcgaattaatcttgtacaacatcttcttgtcactttacaacgtggtgatgttgaaattcctgtcctggaaaagctagttgttctgcttggtgtcatcttggaggatggttttctagcttctgagttggagcttgttgtaagattcgtaatcatgacatttgatcctccagaacttacaccaaaccgccagattgttcgggaggccatgggaaagcatgtcattgtgaggaacatgttactagaaatgcttattgatctacaagtaaccataaatgctgaagatatgctggagcaatggcacaaagttgtttcgtccagattagtcacatatttccttgatgaagctgtgcacccaacaagtatgagatggatcatgactctcttaggagtttgccttacatcctctgccacttttgctctaaagttccgtacaagtggaggtttccaagggttgaatcatgtgcttccaagcttctatgattcccctgaaatatattatatactcttctgtctgatttttggaaagcctgtttttcctcgagtaccagaggtccgcatgcttgatttccattctcttatgcctagtgatgaaaactgcggagaattgaagtttgtagatctattggatactatcattgcaatggcaaaagctacatttgattcattgattatgaagtctatgcttgcacatcagaataataatctttcacaccttaatggcaccttagttgcggatcttgtggaatcgacaccagacatgggaggtgatcttcagggagaagccttgatgcataagacatatgcagctaggttaatgggtggtgaagctgcagcacctgctgttgctacttcaatactgcggttcatggttgatttgacaaaaatgtgcccaccattctctgctgtttgcaggcggcatgatttcctagagagctgtgttgacctatatttctcttgtgtaaggtctgattgtgccgtgaagatggcgaaggacctaacatctgcggcaacagatgagaagtgtatgcatgatgatgacaacgaaagtctaaaagatactttttcgaatttgccacaggatcaggaacaatctgccaaaacttttagtattgcaagttttccccaggagcagaaaagttcgagctcaggaagtagtggcatgcataactctttcgaaactgctgaagtaaaagcagacgactcttccaatcaggcatcgagcaccacgtttttgaatggacaagcaaaccaagtggttcagagtgctcatgatcaaggacagatgtcagccccaagttcaaatggcattgctgattcccaccaaccagctgattcacccacttcagcttctatgaacaatattgggtctcctgttttatctgagagatcagctcacaaagcagcaagtacccctactgcatctccgatggctccatttgcatcttggcctggcagtgcaggatcatacagcgatggtaggcagctaacagcctctccatccatgtcttcaactatatctgggattgacctcgattcatcccctgatctgaagacaaacattcaggggtcacctgcagtgaacacacttttcccaattaattcgaagcttttgcttgacatagatgatttaggttatgggggtggtccttgctctgcaggagctactgctgttcttgatttcattgctcaaatccttgctgatattatctcagaacagctcaaagcaacactctttattgagagcatcctggagtgtgtgcctctgtttgtagatatcgattctgctttggtttttcaaggtttgtgtctaagcagactgatgaacttccttgaaagaaaactcttacttgatgatgaagaagatgggaagaaacttgacaagagccgctggtctgcaaatttggacccactttgctggatgattgttgatcgtgtatacatgggctgctttccaaccccagtcggtgtgctacgtacgctagaatttttaatgtccatgttgcagctttctaataaagatggccgtattgaagatgcagtaccttcaggtaaaggtattctatccattgctcgaggaggcaggcaacttgatccttacatccacgccatattgaagaacactaaccggatggtaatgtattgtttcttgccaacattccttaagaatatgggggaggatgacttgcttgcaaatctggctttcctaacagaaactggaagaagtttaggtatttttaaaccttcccaggaagattatactgttgatatctgtactgttcttcagcttctgattgccaacaagaggctggtgctgtgtccaagcaatgttgataatgatctaatgtgttgtttctgcataaatttaatggcacttcttcgtgacaagaggttaactgcacaaaatttagcagtggatttacttaaatacttggtagtgcatcggcgtccgtctcttgaggacctcctagttagtaagcctaaccaagggcaacagatggatatcttgcatggagggctcgacaaactactgactggaagtacaacagcgttttttgaatggctccagagttctcagcaaacaataagtaaagtgttagaccagtgcgctttaataatgtgggttcaatatattactggctcagcaaaatttcctggggtgagaataaaaggcatggaggtcaggcgcaagaaagatatgggacgaaaattacgtgaaattgcaaaactagattcaaggcactgggagcagataaatgaacggaggtacaatcttgatttggttcgtgatgtaatgtctacagagctaagagcgattcgtcaagacaaatatggatggatactgcatggagaaagtgagtggcaaagccagctccaacagcttgtacatgaaagaggcattttccctgtgcggcaattatcgacagagcctgcatggcagctgtgcgctgttgaaggaccgtatagaatgcggaagaaacttgaaccgtccaaatttaagatagatactattcataatgttctagccagcaaccttgggttagatgatgttaagattaccaagaaagaggatgggcacatggtgatgacatctggatcagatacaatgtcaggcttgaatcttttgacctatgacacagaacggaaggatcttgatgctgctgattttgcatcgttcaaagatgaagatgacatattcaaaggaggaagcacagtgtcacctccaattggctggactgatgataaaagcagcattaacgaacaaagtcttcactctgcaacagaacatggagcgaaatcaagttccttttcttatcacatgacagagagtgtccacggtaaatctgaatttaattcacctagacgggcaccttcagttaagggcaccgatacaagaacctcagaggataaatcggaaaaggagttgcttgacaatggagagtatcttatcagaccttatctggaaccttccgaaaaaataaggcataagtacaattgtgaacgggttgctggtcttgacaagcatgatggaatatttttaattggagaacttagcttatacatcattgagaacttctacattgatgattccaattgcatttacgaaaaaggcaatgaagatgagctctctgtcatcgatcaagctttaggtgtaaaaaaggatgtattgggaagctgcgattctcaccaaaaatcaccatctacgtggggtgcaacagcaaaagttttgcttggtggcagagcatgggcatacaatggaggtgcttggggtaaggagaagctttgcagtagcagcaatttgcctcatccatggcatatgtggaagcttgatagcgtccatgagctcctaaagcgtgattatcagcttcgccctgttgcaattgagattttcagtatggacgggtgtaacgagcttttagttttccacaaaaaggagagggaggatgttttcaaaaatctgaccgccatgaacctcccacgaaatagcatgttggacacaacaatatcagcatcctcaaaacaggatagcggtgaggggagccgtcttttcaaaataatggcaaaatcattttctaaaagatggcagagtggagaaattaccaacttccaatatctcatgcatctaaatacacttgctggtcgaggatacagtgaccttacgcaatacccagtatttccatgggttcttgcagattatgagagtgatactttagatctgagaaacccacagacgttccgtaagcttgacaaaccaatgggatgtcaaactgaagggggagaagaggaattccgtaagagatatgatagctgggatgaccctgaagtaccaaagttccattatggttctcattattcaagtgctgggattgtccttttctatcttttaagactgcctccctttagtatggaaaatcagaaattacagggtggacaatttgaccatgcagaccgtttattcaatagtgttaaagatacatgggtaagtgctgctggcaagagcaacacatcagatgtcaaagaattgattccggagttctattatttgcctgaatttttggagaaccaatttaatctggacttgggggagaaacagtccggagagaaggttggtgatgttgttttgccgccttgggctaaaggtagctccagagagttcatcaggaagcatcgagaagccttggagtcagactatgtatccgagaatctgcatcactggatagatcttatttttggatataagcagagaggaaaggcagctgaagatgctgtaaatgtcttctatcactacacgtatgaaggcaatgttgacatagattccgtatcagatcctaccatgaaagcttcgatactggcacaaatcaatcattttggtcagacccccaaacaattattccaaaaaccacatcctcagagacggactgacaggaaggtccttcctcatcctctacggtacagcgcgtatcttacacatcaagagattcggaagacaacatcatcagtttcccagattgtgacctacaatgataagatcctaattgctgcagcgaacagctttctcaagccagtaaattatagtgaatatatttcctggggatttcctgaccgcagtttgagaatattgacctatgatcaggataaacttgtatcaacacatgaaaaccttcattctggaagtcagggtcagtgcactggagttagccatgacggcaacattctcacaacaggtggtgatgagtggctacttgcagtcatgggacattaaaagatgagcacttgaaggtttctgagcatcagcaaaactagatgatagtaaagatccaacttacacattatagaggtgagtaattcaagctaaataacctctggttgctttctcacccagaatgtgacaaggacctgcttgtgcagcctaagaatgatctcagagctggcaaggttccacacaaccatatatcaattatgttggcccaagccccagaccattatgccaaatggtgcgggtgcacttttggacgtttggaacgtcaacggagactgtcttgctgtggttaatacctctcagcttccttcggatctcatcttgactgtggcaagcactacaaactcggactggcaggacacaaactggtacgtgacaggtcatcaaagcggtgctgtgaaggtatggaagatggtgcactacacgtctgatgaggcagcaaacagcaagagcaaatctccaccgtccacccttggagggatgagcttgaatggccagactcaggagtacaggctacttcttcagaaggtgctcaaggctcacaagcacccggtcactgccctttgtcttccacccgacctgaagcagcttctgagcggggatgccagtggccacttgttctcatggtcactaaaagatgatagctttaaggtttcatagcaacagctcaacagaggatagtcaggattcacctgcacatatagagagccttagttaagttatatacctctggttcctttctcacccagaatctgacaagcacccggacgcgtgggcaaagaaagaactcagagttggcctcggcatgcagaaacattctacaatatggttggcccaggccccagcccattcagcaaaatctggggtgaagacacagtacaacagaaacacactggaagggataaaatggagatggcgttgtgctgacattacaatcttattatactgtgaattatctaccggttctacctcatcttcttgttttttcatgagaggattcgtgcggggtagcaaccagcgtgtgtaaagtttgtataggatgcttttggttagtagtggtgaggggacgatggtgatgatgttgtacggtgaagatgttatttttcgtcttggggatgtaaggaaaggggtgttaggttcctcttctttttctgttttgtttctctattttgtccccagaagtggtggtgttcattcattgactgggtgtaatttgagcacccttctgttcacttcagttcatttgcacatacatgcaagagattttgttc

SEQ ID NO: 23279 - DNA, 2220 bp, Oryza sativa
  Clone ID: PAT_MRT4530_28374C.1
atggcggccaccgccgccgccgccggccccgcctccccggcggtctccttctccctcccctcccctcccctcccgcgccgcgcggactgccgccgcgggcgcgggcacgggcaccggccccgccgcggcccgcccctcctccgcgccgcctccaccgccgcgccaccctcctcctccccgtcgtcccagtctccggggagcctctccatccagctctccccgcgcgcctccccgcccgccgcgcctacccacgtggcgtcgctcgcccgggaccgcgccgaggacctgcaggcggagtcccgcgccatgacccgcgccgcggccgccaccgtcttcagccccgagctgctctcctcccgctacggctcccgccccgtcaaggcaaatcccccgatactgactgctcccctatgtgctcgacgactgtttggcactcgaattctgacaattctggctgctgtttgcttcaccagggggcagtcgtcgtcggcggtgcggcgcgcgagggcggtggagctgcggaccatactcaccaggctcggcccgacgttcgtcaagattgggcaggggctgtccacgcggcccgacctctgcccacccgagtacctcgaggagctctccgagctgcaggattcgcttcccacgtttccggatgaagaggcatttgcatgtatcgagagggagcttggctttcctcttgattcaatctactcaacaatatcaccttccccaattgctgctgcaagtttaggtcaagtttataaggcacggttaaaatactctgggcaactggtagctgtcaaggtgcaaaggcctggtattgaggatattatagggcttgatttttatctactgaggggccttggatatctaataaataaatatgtcgactttatatccagtgatgttgttgctctcatggatgaatttgctcgaagagtttaccaagagcttaattatgtccaggaaggccaaaatgcaagaaggtttaagaagttatatgctgacaagcaagatgtgctggtccctgatatattttgggactacacaagtgcaaaggttctgacaatggagtggattgagggtgtaaagttaaaccagcaagcagctattgaaaaacaaggtttgaaggttctggatttggtgaacattggtattcagtgcagcttaaggcaactattggagtacggttactttcatgctgatcctcatcctggtaacatattggcaacacctgaagggaagcttgcctttcttgattttggtatgatgagtgagaccccagaggatgcaagagtagccatcataggccatgttgttcacatggtcaatagggactatgaagcgatggctcgtgattattatgctctcgattttttggaacctgatgtagatgtctccccaattgtccctgctcttaagagtttctttgatgatgctctgaactcaacagtaagtgagctaaacttcaaaaccatagttgatggcttaggcgctgttctctaccagtacccatttaatgtaccggcatactacgcattgatactgcgatcgctcactgtactggaaggtttagcactctatgctgatcccaattttaaggtgctcgctgcctcgtacccttactttgcgaaaaggctactcactgatcccaatccatatctcagagatgctttaattgagctactattcaaggatggaaaattcaggcaagtttatgtcctcatgaaatggaataggcttgaaaatcttcttgttcaagggagccaagatagagagtttgcagcaaaagatgctttgcaaccagttctaaagcttctacttggtcctgatggggaggaattgcgagtcctagttgtgaaagaagcggttcgtgtcacagaagccatcacttttggaacgctgattgattcgtataatgcagctccagaatttcttaaaccattaatatccagtggtaatccagccggaccgttcaagataagcgacactgaaagggaacaaatgattgagctgcgggacagggttttcagaatatggggccttctgagatcctcggatggctttgacccaaccatcttgcaaccaattgtgcaggtgctacaagagccagaggcccgcgttcttggctcccgggttgcaggaggtgttacgcagcgcctcgcggcccgcctgttgcagcagctgctgagaactccacctgctccaggatctccttag

SEQ ID NO: 23280 - DNA, 696 bp, Oryza sativa
  Clone ID: PAT_MRT4530_28375C.1
ccgccggtgtactcctcccggaacggccacgccagctacccgttcccgggcgtgtacctgcaggggtcggcggcgctcgggatcggcatccggaacgacgcggcgcggagcgagctggccgtggattccagcgccaagtacaggatcgtggcggcggagtacctcggcgagggcgccgtggaggagccgcggtggctcaacttcatgagggtgtgggggccgacggtggtgtacaagtcgaggcagaggatggagcggatgacgagcgcgatgcaccgccggctgaggagccccgcggagaggatgctgaacaagctgcccaacgagctgtccagggaggaggggccgacggggcccaaggagaagaacaactgggaaggggacgagcgatggtaggaggctgaggatttgtcatttgtgctttggtgtgtctctttgtgtcgttttggttcaggtgttttacggttactggagcagcttgtactgtgacagagatgtagtactacgtgattattattcatgattgagggaacagatttgctatctgctttgtactttgtaggctattaaaaaaaaaaaaaaaaaaactacagtacgtgagaacaagggactacctacttgagtattttgtcaaaccgattttgtttcgattagtaatccagtatggttgcaaccaaaaaaaaaaaaaaaaaaaaa

SEQ ID NO: 23281 - DNA, 175 bp, Oryza sativa
  Clone ID: PAT_MRT4530_28376C.1
agcttcgaggagagagatcgagctattcttctcaaactccggccgccgagctccatctttaattcctctttcaccgttcttgtagtaagtcaagccgacgccgttcatccgagaaggagcgccgtcgccgagccgttccgaacgccgtcgtcggcgacaaagcttcgccaacctc

SEQ ID NO: 23282 - DNA, 2592 bp, Oryza sativa
  Clone ID: PAT_MRT4530_28377C.1
gtggcgctgcgagcggcggaggtggtgtccaagatcggcgcgtttgggctgaaggtgttcctggacgagcagagggggcagtcgtcgtcggcggtgcggcgcgcgagggcggtggagctgcggaccatactcaccaggctcggcccgacgttcgtcaagattgggcaggggctgtccacgcggcccgacctctgcccacccgagtacctcgaggagctctccgagctgcaggattcgcttcccacgtttccggatgaagaggcatttgcatgtatcgagagggagcttggctttcctcttgattcaatctactcaacaatatcaccttccccaattgctgctgcaagtttaggtcaagtttataaggcacggttaaaatactctgggcaactggtagctgtcaaggtgcaaaggcctggtattgaggatattatagggcttgatttttatctactgaggggccttggatatctaataaataaatatgtcgactttatatccagtgatgttgttgctctcatggatgaatttgctcgaagagtttaccaagagcttaattatgcagtacccatttaatgtaccggcatactacgcattgatactgcgatcgctcactgtactggaaggtttagcactctatgctgatcccaattttaaggtgctcgctgcctcgtacccttactttgcgaaaaggctactcactgatcccaatccatatctcagagatgctttaattgagctactattcaaggatggaaaattcagatggaataggcttgaaaatcttcttgttcaagggagccaagatagagagtttgcagcaaaagatgctttgcaaccagttctaaagcttctacttggtcctgatggggaggaattgcgagtcctagttgtgaaagaagcggttcgtgtcacagaagccatcacttttggaacgctgattgattcgtataatgcagctccagaatttcttaaaccattaatatccagtggtaatccagccggaccgttcaagataagcgacactgaaagggaacaaatgattgagctgcgggacagggttttcagaatatggggccttctgagatcctcggatggctttgacccaaccatcttgcaaccaattgtgcaggtgctacaagagccagaggcccgcgttcttggctcccgggttgcaggaggtgttacgcagcgcctcgcggcccgcctgttgcagcagctgctgagaactccacctgctccaggaaggccaaaatgcaagaaggtttaagaagttatatgctgacaagcaagatgtgctggtccctgatatattttgggactacacaagtgcaaaggttctgacaatggagtggattgagggtgtaaagttaaaccagcaagcagctattgaaaaacaaggtttgaaggttctggatttggtgaacattggtattcagtgcagcttaaggcaactattggagtacggttactttcatgctgatcctcatcctggtaacatattggcaacacctgaagggaagcttgcctttcttgattttggtatgatgagtgagaccccagaggatgcaagagtagccatcataggccatgttgttcacatggtcaatagggactatgaagcgatggctcgtgattattatgctctcgattttttggaacctgatgtagatgtctccccaattgtccctgctcttaagagtttctttgatgatgctctgaactcaacagtaagtgagctaaacttcaaaaccatagttgatggcttaggcgctgttctctaccagtacccatttaatgtaccggcatactacgcattgatactgcgatcgctcactgtactggaaggtttagcactctatgctgatcccaattttaaggtgctcgctgcctcgtacccttactttgcgaaaaggctactcactgatcccaatccatatctcagagatgctttaattgagctactattcaaggatggaaaattcaggcaagtttatgtcctcatgaaatggaataggcttgaaaatcttcttgttcaagggagccaagatagagagtttgcagcaaaagatgctttgcaaccagttctaaagcttctacttggtcctgatggggaggaattgcgagtcctagttgtgaaagaagcggttcgtgtcacagaagccatcacttttggaacgctgattgattcgtataatgcagctccagaatttcttaaaccattaatatccagtggtaatccagccggaccgttcaagataagcgacactgaaagggaacaaatgattgagctgcgggacagggttttcagaatatggggccttctgagatcctcggatggctttgacccaaccatcttgcaaccaattgtgcaggtgctacaagagccagaggcccgcgttcttggctcccgggttgcaggaggtgttacgcagcgcctcgcggcccgcctgttgcagcagctgctgagaactccacctgctccaggatctccttagcagataagacatgtaaattcacacggtactttccacaggaaagagaaaaggaaatgtaattcggaaatcaagtataaagttgatttcttcattc

SEQ ID NO: 23283 - DNA, 918 bp, Oryza sativa
  unsure (1)..(918): unsure at all n locations
  Clone ID: PAT_MRT4530_28378C.1
acttgagttagatgctaccccaattgnccctgctctaaagagtttctttgatgatgctctgaactcgacaggaagtgagctaaacttcaaaaccatagttgatggcttaggcgctgttctctaccagtacccatttaatgtaccggcatactacgcattgatactgcgatcgctcactgtactggaaggtttagcactctatgctgatcccaattttaaggtgctcgctgcctcgtacccttactttgcgaaaaggctactcactgatcccaatccatatctcagagatgctttaattgagctactattcaaggatggaaaattcagatggaataggcttgaaaatcttcttgttcaagggagccaagatagagagtttgcagcaaaagatgctttgcaaccagttctaaagcttctacttggtcctgatggggaggaattgcgagtcctagttgtgaaagaagcggttcgtgtcacagaagccatcacttttggaacgctgattgattcgtataatgcagctccagaatttcttaaaccattaatatccagtggtaatccagccggaccgttcaagataagcgacactgaaagggaacaaatgattgagctgcgggacagggttttcagaatatggggccttctgagatcctcggatggctttgacccaaccatcttgcaaccaattgtgcaggtgctacaagagccagaggcccgcgttcttggctcccgggttgcaggaggtgttacgcagcgcctcgcggcccgcctgttgcagcagctgctgagaactccacctgctccaggatctccttagcagataagacatgtaaattcacacggtactttccacaggaaagagaaaaggaaatgtaattcggaaatcaagtataaagttgatttcttcattcatgccgg

SEQ ID NO: 23284 - DNA, 609 bp, Oryza sativa
  Clone ID: PAT_MRT4530_28379C.1
gcacgaggctccaatcacaagaaatttccacaaactatggagctcgcaccagcgctctcgttgagcatggccatgtcttcgtgggtcgccaccatcgtcaccctcctcatcggcgtcgccgtggcttcgttgcgtggccgccagcgccggacgaaggcgcggctgaacctcccgccggggccgcgcgggtggccggtgttcggcagcctcggcgccctggcgggcgcgctcccgccgcaccgcgccctggcggcgctcgcggcgcgccacggcccgctcatgcacctccggctgggctcgttcgacgccgtggtcgcctcctccgccggcgccgccaggctcgtcctcaagacccacgacgccgccttcgccgaccgcgcgcgcaccgccgccggcgagctcgtcgcgtacaactacaaggggatcgtgcacaccccgtacggcgcctactggcgcatggcgcgcaagctctgcgccaccgagctcttctccccgcgccgcgtcgactcctacgagcgcatccgcgcggaggagatcggggcgctcgcccgcgacctgttcggccgcgccggccgcgccgtcgccgtgcgggagcgcctcgcgagcgcg

SEQ ID NO: 23285 - DNA, 1344 bp, Oryza sativa
  Clone ID: PAT_MRT4530_2837C.1
atgtcatggcagagggttggtgccctgctgctaggggctcagtcctgcctgcctgtcccggagatggccggcagcgtcacccgtcgtggtttgcacatgactggcttcgtcttggagctgcggggcatgtgcgtggtcttggggtatccacatggagtggattaccaggccaggccgcttccggatcaggagggagacgacgcggagccccacgctgggtgggaggtcaccgcagtgatcctcgccggctcttctgagcgggcttcgttggcagtcaccgcgggtggagactccttccccgccgcttgccagagcgccgctctcctcgccatcggcacccttcaccagcgctacccggacgagttgcagcactcgccctaccgctaccaccctcgtcgcggaggagcccgcgactacgccaccttccgggatgctagctcggaggatgacgctaccatcgtgcacctggcacgcatggtggaggcgtacgacgcggctcgtatcgacttccatcagatggtacgccgcgggatggtcgagaacaacatgaagatcctggagctgcgccaggagaacctgcagctcaagaaggacctcgacgcagtggaggcgcagctgcatcagctcaagatcgcccagggagagatctgccgccccaagcgtcgccgtgtctgccgcagccagaagatcaccgcccgcaagagcacctccaggcctgagcttgtccgtcagtccctggcgtggacctgcttcgtcgagacccctcgtgccgagcctgcgcccgtggttccccaggagggggaagcctccggcgttggtagctcggaggtcgtgtggggcatggttatgccgatggtgacgaccaggagaaatgctgctaccggtgatggcaaccaacctgaaggcagcaaccacaaccaccagggcaacccacctccacctcctcctccgcctccgccaccaccaccagacaccaacgccattctcacccaaatcctcgcccagcaagccaacatgatgaccgctttcctccaccacctccaaaacccgccacaacagaatgctccaccaccacctccccaacactctaaactcgccgagttcctccgcatccgcccacctaccttctccagctccaacaaccccgtggatgctttggattggttgcatgccgtggggaaaaagttagacacggtgcagtgcagcgatgaggagaaagtcgtcttcgccgcccatcagctgcagggacccgcatctctctggtgggaccacttccaggctacgcagccagagggacagccgattacttgggctcgcttcaccgccgctttccggagaacccat

SEQ ID NO: 23286 - DNA, 345 bp, Oryza sativa
  unsure (1)..(345): unsure at all n locations
  Clone ID: PAT_MRT4530_28380C.1
gagcaaacactcccctttttttccatagactcctcttctctgttcgtgaatccaagatccgcttctttctcctgcggttgctctgcgctctcagcaccaaccaaatccccctccaattcctcatctttcttgaccaattcttgaaatcaatcagacgcaataatcaaccactattcttattatagttggatcataattaatcaaggtttgaggtggatccatggcgatcaagggcggcggcgggtcggcggagaacagggggcggaccgctccgccatggtggtcgccgtcggcctctgctgcttcttctaactgctcggcgcgttgcanccaggnctacggcaa

SEQ ID NO: 23287 - DNA, 429 bp, Oryza sativa
  Clone ID: PAT_MRT4530_28381C.1
ataatttagtggatttattgagcagtttttaagtaacggacggctccctggaaaccctgctgctgtgctgctgaccgatggcgtttgggcctgttcggcacgccgactgcgagggctacatatgcggctgcgcacagtgagtacggcactgttcgtgccggctgcagccacagccctgacagccgaacaggcccattagtgacatcgattgccctctggatattttttttttctcgcttccaacctggcagtaagacgccggcagggcggcaggtagttcggatgcgctcgatcggctccgctgttaaattacgaaagctcggtcgcgcgagggcggcagcggcggcacaaaaacacggcggcaccggcggacgggagactcaagaaggagctatatgtaattactataaaattagagggtggatgtgc

SEQ ID NO: 23288 - DNA, 508 bp, Oryza sativa
  Clone ID: PAT_MRT4530_28382C.1
ccttccttctcccgcttaccggccccccggttggcgctcccgtgggtgtcgttggcccccgcgcctgctcctgcgctcgttccgccgattctcctctggtccccccctggtcgcgcgcgtggttgcggttgacggccccccgctctcgtacggtcgtgaagccggcagcgctcggtgcggcatggggggggtgtttttccgcggtccgcgcccgctcggcctgctgctgtgttgtggctgcggttggttcgtgtgcggtttggtgttgtggtgccctgcccggctgcttcgcctgctccggggtgggctgtacggtattgccctggcccctcttgtgctgtgctccccctcccgggatgctctgctactcccgcggagggcggacggtcctgccgtgtcccggtcctgttagaaggaaaatgccccagctcctcatgtgcagaactcaactcatgggataccgtgatactagtgcagaatttgaactgaaaaaaaaaaaaaaaaaaaa

SEQ ID NO: 23289 - DNA, 129 bp, Oryza sativa
  Clone ID: PAT_MRT4530_28383C.1
ctgctagtacgctatgggaactaccgttctctctcgttagtccatgtactttctgtgctatgctacttagccgcagggttttatgtccccgactatctattctgagcctaaacccatgtgcataggcct

SEQ ID NO: 23290 - DNA, 278 bp, Oryza sativa
  unsure (1)..(278): unsure at all n locations
  Clone ID: PAT_MRT4530_28384C.1
aggtaagaaaaatcaatatcactataatgctgtgtaagtaagaatattttcaaatgcaatgtcgtacaaccaaaactataatgctgtggatatatcttcaagctgcaaaatcacaaatctggctatctgatcattctagtatatgactaaggcaacagtacaaaattttagatgaaacttccacaaagagaaggtatcttcaaaatcacaacagggatttctgactcagttnttgccagtttttgcatctagcttcttttcagcttcactgataatct

SEQ ID NO: 23291 - DNA, 394 bp, Oryza sativa
  Clone ID: PAT_MRT4530_28385C.1
ataattgttggaatatgctttcgcattttccttcccccgtaatgtttcttctactgacataatgagtggggagttaaactgtctccattaataggccagcttgtgagttaaactgtctccattaatgggccggtttgtcttttcccggcacggatctgtctactttaagctagtggtgctgataaaatctaaaatttctcttatgtgtgttaaaatgtctcgtatgttcgtggatatcacaacttgcttggcattgtctgtgatgtgccgtgtacatgcaagcatgcaacttgaaagtaggagttgtctggttggactgcgttgaaatatttgtaaatgtgtagggttcttccttttctttacggtttaagcttttgcagtgaactacttgagt

SEQ ID NO: 23292 - DNA, 245 bp, Oryza sativa
  Clone ID: PAT_MRT4530_28386C.1
gatgaaaaccacttcgagacaatttactcagggggcaaatatttctcaggcgacaaatccaaacaccttggtcctttcttatcaaaaatcagaattaaccagtttttaaatttaatatccaaattaaccttatatacacgttcatttaacacattctttcacccttatcaaaatctctacttttttttccccggtaaaaataaaattaactttatgtcaaccacttttatctgaatcaaaaatat

SEQ ID NO: 23293 - DNA, 476 bp, Oryza sativa
  Clone ID: PAT_MRT4530_28387C.1
ccggccgagctggaggcgcgctgctcttcgcggcatctcaattcccaccgccgcatcgcgagatctccggccttttctccttccggttgaggagcaaagagcagcaattatggcggcgaaacccgagccgacccagttggagaaggagcagatgttcgggatgatggagaaggagatggagtaccgggtcgatcttttcaaccgacttacacagacttgttttgacaagtgcattgagaaaaggtataaagaagctgagctcaatatgggtgagaacagttgcattgatcgatgtgtttcgaagtactggcaggcaagtaatatggtaggtcagatgctcggtaaccggcctcagatgtgaggcgagaagcagtagaagcattaggccagaccattgtcgctatgtttctccacattggttttagaatgttaccgattgccagaagtacacagcacgagtgagtgtgaccgactaa

SEQ ID NO: 23294 - DNA, 555 bp, Oryza sativa
  Clone ID: PAT_MRT4530_28388C.1
ctacgagacccagctcatcaccaagataggcaataaattacccacacttatatatatatacacatcacttatgctaattaaatacttaattaactatctcatcgcatggaaggagacggcggcggcgtggtcgacggcgacgagccggcgccgccgttggccgccatggccatggacgccacggccttggcccacgccaccagctccctcttcatccgccgctcgtcgccccagatcatcgggtccaccggccgccgccgcccctcctccgtcgcagtcgcagcagcaagaaacaccgtcgtcgccgcctccccgtcgccgccggccgccggaaaaggccgctgcaggaccgtctcctccaacgccatatctcagctcgatcagtataaggtggtagtagaggtagatctcggcggagtgcgggacctctcaacaacggggattcaaagcttgacgcggcaccgctccggttcggccggcaacaaatgggtgacgaatgctccactagggactagctttagggagatctcaccatctgcccatcaccttcaatag

SEQ ID NO: 23295 - DNA, 510 bp, Oryza sativa
  unsure (1)..(510): unsure at all n locations
  Clone ID: PAT_MRT4530_28389C.1
ctgattgagcttaatctaccgcggcggggacgctctataactagtggatcccccgggctgcaggaattcggcacgaggtcgagtgaaaagtttatggattctgtggaagtttacaatgtgaaatgcggctggtcagttcctggtttcagctcgattggggtgagtgcttcgcgtctgctgctgtcgttaaacgtgttaaaattcaatgcttgtcccctcccctcaattcttaacaattttgtggccctgcccaagaaaccaaccccaatcctgtttttcccaaatttttgaagggttaaaaattgccccttctgccggtgaatcccactttcctgtttcaccgaaatccccccatattttgaacccccagtttatccccttctccttgtccccaaatttttaaatccccccccctcatattccccgaaaaattccccccccctcggtttaaaaacccccggtttttaacaggttcccaattttatccccctctgggaatacnctccccgg

SEQ ID NO: 23296 - DNA, 759 bp, Oryza sativa
  Clone ID: PAT_MRT4530_2838C.1
ccggccgggagcaagcgccgctccggttaataatagcaaaatcccctcccacccccgccttctctctggaagcttcctcctgctcttcgccatggccggcggcgggaacctgttcgggagggtgctcagctacgtcgtcaacgagttcatcgtcgaggggctcgccaacaagtcaaccaacttttatctccgccgcctccacctcccccggtgtagcagaattctcttccctgtgccatggcctgtggtcctggtggcaacctgttcggaagggtgctcggctacgtcctcaacgagatcctcgtccaggtgctcgccaacaaccgtaccttccagagatttgctgtgaggaccaacaagtctcttgagaatctatcgtccaaagctaaagaagtgagggaggagctatcggagcaatggaggaattctcgtggcaatgatgatcatttcaggcagtgaagctggtcattttatgaggactatgaagtcgttgctaactgtacaatcttgctatcggctttcctagtgctatgattgctatttttctatattgtcgcatggaagaaaccattgtatagaaaccatgtgatctcaatttttgtgaacttgataagtagaaatcagaccactttcatgtcgtacttccctattatcttccgagtatactttgtaatggagaaatcctgcataagttaactcttgatgatgacggaatgatagacccgcatttaaacgttcgttggtgtcctatgttggtct

SEQ ID NO: 23297 - DNA, 552 bp, Oryza sativa
  unsure (1)..(552): unsure at all n locations
  Clone ID: PAT_MRT4530_28390C.1
ttttttttttttttttttttcaaccagcaaacattatcaataaattggcatgatctggactttttatccagtaaaatccacatacaaaatcacaaatggcaacgaacattttgccaggcaagcacagcagccatgtgcaacccaggtggttcatngttacatggacaggcagcacttctcggtctgtatccaccaagcacccattctggtatggtagccaaccaagcagcactcgcgtggatccagtataataaataaactaactcccaacaccagcacattagtagcactaaacaggaccaagttagccaacccgcggcaatgcttcttccagccgtatctatgtatttccccagttgcaaagccctatagtagttgcagcaaccttggcaatcctttnatcgcgcacctgccacatcgaggacaaccaatgcacataagcacacattaagcctggcaggcatgcattaccacaccaaaggcccatggagtatanacacnaggttcatcacaataacagcagtagtatcctaagcaaacatgcatttaggt

SEQ ID NO: 23298 - DNA, 113 bp, Oryza sativa
  Clone ID: PAT_MRT4530_28391C.1
gggttgcgttgagctttccatcgagaagtgcgatggaatcaatttctggagatgtgctgagatcgatctcaatgagttcgacggtttcaaccttcatctcaatgagttcaacg

SEQ ID NO: 23299 - DNA, 350 bp, Oryza sativa
  Clone ID: PAT_MRT4530_28393C.1
ggccttaattggtcagcaaacaaatagtggcaatgtggcatcaatagccactcagcctacctcttttgtaatcaggatcttcagatggcaaaccacatcctcctcggctgtgtgttcgctcgctggcttcaggtctggtgtacatcttctagggcctgcttacctgagcatattcgcgccggcttcgactccttggtcctcctggtctcttagcagttgtggaaggaacataacttcagggtttttgactctgcgctctcttcggtctcagttgttatggtgtccatcctctcggagggtcatctatggtttttagctagcattgttatttttggcgtttcttgggaatg

SEQ ID NO: 23300 - DNA, 1045 bp, Oryza sativa
  Clone ID: PAT_MRT4530_28394C.1
atgcggcgagccggcgccgtcgcggagccgaggcgaggcggcgtcgcgttgagccgttacgctgggcaagtgggcaacgacgagtccagccagaatcccatcccctttcagccctcgtcgccgcggcggcgggccgcgccgtcgtccaccgctgctggcgagggggcggcggatgaggcagggtggtccagatcacggggcctccactccatcgtctcccaatccctcccggagcgcgctccccgcagccgcagccgccgatgtggcggcccggcgctcgccatgctcaaattggaggtgacgaatcatacgactcatctgttcctacagcaagaaatccattgcacgcacagattgagattttagcaaagtttttaagttcaaatctgtccatttaggaggtgatgaagttaacacaagctgctgtactgcaataccccatattaagaaatggtacaaacaggggaactaggctccatcgatccggttcttcatgtggttggcaatcaaaggccattgtttgacggcagataacttgcaaatgaaagggtggccaaatcagcatgactgtttgcaatatcaacagatgcatgagacctgcaagtgcttgttggtcgagtgtgcttacaagaatcgagtgtggcgatacaagatcagaccatttgaggactggtgactgtcgacgaggccggcgttcgagaagcaattaagaaaagcttttgattcgctgtgttttatgttaagctgtctagtttggaaggaaaggagatgctagaattttcgaccaacgagtgaaatctaccttgcagctgcttggggaagtcaaaaaggagatcatgctctggaaagaagctggagtgttcatgaatccttaggagtagtttgcagccctagcgagtaccagctgctgctggcatgtttctcatcaggtctcggcaaaggctcgttgcttttcttgtatctaactttgtaacattatgtatacatcttatttcaacttagtacaattggttggccgcttttttaattcggccaacccagcccc

SEQ ID NO: 23301 - DNA, 432 bp, Oryza sativa
  Clone ID: PAT_MRT4530_28395C.1
ttctttcgcccacgcgtccggtgcgaggggggggggggatgctgggtaggcatctacagggtagctcggcgcccttttgtcggttctaccccatgtttcgtaggtgttccttggctgccgtgtaggggacttggagcgcgcggcggcgagcctcccggcgttctgcatcgtggacatccccaacggcggaggtggtgtctgctactggctggcgagatctggctactagctaggctactatagttagctgtgtgtgtgtgactatgtggggttgctaaataattagtgctttcttttgtcaggaagcatctatttatatatatgtggtgaataaatgatgaacttcaatgttcttctgaatctctctgttccttttctgggggccgggggcctccttgggttgggggtgcccccttttgggggccccgaact

SEQ ID NO: 23302 - DNA, 109 bp, Oryza sativa
  Clone ID: PAT_MRT4530_28396C.1
atcttgaggtcgaccattggcatcacaattattcaatggttcacgggggtgacaaccctggtgtcccggggacccatgtctggctgactgcaactacagtctttacact

SEQ ID NO: 23303 - DNA, 178 bp, Oryza sativa
  unsure (1)..(178): unsure at all n locations
  Clone ID: PAT_MRT4530_28397C.1
tgaaatgtacccgtncaagttttgtttagatctntggtcatgcaaattntggttgntnttgccctntcgttgggccatgtcccttctttgaagcaatagcnttaacagcctgtttntttcaaaaaaaaaaaaaaaaaaaaaaaaaaaaaaaaaaaaaaaaaaaaaaaaaaaaaaaaaa

SEQ ID NO: 23304 - DNA, 454 bp, Oryza sativa
  Clone ID: PAT_MRT4530_28398C.1
cggacgcgtgggcggacgcgtgggcatgtagatacttccacccgaagccacctcctgctaatccaggaccagctccttctggccctgtctctggaccaatggcgcagcagtctaatattcaaggaagtcaacccaattttgttggatatcaggcagcagatggaagttctttctcagggaacattctagggggtcacacctcatggggcaacttgcctccatcactgcggccacctcctgaaggcggctatcctccatttccttttgtagactggggttgaattgcttgttaatctgaaggtgccatatgttgaaacttcatgccggctatgcaatagttcaaacacacaatgaattttactattgctctctacaaatgggtttatattagctgtgagaatgctctcatatgcagtggaacctgtacctctagtgaactgggagcctggttttc

SEQ ID NO: 23305 - DNA, 265 bp, Oryza sativa
  Clone ID: PAT_MRT4530_28399C.1
gctgggctgccctctctccctctcgtggcagctggctccaggatttgtggtcattctccacctccaatacctgtttacctgagcacctccgcatcggcttcgactccttgatactcctgatctcttgcagctgcggaaggaacgaaactccagggttttctactttgcactcgcttcagtcccagtggttctggagtccatccgcttggagggtcagctgtagtctttagcaggcgttgttttttttggggatttctttgaagta

SEQ ID NO: 23306 - DNA, 4883 bp, Oryza sativa
  Clone ID: PAT_MRT4530_2839C.1
ctattgctccgggtcagaatctctcaagccatcggacatcacgtagggaacgactgaaagccctacacccagcgctgggggcggtgggttgtcggcgatcgtgtgtccttcgtggatgtctgtgaggatgtcggcctggatctcgagaatcttgtcgtcatctcccgctgttgtctcggcgccggtctccatcattgtcatcgttatggcgacgtcctcgaccagtatcgtctggcacccgccgttcgcgatcgttgtgatcgtggcggttgtggcggttatcatggcctcggtcttcgtttgagcggtctcctcgatcttcgttattatggcgccgtgaagagacatgacgccgggaacgattctcattgtctcgtgcgcgtcgtgcctctcggcggccgttgaggtgatctcggagatcgctagtgccgcgaggtggaggggtggctcgatgaggcgattccctccgttcagggtcttcaccattggcatcgccagttggtggttgctccgggtgcgcccaacaaatcgatctgaagttggcgtcgctcctcgttccttgtctttatccctgatggggatgtgtgactgttggaccttaggagatggcgctttcatggcgctgagaaagaccttgcaacttgagaggtcgtgattctttgtcttgtgaataggacaatagacatcacgagttggagaaatacgctgaattccacgctctttgcaggcgcgaatttcagcgcggatgttgaggaaaacccagcaggcttgcaaagtgtgtttcctggttttgtggataggacaccaggaccttgtcacttcggaagtcatcttcgtcagctcgcggttcatgtcggaacgacaaggtttggccgcattagaatccttctcgagctcggatgtcgtcgatgttccgttctccgcctcggcgggaggatctttcgacatggagtcgtcttggtttgtagccattgcgttctcgtttctagtcattggcggaccggttgagatcggcattgtggtgtaaaccgggaagacgatttcgccgacttgagtccacaccagcatcgttgaagcagggaatacttggctgaggttggtgttgacgctattgtcgacgaggctggatgacatagtagtggaaccttgagtaccaagtcccctctgacgaagcggacgcatggcggctctgctgtcaagtgtcggtctcttgggctgctccatctgcgacgtcctgctcgtcagcatggcgacgatttcggacatggtcggcctatcgtccgccatgtcctggatgcagagaagcccgatgtggatgcaccgttctagatcgtacaggagctctgcatcgtcgggtgcaggcctcgccattgccgggtcaaggaggtccatgaggttgccctgttcccacaacctccatgcctgtggaagaagcgtctgcattgagccgttgcgaacgccgctgagcgtctccaggaggacgactccgaagctgtagacgtcgcacttgagcgtcatctcgtctcgtaacgcgtactccggagatgcataaccttgtgagaccacgagggtctggcctgactgatcggcgacgaacagcttggcggtgccaaagtctgcaatcttaggcttcaattcgtcgtctagaagaatgttgctcagcttgagatccctgtggattacactcccgtctggtccttcgtgaagatacgcgacacctttcgcgatggcctgaattatgtcgagtcttcttctccagtgcagattagctcgacgcggcaacgggccgaaaatgtggttgtccaagctcttgttcttcatgtaggcgtataccagtatacgctcattgccttcgttgcagtaagctaggaggcggagaaggctaccgtgatggagcccggccatcactgccacttctctggcgaaatccttcttgcctttgttcgtcagagctgacttctttagcctcttcacggcaaattcagacttagccaatctcaggtacaaatcctgcccgcggtcaacgtagcgaagatcgacgatgtcgtccgtccaaatgacgcagccgccgccgttgatgtcggcggcggcgtaggccacgcacgagcagtttcccaggcacctccgctcgcactccgccgccgtggcgcccatgtccaccgacgcgttgcgcgtgtctggcagcttcaccccccgcaccaccttgaacttgtccgtcgtcctgctcccgccgccgccgccggcgcagtccagcgccacgcctcgccggcacccaccggaggtgttccgcaacgcccacgccgacggcgacgcggcggtgaacccatccacgcagccgcagaacgacgtcgccgcggcgtcggcgtcgcacaggccgaacggcccgcaccgcgcgtagctgtcgcaggggtccctcgggccctggaagaatcgctgccatgcccggctgctcgcgtcccacacgaggcgctcgaccacgccggtgtagttcaccacgacgcgcgtcaatggcgcggcgccggccgtggcgaccgatccgtagccgtaggtcacctccctcgcgctggacgtcacctgcagcgggaacttgtcggagtagttggacgcctccgggacgccgttgaagaacctgccgttccacgggcccgtgcggtacaccttggtggcgccgccgccgccgccgcctcgccacaggacgagctccggtaggccgtccgtggccagcgtgcggcggtagtcgcccggcgacgggtcgtcagcggagcgccacgccgtgatgaaccactcctgcccgctccacaggctcttgcccatcttcatgccgggcagcagcgtgtccgacggctggtcgaacgactgccacaggtaggcgtcgccgccgctgccattgcgcacgacgaggttgccggagtcgagaagctgaaccaccgcggcagaggcggccaagaagctcgcggaccacaccgtccggcgagagccgccgtcgagcaggacgagctggctgccatcgtcgttgagcagcagcacgccggacttgccgtcgagggggcggtcacggttggctacccagtagacggtgtcgccggacacggtgaaccatatgccgaggtatctcttggtcgacttcccgggagagaagaaccccagagtgtacgagccgccgccggacgagacgagcgtctggccgtcggtgaggttctggcccttgtcgagcttgtcggcgacgcccgcggcggcggcggccgacgtttggccggagaggaggaagaagaaggcgaccaggcggagtaggttagacgattgcgtcaactgattccccgatccagtattgttatcatccagaggaacccttccgacgaaaaatgcagcttgcttcggagcaggaagtgtaacatccccactgagcatcctgagcaccaggggcatgcttggcctatcacctggtaattcctgcacgcacagaagaccaacctggatgcatctgcatacttcatcgtaagagcatatggtgcccatgagtggatcgatcagctccgagacactgccttccttccacagtgtccacgcgtaacccaagagattcattgaccattcttcatcaacaaatgagctgttccttcgtccactcacaatctctaggatcaacacgccgaaactgaagatgtctgatttctcagagaatttgccctccattgcgtactcaaagtcagatatcttggggttgaaatcatcatcaagcagaatattgctcgctttgagatccctgtgaataattttgagcctggaatcctcgttcttgaactcttccaatccctgactggatctgtttgacagcctcttgacagcaatctcctggccatcaggtagtacccccttgtaaacaaaaccaaatccgcctccaccaagcttgttgctaaaattatttgttgagccggcggcttcggcctcgtcgcctccgccgtcgccgcggcacaccacctcgccggcagcgaatccccgcccctggaggccagtccgactaatgggctttgccgttagcggccttcccatatcagccattgccgtcgacgaagaagcttcgcgtgggtggtagagcggggcggagtgaggggcggcggcgcggcggatcctcgcgaccacgtacggcttcgtcttgacggcaccgacgacgcggaaccggtcgccgccgacgtaccccacctcgccggccgccaccccgccccccactcccccgccggagtacacgacgccgaacctggtgacctcctcctggagcactggagcaacgtgtgcaccatgatccggtacctgaactcgaacgcctggagctgcaccgtcgcgccgggaaagaccatcgacaggaacagcacgatggggatatccgccgcctgctcctgccgcggcgccctcgtccacgcagccgtgcaggttgctgccgcccactttgtccgatccacaggtctgaatattccatccgcagagaattctgagacgacgacgacgaagaagctagatggaacttgcagagtcttgagcgccgtggtctcctcctcctcctccgcggcagcggcggcgggctgcctcgagctcccgtccacgtgcggctgcgactcggcgggcggcggagccaagcggagggcgccagcctcgtcgtcgtcgtcttccggcacgaagccggcggggcggggcggagcggggggcggatggcagcgcaaagccgacgggacggactggggcagcgacgggcggacgcgcgggtggagtcttcttgaggtcgtcgtccccggcgccgccgtgaccgtggccggagaggggagatggggagaggggaggaagaagaggtaggggtgagtgacatgcggggcccacgtgggccccaccat

SEQ ID NO: 23307 - DNA, 2772 bp, Oryza sativa
  Clone ID: PAT_MRT4530_283C.1
ttaaacaagccacttagaacacatatatatagtaatctcaagccagcggtaatcccgacttttgattgggccacgtggcacccatatcttctcaaataaatcctggatttcatcggaagaggagcttattggtctctgcctctcagcagaagtgcgtgcaccggcatcatccgcgttaaggaacattgtgttccagtggctgaggatcatgaacgtcacgtagtctctggccaacttgcccaagaatccatagccgtcccagcaaacatgccaatcttccatgtcgaaggcctgatagtaatcaccatctatttttgcatgtagcacaccagatccctgcaatctgcaactcattaagaggaattttacagtccaacaggaggaggtaccaaatcctatttgtccattgagcatgatccgacggctgataaacgttggtaccgcaaggtaccgtaatcccgtttggcggtacctccccaattcatgccaaaccatatagtccagcttggctgtcgccgctaaccaatcgtgggcagagccaatttgttgacctgactctttcagaaccccaaatgagcgttcaactacattccgtagacaagaatgctggtagttaaaaatctcgtgcaaattttcaggacctttggtatcaagctgcttcaaatgatatcttgtcttgcgatatggggacatatagccttcacgtagagggtaaccagaatccaccagataatagttacatggtggtgggtgagggaaatggtcagcattgttcaccgtctctctcgagcttgtcatgcgcatggccgccgaccgacacgccgagctccagtgcctctcgcaccaccgtgccatctccgacttccccccacagcaaccgtcatccacatggccactgccgttccacctccacccacggcggctgccgctgctgctgccgccgtactcgttgatcagcagcaggtccagcgggtacctgtacatggacacgtagtacatgaacgcccagtacctcgggatgctctccctcgggatgaagtagccggagaagaggaagaacacgcccagcgacatgcagatcagcgagttccccagcacgaagtcgggggagacggcgctgaggaagagcaccagggagctcgccatgagcacgatgagccacacggcgagcgcgaagcaggcgaaggcctgggtcgtggcgcggagccccgcgaggaagtagacgggcgccgagaagaggagggacacggcgaggaggcacggcgcgaagacgagggcgttggccaccacgtaggaggagaggcggtaggcgcggcgggacgcctcgcgcatcaggacgcgccgctcgtggaggaggatcgggagggcctccacggtggaggagaggaggaagctgaggctgaaggcgaagaggcccaggcggagcgcgacgccctccgggtccgggcggatgcggaagtagacgctgccgagccccagcccggcgatcaccgcctgcgccgcgcgcgccgcgaagagctccttggtgcggtgcatcgtgcgccagcagcgcaccgccagcgcccccacctccaccgcgcggctgcagtagtagccgtgctcgtgctcgtgctcgccagcgccgctgctttcgtcctcgtcgtcgatgaccttgttgtgttggtgttgatggatggtggtggcgagcgcggcgccgaacctggcgtggtcggcctcgagctgctcggtgacctccatggcgagctcgagcgggttgagctgcatggggatctcgtggccgaggcgggacagggagtgctccagcgacttgagcgtgccgaagtgcgcgacggcgccgcgggagaggagcagcatcgaggagatgtaggcgagcatgcggtagctgggctggtggatgctgagcaccaccacctgccgccgcgcgcgcgccacgtcgcggagcagcgacagcacgtccatggcggaccggctgtccagcccggacgtcggctcgtcgagcagcagcaccggcgggtcgtgcacgatgtccaccgcgatggacacccgcttccgctcgccgccggacaccccgcgcggcgcgccgccggcgccgccgcacccgccgacgtagctgtccgccacctccgacagacgcagctcctgcatcagcgcctccacccgctcgccgcgctcccgcgccgtcacggcggaccggagcctgaaccgcgccgcgaacaggatcgtctcccgcacggtgagcagcgggaggaggttgtcgtcctgcgtcacgaacccgcacatccggcggagccgcgcgcgggaggtcaccgcgcgcccgttgacggacaccaccgcgtgcggcctggcggcgatctcgccgccggtgccgcggccggagaggatgcggagcagcgtcgacttgccggcgccgctggggccgacgacggccaggatctgcgagctggaggccgtgaacgacacgttgttcaggaggcccgcgccgccggtggccggcggcgagctggtcgagaaagaacccaacaaccacgagagcaacccggcgccgccggagccgcggcgagggtcccggcatgagaggttggacacggcgagggtgtagttgggaggcgaagggtggtagaaggagaaggacggcgaggcggagtccggcggcgacgacgacgacgtcgacgtcgagaggagcgccgggtcgagctccgacgacagcgacaggtcctccatggctagctagctatagcaaatgggaacgacgatcaagcggacgcggggtcg

SEQ ID NO: 23308 - DNA, 386 bp, Oryza sativa
  Clone ID: PAT_MRT4530_28400C.1
ggatatactatacacagccatgctcatatataattatactgtcacaaaaaaatattttgaatttatcgatgtatccatgtacatacacccccaaaatccaaattccaaccaccacacagaaaccaactcaacaaatcaatgacacaattgagctaatcaatgcaccagcatcactcatggcgatcggccaagcgacgatcggagatgcgggtttagcagaacaggtatccaacggcagccacggcgagcgacgcgacggcgaaggccggggcggcggttgctccggacgtcggcgccggcgccggcgcttcggcggcggaggctatcccgaccatggacgacgccatgacggcggcggccgccgccgcggcgaggagcctgagccg

SEQ ID NO: 23309 - DNA, 370 bp, Oryza sativa
  Clone ID: PAT_MRT4530_28401C.1
tcttgcgaagataaatattcagttgaatggaaatagagagttttccggcctaggtttctgtacattactcatgtggagataaaaggctgtatagttcagaaatcaggatagtagcagggcagagcttgagctgtggagtattcaaggatttaatgagatgagctcagatttggttccatactaggtttgtctgcatttggatttgtgatgtcgtctctttttcagcttgtcagtttgagttcatttgtgattttctttgttttctttttggtttgagttatgattagttgtttggtaggaactgttgatgtatagattcagactacatttagaaatgcatttgttgcaatgaagatgataacatcctttt

SEQ ID NO: 23310 - DNA, 297 bp, Oryza sativa
  Clone ID: PAT_MRT4530_28402C.1
atggcgcccgtgcaggagcaggacaagcagttggtggtcgacctcacctccacagcagcggaccagctcgccaggatgtgcagcgccggcgagccgctgtggtgcggctgcgtggcgcggatgatggtcgtggaggagcacgcgcggaagttcagatgtgaggagtgggaggagtggccaaatttcgccacgcccagccgctggcagcgctgccaaccacgccactgccttgctaggaggagtagcgaaaacctgcgtcggggaaagatttggtgcctgcgtccgggcgagatgtga

SEQ ID NO: 23311 - DNA, 432 bp, Oryza sativa
  Clone ID: PAT_MRT4530_28403C.1
atggcgagctcagccatggcgtggtggcggaccaagtcagcatggcaacggcggcgcacaccccaagtcgagggggccgctagcttcagggtgactaggcactgctataggcgcgagggcttaccacgggatggcgagacggcggagttcgacggcgcgcggcgtgctcccggctccttccaacaacagcaacagcaacttctctccacaccccgccacccacatcggccgagaagccctgtggcggcggcgcagcccccgctcaccagcaccatccccatcacgaggccaagctaccgccgcctgtaccgcctccagccgcacatcaccgccgtcctagcgccggcgtgccacgcggcaacctccaccggcttcgccgtctcaagggcaagcccggccaccgcctattttcccctctccaccaccgaataa

SEQ ID NO: 23312 - DNA, 1175 bp, Oryza sativa
  Clone ID: PAT_MRT4530_28404C.1
gagaaagtctcccgtctcttctccggccgggcttgcgccatctcgcggctgaaccggggaggggcgccgatctctatccgacgagcagaccaagggaggggaggggaggggaggggatcctgggttcacccaagtatttgaagacccaagcgtttggtgattggcaaagatgggttgggggatatcccggttgattggactgaaagcagctgtgttcctctctgtggcttatttcttccatagattggacatgacactgctttcttttcccctcatatatgcctctgtgattgcgatgcttgtttctattgcttcacatccatcaattgaccttcctttgctccttggcaaggggtcgaatggaagctttcctgtgtggtcatggatcatgttctcaccatttcttcttttcatccatctgtttgttctgttacgaagatttgtgaaaaatgagcccttgtacactgagattgctgatggagtgtatgttggagggtggccctcttcagttgagcgcctgccccctggtgaacctgcagtcatagactgtacgtgcgagctcccaagaagctctactatatccgagaattcatatttgtgtgttgccacctgggatacaagggctcctcaaccatcgcagattgagtctgccgtgagatgggcactgagaaagcgttcgcagaacaaagctgtatatgtccactgtgcctatggccatggaagaagcgtctgcgtgatgtgtgcacttcttgttgcattgggattagctgaggattggaaagctgctgagcaaatgattcgtgagaagcgaccttctattagcatgaattctcttcatcgtaaaagtttagaggaatgggcaaaacacttgctcactccctcaaaaagaagtggggaatcagatgtgagttatgcgattctttcggatcatacccgaaaaaggcattgatctcgcaagaaaactaacttgctcagtggctgtgataattgagatgaagtttaaatgctctggcattatctacaaaaaaaaaaatcaaaaaaaaaaaatttcattctctaagttaattgtttgggagtatgttggaaaacttctactactgtggcttacaacgccagctcttttaggcgctcaaaaaaaaaaaaaaaaaaaaaaaaaactcgagactagttctctc

SEQ ID NO: 23313 - DNA, 2748 bp, Oryza sativa
  Clone ID: PAT_MRT4530_28405C.1
atgccgccccccccgccaccgcccaagttggagccggcgtccaagcccgaatccactaaccctaactcctccatgccgccgcctccgcctccactcccggtggagggtgcgagcactagctcctctatgcctccgcctccgccgccacggcccgcggcgccgccgcagccggaggtggagggggcggacgcgtcggccgaagggggcactagcgctagcgattccgaggcggatgaggcggcggggaacttaggtaggggctccagggatattgagatggcggaggcggcggcgccgccgccatcacagcagcagcagccgaggccgcgtgccccgtacgccatacccgagtggagcgccgcaccgggccaccccttcttcctcgaggttctcaaggacggcaccatcgttgacaagcttgacgtgtccaggaaaggagcttacatgtttggtcgaattgatctttgcgattttgtattggagcatcccactatttctcgctttcatgctgttttgcagtttagaaatgatggggaggttttcctttatgatcttggaagcacacatgggtccttcatcaataaaactcaggtcaagaagaagatatatgtggaaattcatgttggagatgtaattcgatttgggcaatcatcacgtttgtacatattccaaggaccatctgagctgatgccccctgaaaaagatatgcagaagcttcgggatgctagagttcagcaagatatgcttgatcgtgaagcttcccttttacgtgcaaaaaatcaagcagctttagcagagggtatctcatggggtatgtctgaggatgcagtcgaagattctgcagaggatgaagctgatgagatcacatggcaaacctacaaaggtcaactcactgatagacaggagaaaacacgaagcaaaataataaagcgattggaaaagattaccaacatgaagaaagaaattgatgcaataagagctaaggacatttctcaaggtgggttaacccaaggtcaacaaacacagattgcacggaatgagcaaaggacatctcagcttatggaggagctggaaaatttagaagaaactttgaatgacagtatacgggaaagtcttggtgctcgcactggaaactcaaatcgtggtagtcataaagcaagtcttgaggaagaagatgacattcttagtgacgaagatgacttctatgatcggacgaagaagaaatcttctagtcataaatccagtgagcagcaagtggagactgctgatagtcttcttgataaaaaagataccataaccagcgatattgaaagtaaaaagaaattggttgaagaagagaagaataagttggcaaaaagtgagaatgcggatgttggggacgaccttgatgcttacatgagtggattatcatctcaattaggtatgttctttccatggtctgtaattgcatctggggaagtagtggtgaatgaaaataagatttggcataatgcacagttttatgcttgccacttttcttcactcactagtttgaactgttctgcagtacatgacaagattgcccaaatccagaaggagctttctgatcttcaaactgagctgggcagggtggtttacctactgaaaatagctgatcctatgggagaagcagctcgcaagagggatctcaagccacgagaaacaaaatctccagcatctaatgatagtctaagaccagagtccagaaagcaaaacaaagttgcacaaaacaaagcctcaacagaggagaagcttaaggaatcttgtgctgaaaaaacacaagtggataaaccagccgaggaagagaagggtatctccacaaaccaagaaaatggcagcaaacctgcattctccattccaaaacctcagtggcttggtgacaagaggaccgtggaatctgaagagaactgtataaaagaagaaagtgccaatgaagaggagactgataattttgtggactacaaagatcgaaaaactattctttcaggttccgccaatggaaaagaccttgaagaagctgctcctgggcttattttacggaagagaaagtctgatcaatcagcagccaatgaggtggaatcttcagttgaatccgaagcatctgctgctgatgctgtggccctcttgctgaagcacaaacgtggtttacaaacttctgaagatatggaggatgagaatgaaccacaagctagcaagagaaaaagtaaaaagtcgaaacaaaaacgcgtactgggtccagcaagaccagattttctggacgcaggtccagatcatgaaacatgggtgccacctgaaggtcaaactggtgatggccgcacttcattgaacgatcgtctgggctactgaagttttcacattcaagactcgactcgatgcgtcatgaagaagaattcagtagcgacgatcgcggtattactgcagctagtccttgagcatgcgtttcatataacttcaaatggaaactggcccctttttattagttgctcgccatttcctgagactgtagtagaggctgtgtaagattgcgaatttgtagaaaatgagagttgaaatgacaggtggtggatctgtatgggaatggtgtcacctgtccaggggtcacaaaggatgcaaatgtcattttcagttcgctacgagaatggggtgggattttgtaatgtacatcatcgtcccatagtataacggttgtttggtgccagtggaacagggtggccaattatgtagtaaaaa

SEQ ID NO: 23314 - DNA, 156 bp, Oryza sativa
  Clone ID: PAT_MRT4530_28406C.1
atggtggtggcggtgcaagagattgctacgcactggttcgagaaccacatatccggatgtccgttcgcaatcatgtcgggtgatcaagccgatgatgttgggcgcgacgactctgcatttgtcgagatcgttctcgacaatgcggtaagaaaatag

SEQ ID NO: 23315 - DNA, 255 bp, Oryza sativa
  Clone ID: PAT_MRT4530_28407C.1
atgcagaagcctgcatccaccggcggtgccatcaggaattctcgaggaaacagcctgcagccgatggtcgctgtcgccaagacgtcggtttgccgaaaagacggcatgcgagtgcgcgcgctgactcactgcggcagcaagtgcgcaaaaggattccgagacggtgatgatgacgagatgaaggaccttcacaaactgttcttcggcccttcaatgattgatgatgatgtcaactccgatggggagctgcagtaa

SEQ ID NO: 23316 - DNA, 384 bp, Oryza sativa
  Clone ID: PAT_MRT4530_28408C.1
ttgttttgcgagaggcatacctggatctcagggacccggtacaaggagaagcgcatgactaatatgggaaagacgacattgcaacggaagcgggaagggatgcaagagcaactatggcagactgggttggtagagaaccatctgaggattacattgctcaattggtgacagcatccatacatggactcgatatataaggagacgaagaagacactgatctaagggaggtggaagccaaaaatcctgtggtacaagaagatccggaggacaaacttgcttagacattgtatagcacattgcacggtaatggacaaggggacatagaggaacttgcgcacaatgcaaaagctgaactgtccagactatctaatgcacagcttgggg

SEQ ID NO: 23317 - DNA, 1899 bp, Oryza sativa
  Clone ID: PAT_MRT4530_28409C.1
atgtcgtaccccacgttccacgtccacccgccgttcccggtgtcggcgaggaagaaggaggatgacggcggcggcggcggcggcaagaaggaggcggcggccgccgcgatgaggcggctggcggagatggaccaccgcgcggcagccgacggcgggaaggtggtggcggccgtggccgtcgacggcgacaggggcagccagcacgcgctcaagtgggcggccgaccacgtcctctcgctctcccaccccttcttcctcctccacgtccgccgcaagcacgcctccctccactccgccgggggaaagcaattctccctattgcacgtgcaggatgatgttgcagcttcttctcctgatcaaatggatcatcacaccaaagatctgctgctcccattccagtgcttctgcagcagacgaggggaagatttggaggctgaaataaggaagttaaagcttgagctgaaacagaaaaatgacgatatgcacatgtggaacaagttacctcttgggatcggagacaggagtgaaaactcaaatgcaagtgttgaacatgaggatgaacatttacaagaattcacgacatgttcaacccattcctacagtgagagaccaaatgcagaaccgagttccgcagttcgtggcccaaagcataagctcttgaaactcgaaacttcctcttctgatcaatgcagagagagaaccatacaggaatttaaagaccatagttcccaggatacggtgcatccgatcttaagacgtttgccgcccaaattttactcgcctagaaatgattctaagcatggatgtgcttctgaaaaggcttacaaccttgaactgaagtgtaaatctttgccaaggccaattgagacgaaaagactactggagggtcttccaactagattccaatgcaaaatatacacaacagaagaggttgcaaatgccaccgatcatttctcaccggaactgaaggtaggggaaggaggttatggaccagtctataaagctacacttgacaatactcttgttgctgccaagattctccattctaacataactcaaggactgaaacagtttcaacaggaggttgagttgttgaacaacattcgccacccgaatatggtgcatctgttgggtgcttgccctgagtatggctgtctggtgtatgaatacatgccgaatggcagcctcgaggaccgtctcttctgccggtcaggcaccccaccgctgccatggcagctccgtttcaagatggcagtggagatagccactggcttgctctatctacacaagatgaaacctgaagcctttgtccaccgtgatctcaagcctggaaacatcctccttgacaaagatttcgttagcaagatcagcgatgtcggcctcgctcgcatcattccccggtcgatggatgagacggtcacgcagtaccggatgacagatgctgcagggaccttctgctacatcgatcctgagtaccagaagactggattggtcaccacgaaatccgatgtttatgcgctcggcatcatctatcttcagatgatcactgcaaaagatgcaatggggcttgcttacatggtctctgatgcactggaggaaggaacatttgaggggctcttggatcctaatgtcaccggctggcctgtgcaggaagctcagaagtttgctgagctttcactgaaatgctgtgaactccggcacagagaccgtcctgacttggaatccgtcgtgctccctgagctgatccgtcttcacacattcgttgcatcatctggagataattcttccatcgaccaaggccaccagcgttcagtcagcgacaaggagttggctctggaaaatgacttggccgagattctgaacgatgggctagtgaagggggcgtcatttgcagcataa

SEQ ID NO: 23318 - DNA, 603 bp, Oryza sativa
  Clone ID: PAT_MRT4530_2840C.1
ttcctccgcccggcgctcggtgccctccccccgtatccgcattcaggtgggaacccccaaccgcagaaaatgagctttacttccatggcctccaccttttgaagtaccggcaagtggcagcatagaatgattttttggggtggcaccgttggtactactgcagaatgccggagaagagattcattcttgacccatctgactactcttgagtcttgagcccacttcttgatgggatttcggactttacctccaagccgagccaaccagccgacgatcaatgcagatctactgaagttttgaccgcttgactgatgatttgaagctctcttttgcccgtccccagatgcttgccatttatttcttactcctaattcatttcagcctactatagcgaagagcgtatgtgctaccacgtagcaaacattttctgacaaacaagtatgtcatatcattatctgtagttctttggagcattatctgtagtttgtacaaatacgaaaggatgattcacccaccttgcggcagcttctctggccccaaaaaaaaaaaaaaaaaaaaaaaaaaaaaaaaaaaaactcgagactagttccctcgtgccgaatt

SEQ ID NO: 23319 - DNA, 2070 bp, Oryza sativa
  Clone ID: PAT_MRT4530_28410C.1
atggagctctcgtcgcttgctgctctgttgcactcacccctcctccttgccgtgctcctgctcgtcttctcatggctgatcgtctcgtcgaccaagaagaggcctcctccgccctgcggcgatggcggccggcggctgccgctgccaccgtcgccgccgggtgtcccgctactcgggcacctcccgcttcttggcaccttgccgcaccggaagctccggtcgatggccgaggcgcacggcccggtgatgctgctgcggctcggccgcgtgcccgccgtcgtggcgtcgtcggcggccgcggctgaggaggtgatgaggacccgggacctggcgttcgcgagccggcccagggtgcgcatgtcggagcggctcttctacggccgcgacatggcgttcgcgccctacggcgagttctggcgccaggcgcgccgcgtcaccgtgctccacctcctcagcccgcgccgcgtcctctccttccgcggcgtccgggagcaggaggtcgccgcgctgctggaccgcgtccggcgccgctgcggcggcggcggcgagaccgtgaacctgagcgacctgctcatgtcctacgcccacggcgtcatctcccgggcggcgttcggccacggcggcgcgcacgggttcgacggcgacgaggggggagagaagctgaggaagctgttcgccgacttcgaggggcttctcgggacgatgacggtgggggagttcgtgccatggctggcgtgggtggacaagctgacgggccttgacgccaaggtggcgcgcacgtcggcggcgatggacggcttgctggagcgtgtcatcgcggaccaccgcgagcggcggcgcagccgcggccaggcggtcggcgacggcgaggcggacgctgatcaccgggacttcgtggacgtgatgctggacgtgagcgaggcggaggagggcgccggcgccggcgccggaggagtgctgttcgacactgtcgccatcaaggccgttatcctggacatgatggccgccggcacagactccagcttcaccaccacggaatgggtcatggcggagctcatcaaccatccacgcgtgatgcgcaagctgcaggatgagattcgcgcggtcgtgggcacatcgagtgcatccgccgccgccgccgccaccggcggcggccaagtcaccgaggaccacctcggcgagctgcccttcctcagggccgtgatcaaggagatgctccggctgcacgcgccggggccgcttctcctcccccgcgagacggtggaggacacggagctgctgggctaccgcatcccggcgcgcacgcgggtgatcatcaacgtgtgggccatcggccgcgacgcggcggcgtggggtgattccgcggaggagttcgtgccggagcggtggctcgatggcggcggcggtggcggcgtggagtacgcgcagcagctggggaaggactccaggtttgtgccgttcggcgccgggaggagaggctgccccggcgccgggttcgccgcgctgagcgtcgagctggcgctcgccaacctgctgtaccacttcgactgggagttgccaccgccggcggccagcgggatcatggcgacgacgagattggacatggacgagctgttcggattgtccgtgcgtctcaaggcggatctgaatctagttgccaagccgtgggccgcatggcatgagggtgatgaagatattcctggcgacgtctgcagtgaggagcagatcaccgctgaaggcgtcggcggccacctggcgacgggaagggattcgtgcggcggggatcggtggcagatcggatcaccgcggaaggcgtcggtggcgacctggcgtcgggaggacttcgtgcggcggggatcggtggaccaggacggtgatcggcgacgacgtgaatcctggcagaggacgggtgatggggatcgtgtagggcgagccggcggcggggatcggtggcagatcggcgatgcagatgacggcgcggcggctgatagagaggggagcactgatggcggagctctttccggcgtcagcgcgtgcgggagcggaatcctggcggtggcgcagaaatga

SEQ ID NO: 23320 - DNA, 539 bp, Oryza sativa
  Clone ID: PAT_MRT4530_28411C.1
cccagtatctccagtatctgtatcaaggtccaattgttttgagcccatgggatcaggttaagagaaatgctgttcccattactcccactctgaacagagagcagctctccaccagtgaggaaaattcaaagaagaccgttgacatggaatcaacagaagtattcactaagaaaactaaactgactgaagaagaaaagaatcgcctaaattttctgaaaaaaatcagccagcgttaccagaaattcgccttgccccagtatcttaagactgtttatcagcatcagaaagctatgaagccatggattcaacctaagacaaaagttattccctatgtgaggtacctttaagattctggaattaactgcttttacctggttatggttggactggaaaatctatcttctacagtttcatatctaccactttactttatacaaccagcatttttggagtggggcatcaattaaacaaatcgcaaagtatttcctgaaatattttatactctcccttttaagtttatattgaaaataccggggttt

SEQ ID NO: 23321 - DNA, 635 bp, Oryza sativa
  Clone ID: PAT_MRT4530_28412C.1
actagtggatccccgggctgcaggacaagtctctcctcctcccatctccgcttcccttcttcttcttcttcgttgatccactcacccgccgcgcgcagaggaggccatggcagatcagctcaccgacgaccagatcgccgagttcaaggaggccttcagcctcttcgacaaggacggcgatggtaacaacaacaaccaccaccaccaccttgttctctctttctccatctctatctgttcgttggatcgatctctctcgtttgcacacgctggccgtctcgcgcctgtggcattgcctccaccgcgcgggtgcccttccttcctcgcgtcgtcgggtggcagatccgatccgggcacggatctggacggaaaccggtcgctgtcatcgtcctgtgtgtccagtggcgaattgtccgacatggacgcaacgcttatctgctgtgctgacttgaccatttcctgactgcgccacctccctcgacttcactatcgcaatcgtgtctcgctgcctgtttggttcgggaacacttactctacatcataataacttttcaacttatattaggccctgtttgattcagctagtttgcttagttactccctcatttttcttttccgtgcaaaaacttcggata

SEQ ID NO: 23322 - DNA, 2061 bp, Oryza sativa
  Clone ID: PAT_MRT4530_28413C.1
ctgcaggctagtctcgagtttttttttttttttttttttatacataagtaggttaactatataatatagtagtttcggtatttacaaaataatgtatattttatcgcatatcgtttaaactctggttgacattacaaccttgaagtacccatatatacaataaaaaaaccatcatgaaaaactgatctttcagaggtctggcggcgttctcgcgcggttggcgatcgtctatcgccctctagttgcgtcctacatcaatagacgcccacaatgacgaataccagctgacaacatcttgcttatacgtactaacgtagtacttgcagccaatcaatcatcagtatgccatcaccgattcaccggaataacctgcctaaagccaccatgccgtcttccctgatcaacagttcctccttgatagtcatatttcagtttaccccttgacccaacaatggcaacagcccaacaatgccacgtttcagtcatgaagttataatggctgggtctcacttaaatcatagtctcttcaatttgggtaatagactcaatcttgtcagtggtcttcaaatctacatcttcaatttcttcattctgcaactgaccacctagaacgtcatgtggatcatccgaggggcacttgtcagatggattcattgggttcatatggcagaagcactcaggccatgagtttgtatagaaagactctggatgaatgcgcttgtgtggaccgccaaagtgtgtgttgaacattacttgcctgactcgatcctcaaaaccggttacatggccttcctccctgtccatgaatattggagcaagggccttcctgtttggtgtaattgttgtctggaagccatagtagaggcggtggcccatgaggttgtttgcaaagttgcttggaccatcgtacgtgggcatgaagatatccgacaggagacagaccatataatctaccgctgatccagccaagcctcgagtattttcttccagcttttcaggtccaactgaactgtggttatctaggcgaggaaacattgctctaaatggactcatgaatcgatcaccaccaaatatctcaccagatgcaagataaatacgggttgaattgtcaaaaccaatggcacgaaggataaggcccacctcttctggagtcaaggggcacttccctatgattcttctatccttgtaaacaaggattttctttgcaaaatttttttcacggtattcgatcagaattttctgttcttctggggtaaatatatcaatgcatccagcaaaagcaagcatgtccatctcaaatcgaagatgaattgacatgaagtggccttcagaccgtagcttgttcactatctcattgctaattttcatgatatgtggcttaaatcgtagtgcgtggtaattcactcggcatctcaacctctggagctctggatcatcaatatcttctgctaagcggtgtgagaaaggagttaaatatatagccccatacttcttcatttcttccaaagccaatgttgtataccaacttagcggagcatctctaggtggcacaatcttatgagctttgagcttcttagtcttcccttttgacataatcccgggcaggcttgtaacaatatgaacatcatgttttaaagtcttcagaaaatggggaacatcatagatacctggaaaaccacttttatcccgccagaaagaatttgtatcaagctctggtagaactaatgtagcattcattatacgagctgcaacaacagcattacatatagcacttctttgttgattcaatccgccattgcaccgaacacgcaagtatccattagtctcagctggaggggtgcatgttaggacatagaatttgatctgtttaactctcaatgtatttctcatgtactttccattgcattgatgcaattttaaaggaagcatactgaacctttccactctatagaccagatgcacctgaaccctgtagccgccgtaggggcctcccatgaagcccgccgatgacgcgcagagccagacggttccggcgacgagcaccgccaccgcgacgcacat

SEQ ID NO: 23323 - DNA, 148 bp, Oryza sativa
  Clone ID: PAT_MRT4530_28414C.1
cccgggctgcaggggctttgaaactcttcagaggtatcgtaaccgatttgtatgttcaatgatgacgtgcaggtattttgattgcctgactagctattctgtgtcttttagcatggattattgccttcccaacttcatattattgttt

SEQ ID NO: 23324 - DNA, 485 bp, Oryza sativa
  Clone ID: PAT_MRT4530_28415C.1
ttgctgaagaagatgaagtggatcctgctgacgaggagttcttccaggagcaagttaatttggagcgtcacgggctagttccggtcgggactagttcggggcgtgacagccactggccaagaatgctccgcccccgcatcaccccagacgcggcggcgtgcggccatggcgcgatccatcggcgattcggccacgacgcgaggcgtggtggctacaggcaatccggcaacgatggcgtggtggttcatcggccgatcggcgtcatgacctgggcacaactggcgtcggaggagatcgtcctcctcgttcggcaccaaatccacctcgtcgttccctggtgcggcctttcgttcaacgcgatggtgtcggcgggcgtgcaaaacgaccaccggcggcgccggcaatcagcacgccaggcccaaagattgcagtccaaacatgggcagcgcgaggttctgaggagcagcgacgccgtgcgcggctag

SEQ ID NO: 23325 - DNA, 294 bp, Oryza sativa
  Clone ID: PAT_MRT4530_28416C.1
atggtgacggcggcgcggcgcggcgcggcgaggcagtggcggcgcgacgtcagcgatgacggcgcgacggcggacgggcgggcgacgacgggcagcctgtggccgtccccgcctggatccggcggccagccgctctcccccgccacggatccggcgcgggaggccggcaggaggcggcgcgcctccgccgccgacgatgacgaggcgggagcggcagcgacgacccgatctatgacgggccaaatctccgcacgcaaaaaagcgattgatcgcctgggaaaatgctcggtgtaa

SEQ ID NO: 23326 - DNA, 141 bp, Oryza sativa
  Clone ID: PAT_MRT4530_28417C.1
atggagtccgtgttcatcagcaccgatgctactggcgcagaaatcgcacttgcattctcggtctccgcattcgtaagaggtgccgggatcaagctcatctgcaacaggaaccgcgcatattctgtatttattcagtactga

SEQ ID NO: 23327 - DNA, 726 bp, Oryza sativa
  unsure (1)..(726): unsure at all n locations
  Clone ID: PAT_MRT4530_28418C.1
cagccccttctttcttccatcgacagttcactaaaacttgcccatgatgcgtgcgcaaacattggctccataatcaanccntgccatgaggaaataagcgagttgaagggaggacattnccacagggttgttgagattactgaaaatnctgggaaatgcctagaggaagaatatctggtggatgaaccatcatgttcgactccgagaaggcggcaaatcgacctgccaagcatggaatccattgagcagttgcgaaccccggattacgatgagcttctcaaatcattccgagagtcgagggcgagtttgaagcaggcaaatggagacatgaagcatttcttagaggtgcaagaagctacaccaccatcaatcacagacccgagagctcctcttatagcaagaaattagatttatagagtgaatgtacaaaaggaacaaattgtttagctttgatttttggggtattgatttactgttgatagtgccattcgatttattgctgctgttggttgggatgggaggtctgaagctgatctgtttgtagagatcagtagaaaggcatgtgtatttactactgcataattgaggataatgttagctctagtgtaatatatatccacacaggtaacaatgacaagtgctagtacagatttgactcagataatcttccatgctttgctgcaaatttgaacaattattcccagcaaaaggaaaggaattgagtcc

SEQ ID NO: 23328 - DNA, 309 bp, Oryza sativa
  Clone ID: PAT_MRT4530_28419C.1
aaaaatataagaccttaatttttaacataccaaccaaaaaattgtaacattacaattcaaaacaacaaccaaagagggggggcacaacaaccccccaaccccagcaagggccgccccacccccggaaggcacggcgaggggaagccaaacaccggctaggcctagggtctggacaaagcagacaccaccccattgaagcgccagaaggtgacccccaaacccttggacaggacaaatggccagccctggaaaaagaattgttaccaacccagactgctagcaacaaaactcggggccgacccgacggga

SEQ ID NO: 23329 - DNA, 414 bp, Oryza sativa
  Clone ID: PAT_MRT4530_2841C.1
atgtgaatctactcgaggaacatcgcgaatgagttgccgttcgagcagccagctaccaacaggcccttcgccattaccacgagaagcgcatccgtgcacgcacgctttcgatcggcgactacgtcctccgacgggttcaaagccaagcagggcgaaaggcgaaacaagctctcacccaaatgggaaggaccgtacacgatcacacaagttctgcggccaggcgcattcaaaattgcagacggcgatggtcgcaacattgaaacctatcctcatgtccctttacgccgtcttgacaaggcctccgaggaacctaagggaaagaccatgatcagtgcttgttcaaccgaggcaggtcaaaggtccaagagccttatcttccgagaagaattctccgatgacaaggctgggggctag

SEQ ID NO: 23330 - DNA, 1938 bp, Oryza sativa
  Clone ID: PAT_MRT4530_28420C.1
atggagccgtcgcggcggctgctgctgtccgactacgacggcgcgatcgtgtcgccgctgccgtcgccgccgccgtcgtcggccacgccgttcaggccgggcgtcgcggtggtcgtgggcatcctgacgagcgtgttctccatcacgttcctgctgctgctgtacgcgaagcactgcaagcggaacgccgcggagtcgtcgggcccgtacgggagcggcggcgcgttcgggtcgtccggtgggggcggggcgggcgagcggcggaactccggcgtcgaccgcgccgtggtggagtcgctgccggtgttccggttcggcgcgctccgtgggcagaaggctgggctcgagtgcgcggtgtgcctcggccggttcgagccgacggaggcgctccggctgctgccgaaatgccgccatgggttccacgtcgagtgcgtggatacgtggctggacgcgcactcgacgtgcccgctgtgccgctcccgcgtcgaccccgaggacgtcctgctcctcccggagccgccaaagccgtccaccacggggccccctgatccgccggagacgaaggtggcggcggcggcggcggctgctacggccaaggacaaggaggcgagcttagctcctgctgctcctgctccgtctccagcgtttagaggcttcttctccggccggcactcgacggggtcggtacgggcgccagggagggttggccctgcctcacgccggtcggccgatctcgtcggaggcgacggcggtgcggtggtgggatgcttcgaggccgccaaggttcgcaaggacagggtgctgttgatggagccggcggccgcggtggcggagcctgacccggaagcctacgaccggcggttcgggcaccgcatcctggtgagcaccgccggtggctgcgaggacgagacggcaccggcggcgaagcagcggtggagcgaggtgcgaccatccgatctgatgttcgtccggtcggagatgctggtgacggaggccggccgagttcagctagagaccatcacatcacgtgcactgttcctttcaacgatcggctgctactactacccgatggtgaacatgcacgtctcccgtcgtcaatctggcgatgtgatagttgtaagggtttctctgatagagacttggaggaccaccgacgacgatgttctcagccgatcaagcttgctaggaggaccggatgagcatgatgtcagggagcacctgctggacgtggacggcgtcggggaagaaggggcggcggcggcggcggggccgaagatacgggtgcgggggctgacgcggcggtcggaggcgagaggcgaggagatcctgcggggcgtcgacctggacgtgccgcgcggggtggtcgtcggcgtcatcggccccagcggcagcggcaagtccacgctgctccgcgcgctcaaccgcctctgggagcccgcgccgggcgccgtgctcctcgacggcgtcgacatctgcggcatcgacgtcctcgcgctccgccggaaggtcggcatgctcttccagctccccgccatgttcgacgataaaaactattttgaaaagtatttttattgtgggagaaactacaactacccgaagctccctaaggttgtgtttgaaggaaccgtggctgacaacgtgcgatacgggccacagctgcagggcaagaagctgacggacgccgaggtgcttctgctggatgagccgacgagcgcgttggatcccatctcgacgcagaacatcgaggaggcgatcgtgcggctgaagaagacgagggggctcaccacggtgatggtgtcgcacagcgtgaagcagatccagcggatcgccgacctggtctgcctcctcgtcgccggcgaggtcgtcgaggtgctcccgccgtcggagctgtccgaggccaagcaccccatggcacggcgcttcctcgagctcagctga

SEQ ID NO: 23331 - DNA, 674 bp, Oryza sativa
  Clone ID: PAT_MRT4530_28421C.1
gcgcattccacaacagtggaagggcagtacttagaggtatcatccatgtttaaaccgaacagaagatcaagttttaaatgagtgacatagtgcacaacagcgatcatattttaacgggcaatgcatcaacgtgaaatgaccggtggaccaaaattaacgagtactataatgagctacatgtctcagatgcagatctggaaagcaccacttgaacgaggctcatttcttcttggcggcagccttggccaccttgggaccggttgagtacttcttttccgcggtcttgatgacaccaacagccaccgtttgccttatgttccgcacggcataactaccatgaggtgggtactcatagaaggtctccacatccatgagctgggtgtgaatcatctgaaccataccagcattatcggacttgaggaacttgggctccttctccagctccttaccagatcgtgagggaatcttgatcgccagctcattacacttgacggcaatgggggaggtgtggacattccaacactgaggcgtagccgatgccgatctggccagggtgggttatgatgatcacctgggaggtgaagctgacatcctccttgacggggtcatccttggagttggaggccacggacccacgcttcatatccttcactgcagcgttcttgacgttgaac

SEQ ID NO: 23332 - DNA, 587 bp, Oryza sativa
  unsure (1)..(587): unsure at all n locations
  Clone ID: PAT_MRT4530_28422C.1
tcggctttcatatatgcccctggattccgcttcggtttccacgcgccaagcacaagcgggcaaagggaattgaagtagcaagcaagcacgtgaattgaagtaagaagacnacgggatgtgctgctgcgtggcgactgccggccgatcgggtggctgctcggcctccccttcgcgctcctcgccgtcgtcgtctccttcattggcgccatcatctggatcgtcgggctgccgatcttcgtgcatctgcccgtgctgcctgtgctgtgaccgtgctgtctggaggtggcggtggagctcgtcaaggcgccgctccatgtgcatgacctggttcacctgccaagataccctggctgatgctgatctgcagatcatcatcagatcttgctgctgccacgtggtgttacactactatctccgtttggttgatttagtgtcgtgaccgaattccagttggtgggagaactgtttttgtgcatgattccttatggatagatcgattatctctactcgttggttggttctgaatttgtggagcagcattgtccagcgattcaattgcgtgcccatgcccaaaaaaaaaaaaaaaa

SEQ ID NO: 23333 - DNA, 333 bp, Oryza sativa
  Clone ID: PAT_MRT4530_28423C.1
atagagaggaacatcggagttcatcatttattcaccacacatatgcttccaaacaaaaggaaaacacttatttttttagtaaccacaccacattcatgcacaggttggtacagtagcctagcttgtagccagattttgccagccagtagcagacaccaccttcgccgttggggatgtccacctttcaaaacgccgggaggctcgccgccgcgccctccaagtgcccttttcgggagccgcggaacaccttggacatggggggcccgacattgggggcccccagctccctgtagaagccccccaacatgtgggtgatcgcctcgcacctgcacc

SEQ ID NO: 23334 - DNA, 510 bp, Oryza sativa
  Clone ID: PAT_MRT4530_28424C.1
atttgaaccgaaaggcctgctcgattgtaccaaattggttccatattccacttgccaagggacccttatgggtataatccaagacccctagaggaaaggggaccgaccactcattcacaccaccccaatcaacatacacgaacaatagaagccacaacatcaaaccaacatacccaagacaagccgcgggatatcgccttaggaataagcacggctagtcccttacggtgtctctggatactgtcaggagagacgaaagtgctatctctgacctcacggggcatgacttcgagagggaagactaccctgttgtcgattacgagtcagacctacagcccgccatgtcgacaccagttagataggctcccccaaatattgaccggtctcacgtatgtcctagtaccgacgatccccatattatgcaaataccggaatcgcgacttcaaacgtcgactgaaatcatatcaggtcgtgtggcctcatgcattttatattacaaaatttcaacaa

SEQ ID NO: 23335 - DNA, 1249 bp, Oryza sativa
  Clone ID: PAT_MRT4530_28425C.1
ccgggctgcaggaattcggcacgagtgcctcgtgccttgctaggacagggtcgtacatgcacactaccctcgcctcctacgcccaggatctcgccatgcctgccgccgcactcgacctcctccctgacaaggcgcaccagccgtccatggcgccgtcgctccacgcctgggactcccccaatggcgcccccactcccatgcccaagaggctggaagggaaggtggccattgtcaccggcggggcgagggggatcggggaggcgatcgtgaggctgttcgtgaagcacggggccaaggtggtgatcgcggacatcgacgacgcggcgggcgaggcgctggcggcggcgctggggccgcacgtcgggttcgtgcggtgcgacgtgtcggtggaggaggacgtggagcgcgccgtcgagcgcgccgtggcgcggtacgggcggttggacgtgctgtgcaacaacgccggggtgctgggccgccagacgcgcgccgccaagagcatcctgtcgttcgacgccggggagttcgaccgcgtgctccgcgtcaacgcgctgggcgccgcgctcggcatgaagcacgcggcgctcgccatgacccagcgccgcgccggcagcatcatctccgtcgccagcgtcgccggcgtgctcggcggcctcggcccgcacgcctacaccgcctccaagcacgccatcgtggggctcaccaagaacgccgcctgcgagctcggcgcccacggcatccgcgtcaactgcatctcccccttcggcgtcgccaccccgatgctcatcaacgcctggcgccagggccacgacgcctccaccgccgacgacgccgacgccgacatcgacctcgacatcgccgtgcccagcgaccaggaggtggagaagatggaggaggtggtcaggggcctcgccacgctcaagggcgcgacgctgagacccagggacatcgccgaggcggcgctcttcctcgccagcgacgactccagatacatttccggccacaacctcgtcgtcgacggcggcgtcaccacctccagaaacctaattggcctttgactcttcttctccctctagatgaatgcgatagtttagaacacaactaaaaaggatttgttaatgtgacgcaacgcaagtgtactcagcttcatcccattttgttaatctcttgattcaatgtgttaattggacttgtgcaactgagcattggccccctttcgtgttgcattaacatcttgcctggtcatctc

SEQ ID NO: 23336 - DNA, 318 bp, Oryza sativa
  Clone ID: PAT_MRT4530_28426C.1
atgaccatatatgagtccatgattaggagtcagcaagtacacaggacaatgagaggcctagcgggccgcagtatgattgggccgggccaagatgctttcttgagagcaactgcgtacagtgctggaccaggtggcccacaaactagagctcttcagaattcagagatttcttggatgaggtttccttgccttcttgctgctgcaatggcgacgatcagtgcaatttccaggtggttgacaccaacgcatgcaaatgcgatggaccctggttgcgcgccaaaaggctactcctcctacgcgccaggattggagctgatt

SEQ ID NO: 23337 - DNA, 144 bp, Oryza sativa
  Clone ID: PAT_MRT4530_28427C.1
atgggtaagttgaaccgatggggacgtcgggtccttgaagtgcctatatgcctatgtgactacatgggcatctacgacggcgcgcagcacgtgagcgaagaggaagacgaaccttcgcggacgaacagggagcagtcgcgctaa

SEQ ID NO: 23338 - DNA, 450 bp, Oryza sativa
  Clone ID: PAT_MRT4530_28428C.1
atgtcgaggatctccaagtttctgcaggaaactagagatcggggtatcttcccttcaatcgaattgtcacttaagtccaatgcctcaagtgcacaaccttccttgataatatcaggggtgcagatcaacggtggaacattcccagaaagtttgtttttggacgccttgaaagtcacagtttcaccaaggtatgggcccttcaatgctgttgaaactgagatcgaagtattccacataaagaggcagaaaaggatcagatccgaggctcgtaaagttattgtgagatatgttcaggacgataaactgcaagcctttccatgttttccatgcccactgaggaaagttaggtttttcagttttgagaatgaggtgagatccaccgtgccagcaaaattgttcgaatggagcaggagagtttgtagccgcgtcaaatttaagatctgtggatga

SEQ ID NO: 23339 - DNA, 2060 bp, Oryza sativa
  Clone ID: PAT_MRT4530_28429C.1
ctacactacactttttttttttttatttttctggggagcaaaacaagcggcgccactttattcgcaggagtataactgtgtaagaccagttaaagtacatgcaatgttggtatagcatccttcacaaacgagaggctgcacaattacaatcacgccgaagcaattgtttgcctgcctcccctacactacaccccaaaatccagcacccagctgagccgcttcatccttcctaatctagtaagatccaattttattgtgtatatcttgttgtacttttggttgtgctttttgggggcactacttggtttgaagtttctctctcgtcggcttggaacccggacacgatgtgtatcacaacacttctcatgctgacttccaataaccaaacatgaaatgtaactcccatggcaaccgcgccatatacaccaggtacatgtttactggtccacctcgtctggtaagatgacattgtttaggtatacaacgacacatctcatctctccaaagtcaaggtccctaagagaaactgtattattggtgacctcaaacagaggaaggaaaatgttgtccagaagagtttggaatgatgtctcaatacccatttccttgtacacattatataagcgtgggatatctaatgaaactaatttggtgttgtagatgttgctaaatttttctacttggtcaaaccgtgcgcggaggttgtgcgcttcttcgtgtgtgcataaccaccgtatgatcactttctcctcaatccacccacccatgtcccatccagccaatccccattccccaattatatgggcctgaaccagccagacaacattttcactggacaattcattgttcactatccagcttgcaaggttgtcccattcactttgcttcctcccatagattgaaatcctatattcagccatctggtatttacttgctgtaaggtcggagaaaacttgctttgttagctcggcaagaaaacgaccttggataagattgtcctgtttgaggaaaatctctctgagcctactttggccacacggattgtacttaaggttgaatttgtcaaaacgatgaaatgtacttttgtccgcatggacatctagtaaatcaacattcaagtcatacccagttaagtccaagctctcaaaaacctccttcagagtcatataagtgccgtctctgaaaatgacaacctcatcaggttctttccttagtttggattttataaatctcagcaagtgtttttgattcatgcacgctgagtggtgtacatgagtatcaaccttcctgacattgtaaaaatcacgatgtggtgcagtcttctgggcaagaaactccctatccgcgtttaacatcaaatgaaatttgaatttctctgattttggttcaggcacataggtgaacggattggggtcaggttttggagtacagggatcatttatgacctccttctcccatggagcaacctcttctctaaaaagataacagtctcttaactcaaggcacttctgaaggagcttgtaaacctcaatctcatcaggagacggaatctcatgtggagcagttaacagcttaataaatgattcttgctcaggttcttttcgaagaatgtctgcagcaactggatcaggttgaacaccatgaagatcattggatatactatgagaccgaatcaaacttgctgcagctaatggcgctgcagccccattttccagtactttgtttcctttctgttctccttcatttatctcctgccggttactaggttttgagtaatataaaatctgcaggctaacaaaatcattcggttgtttagcatcatcctcatctgatccttctacactctcaaaagcacttgcactggcaacaggggacttgggtgaatttggtttgattattccaacccttctgtttgaacttgaacggacaagctgtttattgcctgcaataacagcctcgtgcacgaaatccttccctctttcgtcgggccccacgtgcagcctggggaggccgaggggaaccgggaggcacgcctcggcggcgtcggcgagctccttcat

SEQ ID NO: 23340 - DNA, 1407 bp, Oryza sativa
  Clone ID: PAT_MRT4530_2842C.1
atggagggcggcggcggaggcggtacggacatgaacgccgtgccggatggcgtcgtgcagcacgtcctgtcgatgctcagcaacgtccgcgacgtggcggcgtgcgcctgcgtgtgccgccgctggcgcgagtgcgtgccgtacctgccggcgctcttcttcccgaggaacgccttcgacacggccgcggcggcggggggcgccgcggacgacgccatcgggcggatggtgaggtccgtcgagcggctccgggagctggtcatctactgccccttctccatggcccgcctgcccgagtggctggccctgcggagcacctcgctcagggtgctcgagctgcggatggacgccgccgccgccgataaggcggaggacggcgggtacctggactgcattggcctggccaggggcctggaggagctcaggctctggggggtctcgctcacggccgcgccggcgtggggccggctggacaagctccgcgtgctggagatcgtcggcgccccgctagaggacagcgccgtgaaggacgccatctccgcgtgccccaacctcaccgacctgtcgctgcttggatgcgactgctcgggcgcggtgtccatcgaactcgcgctgctcgagcgatgccggcttgacttcctcggagccggcaactgctccctctcgctcgccgctccccgcgtcgagtcactcgaggtccagggcttcacctggattactctgcgcggtggtcacagcctccgccgcctctcaatcgccaaaagcacagggagggtgtacaaggtggacaccgggaagctcccagatctggagcacctctctctacgcggtgtccagtggagctgggctgcagtaagctctgtgctgcagtgtgcgagggatgtgaagcacctagtgatgaaaattgagttcagtggcgactttgacgcgctccagccattcccggaagtcgatttggtcgacttcttcaacagccacccgaatctccgcaagtttgatattcatggtgccatgtttgctgctctgtgccagaaaaacagcttgaagaatttagatgcaaggttctgcatcccttgcttggaagaggttttgatcacagtgcgctcaccactaaatgctgagcagaagctgaacaccctcgagtcgcttgtgaagtatagcgtgaggctgcgctctatggtcatcagaatctcgcagatgaagaattgccatgatgccgctgatgatttctttgaggagatatttaaattgaagcaacatttgaggttaatatgccattgggatttagtatgttctggtcagaatggcttaaggctgtactcaatctggtatggtattatggtctatctactgcctcttgatgtcctaagatacctgataaaaacttggaacatatgctgcgcgtag

SEQ ID NO: 23341 - DNA, 3114 bp, Oryza sativa
  Clone ID: PAT_MRT4530_28430C.1
tcagtgtcgttttctcatgtggcttccccatacaatcaagatagtcattgcaaaagaaatgccaaatcccaatgcagtgaagaggagaagtacagcatctatggatttctctgaagtgtatggtatagcgcttggctcttcagggttgtcacattgtctagataacggtagtccacacaaacctgtgtttcccaaaaaagagctattggaaaatgtggaaaactgatatgagtctggtattcttccaaccaacgtgttgttcgacaagttcaacgtcgaaagaaaattcagtgatgctagttccttggggatctctccagaaagctcattgaaagagaggtccaatgactcaagttgatctaacctgcaaaactgtgatggaattggccctgtaagggcattgtgtgacaggttaagcccacgaagcagaacaagttcaccaatggtatctgggatggcaccatggaatgcgttaccggagacatcgattagcacaaggcttctcaagatcttggaaattgtcctgtcattccctttgtatgtaactgtagcggtaaactggtatgtctgcccatggtaatattgattttccatgactaacgtgtcattatcagacctggccatcatggacttgagcatcttaaaccatccttccatcagcattccatttaagttatttgatgccatatcagcaattctgagtgctggaaattcacagctgatttgacgtcctgtgtatgaagggtccattacttgaccagtcaacttattagatttgaggacaaggacctgaagtttaggaagttgactaagccaacatgggaaagagtcactgatctgattgcttccaatgtcgaggatctccaagtttctgcaggaaactagagatcggggtatcttcccttcaatcgaattgtcacttaagtccaatgcctcaagtgcacaaccttccttgataatatcaggtaattttccaacaaatttatttgctttcagacttaatacttgtagttcgctgaaactctccaataaacaagatgggattgagccactcaagttattataagatagatcgatgagttgcagtttcctagcaggggtgcagatcaacggtggaacattcccagaaagtttgtttttggacgccttgaaagtcacagtttcaccaaggtaagtcgagtaacgaagaggcatggatgagaactggttgcttgagtaatctaacgtgctactaccttcttgtggtataggtatgggcccttcaatgctgttgaaactgagatcgaagtattccacataaagaggcagaaaaggatcagatccgaggctcgtaaagttattgtgagatatgttcaggacgataaactgcaagcctttccatgttttccatgcccactgaggtatagctccctggatttggttattggaaaggtcaaggctagtgatgtcaggaaggtctctcaagatatttgggaaggttgtcatgctgcaagatgctaaacttagtaattgtagtttggggaacaataccagtgatgaactattttttccttctaccacaagtagtttattgtttgagagattcaggaaagttaggtttttcagttttgagaatgaggtgagatccaccgtgccagcaaaattgttcgaatggagcaggagagtttgtagccgcgtcaaatttaagatctgtggatgaaccgtccctgaaaagttgcagttgtacaatgctaatgtggtcaattcccttaagtttcctattgaagaaggcactggtccagacaatccacagttagagatccggagaacggtgagagaagttagatttgagatccacgacggaatggttcctactagctgtaatccagacagttgtagcatatccaagtatttgagactgcctaacgaagagggcagtgatccagagaagccacttgcaccaaggtctaacttcttaacagatatgagattgatgatggaaccaggaatcgtacctgtgaagtttgtgttattgaggaacagattctccaagctagtgtcctgtgagaaatttggcagattaccagatatgccaggattcttggagaggttgatcgttctcaacttcttgtgctggaagatgatgggaggaaacgatccttgaaacttgtttttggatagctgaagaacagtgagattggagaagccagccaagaactctggcactgaacctgacaagtgattatagtgaagctcgatcatagtgagtgcttgcaaggcagagaatgatgcacagatgggacctgacagtgagcaataaggtaaacttagaacctgaagctttggtgtatatttggctatgttgtcacaccatcgttctccattgccggacagatccaccattcccatatggagctcctccaggttgctgtggttttcaatcaaggtctccatgtttggcgctgagagctgccaaactgagtctgagtcgaatgtcacctgctcgtcatcgttgtattcggccctgtcgaaactggtggagaggtcgaggtagaccaggttcgtaaggcggccgatgctacctggcacctcgcccgctatgttggtgtcggagagatcaagataaaccagttcggtgagctgctcgaatccggtgatcaccgggagctgggacatgctgaagtcgttaccggagaggttaaggtgcttgagtgaggttaacctgaacaatgcagggtcgacgctgccggcttgcaattggtggccgcccaggtcgagtgaggtgacacggccatctgcgccaccgcagccgacgccatcccagcggcagcagtctgtgccggcgacccatgactggaaggcagtggagtagtcgccggcggtcgcgttgaaggagtgcttcagccggagcagcgctgaggcttgatccggatgacaccgaaccggtggtactacggtgcgtgccgtattggtggtggcctggacttggaggagaatgtacatcgcggttagcagcaatgacggaagatggtgagcaactctcttggtggacgatgacatgttgatgattcaagattggctgtgtttgtctgccttgaattgtgtggataaatacaggagtactactatttcaat

SEQ ID NO: 23342 - DNA, 282 bp, Oryza sativa
  unsure (1)..(282): unsure at all n locations
  Clone ID: PAT_MRT4530_28431C.1
tttttgcntgccggcagctcacctttgtgggcgaggggggggggcgggtactacagcgctcaaccacgatggttggaggcatctacagtggagctcggcgccaccgatgttgggcaccccatggccgaggtgttccccggctgccggagaggggacttgttacgcgcggcggttaacctaccgggggggggggggggggcatttccaatgntacangttttgtttgttactgggtaggttatncttatacctctataactggtcacttgtctacttaaagct

SEQ ID NO: 23343 - DNA, 1354 bp, Oryza sativa
  Clone ID: PAT_MRT4530_28432C.1
ccggccggggtggccgcattcgaaggaagaagagattttttcttttgggccaagtgggggagctttacctacaaaaaccctagccgcctccgcctctgtaaaaccctcaggtcggcctccctcctctcctcgtccctcctccccgccgccgccgcagcagatttaatcctcaatggcggccttcaacaagctcggtagcttcctcaggcacagtggcttgacaagcagtgcctcggccggctcttcccctgccatgttcaatgctgctcgtctgatgtccaccaagcttttcgttggtggtctttcttggaatactaatgacgattcgctgaaagaggcattcaccagcttcggggatgtgactgaagctcgggtgatcaatgacagagaatctggaaggtcaagagggtttggctttgttagctttgccaatggcgatgatgccaagagtgccatggatgccatggacggtaaggaacttgagggacggagtatccgcgtgaacttcgcgaatgagagacctccagggaaccgaggtggcggcgggtatggtggtggtggcggtggttatggtaaccaaggaggctatggtgatggcaaccgaggctatggagggcagtactaaagtgggcactgacttgcttaaataatgagcttaggacctgatgtggcttatgtgaagccttattattgtttacttttgtaccgtttagtatccgtcgtcgttgaaattctaggtgaagattaaatcttcatattgcactttatatgcttggcgtgaaggcctaggatgcgaatggtgcttttttgtgagtgagaactgagaacacatgcatgtcttcatatctattgcaatgtgtagagggtcattactcgagtgtgtcagcaagtcttattatttcatatttgatctgcatcgagcattcgttcacaagacaaatcgcctgagcagcgtccgtgaacatttgatcaacgtcatgtgtattctctgacccgcttcctgtccgtggcccgctcctccccgctgctccccgcccagtccctccgccacgccgcccgggcgccaccgcgtcacccaccaccccgtcctccgctcatcccgccccctcccgtccccccatgcactccccacatacaccactcacaccaagcagaacctctaattaacttatacaagtatccgcgcactcaacagaatatatcgttcctagaacttactcatcaaacatatacaccaagttatataatatcggaagactctcaatctcaactgagtcattgaactctacttagttactcttgtctgctatgaccccacagcctacgcttcatcaacccccaacctacacaccaa

SEQ ID NO: 23344 - DNA, 129 bp, Oryza sativa
  unsure (1)..(129): unsure at all n locations
  Clone ID: PAT_MRT4530_28433C.1
ctaactttccaagacaatcaaacaagccactaatnagaacataactatcacaagacaaacactatatcacccacccagaggcagccaccacccagcagggagcacaatactaataatacaataaagccc

SEQ ID NO: 23345 - DNA, 614 bp, Oryza sativa
  Clone ID: PAT_MRT4530_28434C.1
aggaatcggcaccggccccgggccaggtctctcaggcctacaagcccacgattaagcccccatcccgtaatcccccacgctccatcgatcgtcgccgcagccgattccttccaaatctcttcacccgattgaggatacatctaatctgagctctctagtctgcagatatggcaagcaaaaggattcagaaggaactcatggatttgcggaaggatccaccaacatcatgcagtgctgggcctgcaggagaggatttattccattggcaggccacaatcatgggccctagcgacagcccctacgctggtggggtgttctttgttaacatccatttcccccctgactacccttttaagcctccaaaagtgaacttccaaacaaaggtgtatcacccaaacatcaactccaatggaagcatttgccttgacatcctcaaggagcagtggagcccagcattgaccatatcaaaggtcctcctatccatcagctctcttctcactgaccccaacccagatgatccccttgtcccagagatcgcccacgtctacaagagccagaggccacgttatgaggagacggcgagggcctggacccagaaatacgcaatgggttag

SEQ ID NO: 23346 - DNA, 212 bp, Oryza sativa
  Clone ID: PAT_MRT4530_28435C.1
aaaggaaaaaaaaaggctttttcatcatttggcgaaaaactggccagtccataacagcaaaacaatggctggcaatttatttatttagttattttttatcccaaagccgacctaaaaggattttgccccattaaaaacctcttggaaccttttgttttggattggagggaatgccccaaacccatctcctttattaagctgaaccctttaag

SEQ ID NO: 23347 - DNA, 331 bp, Oryza sativa
  unsure (1)..(331): unsure at all n locations
  Clone ID: PAT_MRT4530_28436C.1
gcggtgggaggactgcggatggacggtatggccactggagagctccaccncgttggacatgccaagtccggtggctgtcggtttcaggctgttggacggtcggctgacggccggtcattggctgccaagtccaggacggctgtggtaggcaggctagcggtggcggcggctncggcggtggttgcggcgcgatgctcaacgcgagcacctgaccggcgcaggcagttgcnccggcgatgtcccggcgcgccattctggaccagctggtgaagtgtgtcatcaaatcccaattctctgcaaataaaattccgtttgaaaaaaaaaaaaaaaa

SEQ ID NO: 23348 - DNA, 312 bp, Oryza sativa
  unsure (1)..(312): unsure at all n locations
  Clone ID: PAT_MRT4530_28437C.1
gcgcacggcacttcgccgctccgctgcacccccacgatggcctcctccctctccgcgcgccgnctcctctcccgctccgtcgccgtcgngtcccgtngactcgtcccctgcgcctcgtccgcgaccncgcgcgntgnccccgctgctctgcgccgcttcttctctgcggaagctcgacgccgtcaccgacgccgctgcgcaccactcccgcgcgctctggagccaccgcgagcgccaagcgaggcgctcctctcttcgctcgcttcgcgngcgagagccatcgtcgcgcgtgggctcgcgtgggtcgcggcg

SEQ ID NO: 23349 - DNA, 1078 bp, Oryza sativa
  Clone ID: PAT_MRT4530_28438C.1
ctgccccacgcgtccgaagaggccaagcaaagcaaatcagccaaccacttgagcttctccctccactgagctccagatccactcgccctcggcaatggcgcatccgcatcggctcgtcgcggtgctcgcgctgatcctcctcgcctcgccggcggcaatgcgcgcggcggaggcggcgtgcgccggcgagaagttcccggcggggagggcgtacgcggcgtgcgaggacctgccgagcctcggcgcggcgctgcactacacgtacgacgcgtccaagtcgtccctgtcggtggcgttcgtggcggcgccggcgggcgccggcgggtgggtggcgtgggggctgaaccccaccggcgaggggatggccgggacgcaggcgctcgtggcgctcaagggcggctcgtcctcgtcggcgcccgccgtgaagacatacaacatcaccggctacgtcgcgctcggcggcgcctcgacgcccatcgcgttcccggccaccgacctcgccgccgacgagggcagcggcggcaagatccgcctctacggcaagctgcagctccacaaggggatgaagtccgtgaaccaggtgtggcaggtcggctcctccgtcaccggcggcgcgcccgacaagcacgcgttcggcccggccaacctcgcctccaaggccaagctcgtcctcgccggcagcaaggccgccacggcgacctccccggcgctcgccgtggcggcgttggtgggtttcttggcgattgtatgataaagattattgacagctacgttcctacgtcctagtaccatgattagtggtgttcattgatgtttgcatgatgaatcatttcttgaacaattatttccctactgttcttgtttcctttcctcttttttttttcattttctcttgctttttttttgttataattagtttttctttgatttttccatttgcaataaaaaaatggttggtgcacagcacttgttgttattcggcactagattagtacagtgattttactattgttgtacatgccattgatctggtggtaatttggggttatttaatttcggatcaaaaaaaaaaaaaaaa

SEQ ID NO: 23350 - DNA, 1188 bp, Oryza sativa
  Clone ID: PAT_MRT4530_28439C.1
atggcgcatccgcatcggctcgtcgcggtgctcgcgctgatcctcctcgcctcgccggcggcaatgcgcgcggcggaggcggcgtgcgccggcgagaagttcccggcggggagggcgtacgcggcgtgcgaggacctgccgagcctcggcgcggcgctgcactacacgtacgacgcgtccaagtcgtccctgtcggtggcgttcgtggcggcgccggcgggcgccggcgggtgggtggcgtgggggctgaaccccaccggcgaggggatggccgggacgcaggcgctcgtggcgctcaagggcggctcgtcctcgtcggcgcccgccgtgaagacatacaacatcaccggctacgtcgcgctcggcggcgcctcgacgcccatcgcgttcccggccaccgacctcgccgccgacgagggcagcggcggcaagatccgcctctacggcaagctgcagctccacaaggggatgaagtccgtgaaccaggtgtggcaggtcggctcctccgtcaccggcggcgcgcccgacaagcacgcgttcggcccggccaacctcgcctccaaggccaagctcgtcctcgccggcagcaaggccgccacggcgacctccccggcgtccgagccggcgcccgcgcccgtcgccggtggccccgccccctcttccggcagcgacagcggcgcgtcgtcctccgtcgcgccgaccgccggcaagaacgcggcgaccaccgccgccgccgtgtcggcgccggcgctcgccgtggcggcgttggtgggtttcttggcgattgtatgagaccgccggcaagaacgcggcgaccaccgccgccgccgtgtcggcgccggcgctcgccgtggcggcgttggtgggtttcttggcgattgtatgataaagattattgacagctacgttcctacgtcctagtaccatgattagtggtgttcattgatgtttgcatgatgaatcatttcttgaacaattatttccctactgttcttgtttcctttcctcttttttttttcattttctcttgctttttttttgttataattagtttttctttgatttttccatttgcaataaaaaaaatggttggtgcacagcacttgttgttaattcggcactagattagtacagtgattttactattgttgtacatgccattgatctggtggtaatttggggttattt

SEQ ID NO: 23351 - DNA, 315 bp, Oryza sativa
  Clone ID: PAT_MRT4530_2843C.1
gggaaaaaaaactaaacttcttccttttcatttcggggctaaaggtcttccctttctctttacatggaagggaaggagggaaagggcaaaaaaaaaaaaaaaatgggggggttttttttacggggcccttaaacctacttaaacccccacaaggtaacaaaaaaaaaatttggcccaattaaaaatacctttttatacctatatcatttgggcaaaagggaggcaaacaaaaactcgttccaaacatcaggaactccaggggggccccaatgcgggcagtctgcgaaaaagcccgggtttgcaatctgctctttc

SEQ ID NO: 23352 - DNA, 301 bp, Oryza sativa
  Clone ID: PAT_MRT4530_28440C.1
ctggcccagtcctccatttcttacaacggtagaggtggcggcgctaggtgccttggaatctcagctggctatggcggcctctgctccgggggtgaacgataccgagtgcgcctgctgctgctgagctcatcggctactttgaccagcacgtgcattagcgcgcggaacatccagaacatctgcatctaccacaagacggacgtgtactcgcgggtgtcgttgccggggaaggatgctcacggtagcatgcacacaagtcattaactgctgacctcgcatcttgttgtgtcaccagtacttc

SEQ ID NO: 23353 - DNA, 213 bp, Oryza sativa
  Clone ID: PAT_MRT4530_28441C.1
atgccgcgcccccggttcctgtgccgttgcgctgccggttcccgtgccgccgcgccgctgttcccgtgccgccgttccaccgcttttgtgccgccgtatggcaccgtcgccaccgccgtcgtcgccgttgccgccgtcgaagcgggagatgaagcctcggaggatccctatgcctactaccaggagggagatgaagacgatggtgctcagtag

SEQ ID NO: 23354 - DNA, 507 bp, Oryza sativa
  Clone ID: PAT_MRT4530_28442C.1
tttcgggggctcacagtgcgcgacgagctggagttcggggagccaatgcaggacgtcttcttctgcctgcagcacgccgaggggctcaagttcccgctcctcttcatggtgaacgcgttggtgcacaagggaatcatcaaccagcaccagctcacgcctgaattcttcagcctgctggggagaagcgaggagaacgtcaatgtggctgcattgagggatttctggggggacaagttcccagtgtttgatgcgtgcgggaggctgaagaaggcactgaatcgggtggccaggaaccccaaacttctctgcagcaaggtcggggatgaccacgcggaggtgcggaggctggtgatcacgcccaccagggcttattgtctgcctccagaagtggagcgctcaaaccgtgttcttcggcattaccatgaggtggctgacaggtttttgagggtcacttttatggacgagggtatgcaggtgctgaacaacaatgtgctcaactccttcact

SEQ ID NO: 23355 - DNA, 189 bp, Oryza sativa
  Clone ID: PAT_MRT4530_28443C.1
atggcgaggtccagggccccctcgttgtcgacatggactaggcggtgctgccatcatgtggtcacggcttggcggcctggatccgcacccctgtggccgcggcggcggcatagccaggcccagcagatgaggaagaagatggagatggatggaaaaagtgacggcattggcatgattccaattttgtaa

SEQ ID NO: 23356 - DNA, 720 bp, Oryza sativa
  Clone ID: PAT_MRT4530_28444C.1
ctaactccgactccactcaaaccctcccctcctccccacctccgactcgacctgcatgccggcttccgctatcggctcctccgcccaacgccttcccatcgccgcagttgactccaccctcttccccacctcctccgccgcctccccatcgcctccgcctccggtgcctgcctccacctcctcttctgacatcaaggaagtcccctgaattagtctgcatgtaagtacactgcaccagccagattgggctaccagctcactaattttagcacatgtcttgatacgaaacagtgaaccatggaatgctctttggcagcttgtaactctgaatatgtagctacatacatgaacataattcagagatacagttgtacaaagatttcacctgaattttttcagagccatctatgttcttgtagttttcacctgaattctgatacctttagaaatttggagatttcatattcactccctgaatatgtgcatcatggcagcaatgactcctgaagcgttagggctaaatacttgtgttagccaatattacacacatgaggaaccctctgtcttgtatgtctacatataagtataaagcaccttatatgcaagctacaaatctgtttgttatatctatgccctgcatataacatgttggtaatttggttgtcttcatcgatcaattttcatttgttataagctatgctcaatgatgaatataagttt

SEQ ID NO: 23357 - DNA, 1583 bp, Oryza sativa
  Clone ID: PAT_MRT4530_28445C.1
gtgttaagcttgttcgttagtggtggtggcgttcttgctggatcataatggcgcggatggggatcagcaagggaggcagcggcaaggaggcgaagaagccgccgctgctgctggggcgattcgaggtcgggaagctgctggggcagggcaacttcgccaaggtgtaccacgcgcgcaacgtggccaccggcgaggaggtggcgatcaaggtgatggagaaggagaagatcttcaagtcggggctcacggcgcacatcaagcgggagatcgccgtgctccggcgcgtccgccacccgcacatcgtgcagctgtacgaggtgatggccaccaagctccggatctacttcgtcatggagtacgtccgcggcggcgagctgttcgcgcgcgtggcgcgggggcggctgcccgaggccgacgcgcggcgctacttccagcagctggtgtccgccgtcgcgttctgccacgcgcgcggggtgttccaccgcgacatcaagccggagaacctcctcgtcgacgacgccggcgacctcaaggtgtccgacttcgggctctccgcggtggcggacgggatgcggcgcgacgggctgttccacacgttctgcggcacgccggcgtacgtcgcgccggaggtgctgtcgcgccgcgggtacgacgccgccggggccgacctctggtcctgcggcgtcgtgctcttcgtcctcatggccggctacctccccttccaggaccgcaacctcgccggcatgtaccgcaagatccacaagggcgacttccgctgccccaagtggttctcgccggagctcatccgcctcctccgcggcgtcctcgtcaccaacccgcagcgccgcgccaccgccgaggggatcatggagaacgagtggttcaagatcggcttccgccgcttctccttccgcgtcgaggacgaccgcaccttcacctgcttcgaacttgacgacgacgccgccgtcgacgcgcccacctcgccgccggacacgccgcggacagtggacagcggcgacgtcggcgctgctccgacgcgaccaagaaaagccgggagcctgacgtcgtgcgactcggcgccgtcgttgctggaagggagattcgggctgggagggagctcgcggcggcggtcgagcctgaacgcgttcgacatcatctccttctccccggggttcgacctctcaggactgttcgatcaggacgacggcggcggcgccggcgccggcagcatcccggagcagcagaaacacacggcgaggttcgtgtcggcggcgccggtggaggtgatcgtggcgacgctggaggcggccgcggcggcggcgggcatggcggtgcgggagagggaggacgggtcgatcagcatggaggggacacgcgagggcgagcacggcgcgctggcggtggccgcggagatctacgagctcacgccggagctggtggtggtggaggtgcggcggaaggccggcggcgccgccgagtacgaggagttcttccgggcgcggctcaagccaagcctccgcgagctcgtctgcgacgaccggccatgcccggaggactccggcgagctctcccggagcctttga

SEQ ID NO: 23358 - DNA, 1170 bp, Oryza sativa
  Clone ID: PAT_MRT4530_28446C.1
atgcaaacatgcagtagttatatattatcacgggctcaggcttttaacactcaagaacttatatcgctagagagactgacggaagcaagttcctggaagcggacggctgctgctgggcccgacggcggcgatagtgctgcgcacgagaatggcagtatgttggctttgctcccggcggaggctgtatcgcttccggcgatcggcggcggcggcggcggtgacggcatcattgcgtacgacagcggctgggcggcgcttgtgggactgtgggagccacacgcgagacaacgtacggctgccggcgacccgacgtaccgcgtacgagatgatagtctggtagaggttctgttgttgagccctggaagtctggaacacagccggtgctcagaagaatttcatatcactacggcgtatcaggatttgatagagcaatttgaaaacaatgaactgataaaacatcctagagttagtgaattttgtgctggtgtaactgattctgaaagcttggcagcaagagttgtcaattttgctaatcaagttaaacttgtgctcggctatgttacttccttgctggaaattaaacagtgcccccgagcgaatacagagaaaggaaaacatgtggtccacttagtttctaataagtccaaactagctaagaagaatcaagggtgcagccctcgtcgctgggagaaaccacacgcggggtggatgaagctgaatgtggatggatcctttgacttgaattcaggttcaggtggtttaggtgtgatgctaaggaatagttctgtcaaatctattttttctgcttccggattcattgagcgctgcagcagcccattggaagctgaactgatagcctgcaaagagggcattattatggcccttcagtggaccttgttgcccatcattgtggagtctggttgcttggtggcggtgaatatgatccaggctgcgaaagaggagaggtctcagtttgctcatctgatccgggacatagggaatttgatctcaggagacagggaagtcttaatccagaaaatttatcgcactcagaactgcattagccatttcctagcaaataaggcccgtgctaaactctgtacagagttttggccggatgaaacttgtaatatcatctcacaatttgtttgtgaggaggctgcttctgag

SEQ ID NO: 23359 - DNA, 213 bp, Oryza sativa
  Clone ID: PAT_MRT4530_28447C.1
atggtggacccgtcgacggcttgtgcgatgcagaggcgacttcatgttcatcccacactgttgaagctcgtcggcagggccggcggtcaggcaccatggatccacatcgatagctcgaggtcttcatcactgcactggttcctcttttgtgcacacctctatctgtttcaccccaatgtatatcttcctccattggcttcaccgctggggtga

SEQ ID NO: 23360 - DNA, 189 bp, Oryza sativa
  Clone ID: PAT_MRT4530_28448C.1
atggtgcaccaggtgggctggcggaagatgacattggtgcgggtggagatctcgtcggaaggaaatcgcctaggaatcgcctttgtgccggaggaatcgctggagaagagagagaaaaggaaagaggatttgatcaaagcggagtcggaggcggagatcgagttcggaaacagagcaggaatcggctga

SEQ ID NO: 23361 - DNA, 254 bp, Oryza sativa
  Clone ID: PAT_MRT4530_28449C.1
tctacattacttcgcaatctggctcaaggtgagggagtgcaggatcttaacttgccatctacatggggtatctacccttggacctatagtgcaccctcatagcattaccaccctcggcggtgtctggcactgaattgtaacaatataataattcgtatgttaaacataaagcatacagggggtgtgtgactgttgaaacctatggtcatataaatctaaataaaatcatcttacctaaaaaaaaaaaaaacaac

SEQ ID NO: 23362 - DNA, 325 bp, Oryza sativa
  Clone ID: PAT_MRT4530_2844C.1
atgcagctcaacccgaaagcaagaactcgtcgaaacaaaactaaagtaaaagggtggcgatgcgtcgagattgtattgaacgtgactctatccatgtgcggcaatcaccttgaagcacctcaatccaacccgacatcacacatcaagttgtattgctaggatcggctacatcagcttacctagtccgactcagactcagccgatcttatcatagccgatctagactccagccgatcccttctctgttttcgaactcgatctccgcctccgacttcgcttcgatctaatcttctttcccaatgccgatattaccaaatttggtcgt

SEQ ID NO: 23363 - DNA, 2247 bp, Oryza sativa
  Clone ID: PAT_MRT4530_28450C.1
atgtctggttgtttgctgattcgggctatagctcgccgaggtactttaccccagaatagcagtgatgtgtcaaaatctatagttggtcaggtgcaagcagaagagcaggaaggaaatggccaggcaaaccaacaagcagtgcagcaacatatgattttagcaggccagttgtctcagccaaaatcgttaactgaagagccaaacagcttccagttcgctgaaaaggaaacaggctatgctggtctacagaatttcacaggccccaaggtggatgtgggtcagacttcaggagagcagcagcatgtaaaacagatggtcggtcagcaagcaccacctggtgcacaggacgcaaggaagcggggataccaaccgtctataccatttaatatgttgattccaatcctacaggctcatcttgacagagacaaggatatgcagcttcaaactgtgtgggcaaaacttaggcgtaatgaagttcataaagatgatttcttgagagttatcaggaacatcgttggagatcaaatgctaaagcaagcagcccataaagtttttgcacagatgcaagcccaggcacagagaagtggccaggcaaatgcaaatcagcaggctaatgcaaatcagtattctttacaatcccaagtatcttccagcggttcagctcaattacatgatcagcaagttcacgtgtccaccacacctaatcagggccaaaaaaaccaagcattgtcttcatcccaaacctttgtgcaatctggcactcaggtgcagagcagtatgactgctcatgataattccatccaacggccagatgcaaagggaatgcatgttacgccgaaccgacctcctgttatgaactcagcaatttctgcacaaacaatgaacaaacagcagcaacccacacaagtccagcaagcctcacagcaaatatatggaacaactaatcgccctgaccagccatacactaggccaatcggtggttcaacacctcttagctcactgagttcagaatcagaaataaggccttcctctcatcctgcaaaaatggagattcttccttctcatccaatgacacaacaaaatgcagctgcgcagcaaatgcaacagaacaaggatgtgaagactaatgcttctaatccaaggagtaatgcaaagcaagattcggggacaggtaagggtcgtgcagttggcactggaggttcttcaacgaaatcgcaagggaagcagggcccccctaacttttccacacctcccgctgcaaagagtaacaagaaaactgctgggcagaagaagtcattggaaacatcaggctctacaccaccccctcctagcaaaaagcagaagacttctggaaccttccaagaacaaagcttcgatcaactaaatgatgtcacggctgttagtggtgttaatcttagggaagaagaagaacagctactctctgccccaaaggaagagagctgggcctcagaagaagcaaggaaaattgcacaggaagaagatggcaagctttttctgcagaaaggcccacttctgaagaaactagcagcaatcgttcctaaatgcaatttgaagagcattggtggtgatgttgagcattgtttatcaatgagaattgacacagaaaagtctggccatcaactagttataacatcagatgttggccggcaaattttgcggatgaaccagaaagctaaggaagaatgggataaaaaacaagcagaggaaacagacaagaacaagaaacaaaatgaggttgacggcggtggcactgtggaattagacaaggaaaaggaggaaactcgttcaaagaatgcaaagcccaacaaagaagaagatgacaagatgagaacaacagctgcaaatgttgccgcccgacaggctgttggaggaagtgatatgctgtccaaatggcaactgatggctgaacaagctagacagaaacgcgaaggccttgatctggctgcttcttcacagcgcgggacagcttccaggtcgcatatggctgggaaaggtcccacagatcaccacgaagcttcgaagaggacccattctgcagcgtttggaactggaggcatgaacaggcaaggcaggggtccatttgcagcgtctcatccaaaaggaccacaaagaactatttctatgaaggatgtaatatgtgtcctcgagagggaacctcagatgacaaaatcgcggctgatatatcggctctatgagcggttgcctggagattccaccagagattag

SEQ ID NO: 23364 - DNA, 312 bp, Oryza sativa
  Clone ID: PAT_MRT4530_28451C.1
atggcggcggaggaggaggcaagatggtcacggtatagggtgttcctacggcctatgtggagtaataatagaggaagtccatgggaacacacgaaagtcaaggccctgtatcaccatgacaccatcggagagaaaaaagaaaaagaaaattcttttatgcgtgtatgctgtactttggctggccaggttgagtacttcttcgccgaaattcacggctttgccaaatttctcaccaacatcaacatcattcgtaagttttacctcaatcccttgaatacatcgaagtcacacatgcattcaggtggtgtttga

SEQ ID NO: 23365 - DNA, 186 bp, Oryza sativa
  Clone ID: PAT_MRT4530_28452C.1
atggagtggaacagtgcggatctagcggtgggcctcagcggcggaggactccgaggcggactgatggccggcggagcaagaatggagacgaatctcccacgtggaagggtgagggcgaacgacatgtcgacacaccgtgaacgccctaacaaggcaagtgctggtgccagacatggtgactattag

SEQ ID NO: 23366 - DNA, 535 bp, Oryza sativa
  Clone ID: PAT_MRT4530_28453C.1
ctgacaacggcgtgagcagacatcacctgatctcaccaagaacatggcccccggcgagagacgggcgaccatgcgcgccgtccagtacagtggctaacgcggcggcgccgctgcccttaagtttgtggaaatccctgttccttctgtgaagaaggacgaagttctcgtaaaagtagaagctgcaagcatcaatcaatccgatttgatgactcagaaagggatgatgcgcccctttcacccgaaatttccatttattccagtaaataatgtgtccggagagatcgttgaggttggctctgcagtacgcgagttcaaagttggtgataaagttgtctccaaactagacttctggacacagggggccttgctgagtacgtggccacatcggacaagctcaccgtcgctcgccctgccggaatctccgccgctgacgcggcgggtgtgcccgtcgcggctgacagcgctccaggcgctcaaggcatcggcaccaagttcgactcgggcccacgggggccgacgttgacccgggctcacg

SEQ ID NO: 23367 - DNA, 219 bp, Oryza sativa
  Clone ID: PAT_MRT4530_28454C.1
atgcgtgagccggctggccgctggcggcgtggtggaggcatcgccggcggccaccgtggagaggccagcctcgtacctccgccagctagcagtgttccagaccagcaggagaaattatcagtatctgaactgcaacagagcttggctctgctggcgcggaacgtccataaccagttaccggtccagcagcgatccctctatgattcagcaagcacctga

SEQ ID NO: 23368 - DNA, 225 bp, Oryza sativa
  Clone ID: PAT_MRT4530_28455C.1
atggcgaagccggcgtgcacgctgatggcgagggaggccgagaacggcatccatgatccaatgaaaggtcctatcgaccaatgtctgtcgataggtcctgcacacccacatgcaacaacaggccatttactggtcggcaccttggccttcagtagttcagtgtccgagggagattccaaaaccaagttgatcacggtggaattacggacgatgatgagctactag

SEQ ID NO: 23369 - DNA, 300 bp, Oryza sativa
  Clone ID: PAT_MRT4530_28456C.1
atgatggttgtgatggttggaatggttggtaataccctccaaccatcattggggcttcatctcaaccgtccagccaaaacctggatccaacggaggcgagggaggttcggccggaccaccagattcggccgaacctagggccagcccaatccagcccaatttcggctggaggccttctccgttgttcttctccacagacttgtgaattttggcccaattcatcgtgtcaattatgagttcttggcccattcatacacaagtctggttctcgacatcgtccgattgatttatcgtctgagt

SEQ ID NO: 23370 - DNA, 282 bp, Oryza sativa
  Clone ID: PAT_MRT4530_28457C.1
atgaagtgtaagcctcaaacttcggcaagtgtggtcgcagattttcagtggcttgggttctttttggtctccccaaatcagagcacaaggaagagaaaagaagatgaaggaatggctcaattcttgatcattttggtcgcttgggaaatctggaaacatagaaatgaatacgcatttaatgttgctacctccaatattgaggaagtccttcctgctattgctagggagggcggcctttggtgcacagcaggagctaccagccttcagggagttggtagctag

SEQ ID NO: 23371 - DNA, 1529 bp, Oryza sativa
  Clone ID: PAT_MRT4530_28458C.1
tacttcatggcatatgcatcgtgcgtgcccgtctgccgccggcaccggactgcccgaggtccgccgtcgtcatccccgcggtcgcctgcgatgaatccaatgcctgaggctgggagaccgctgccgccaccgccgtcgtcatcgccgccctgcctgagacccgccgctgtcgtccccgcggtggccagcgacggatccgccctccccgcggtcgccggtgacggatccgccctcctcgcggtggccgacgatggatcctctccaccggcaccacccttccccgccctacccccgccccccgccatgccatcaccgctctcgccgatgccgccgccgctctgccaatgtcgccttcgccgatgccgccaccatcgccgccctagccgaggccgccgccatcgccaggagtgggtagagggggagagggagagggagagggagagggagagggagtgggtaggtgaggcttcaagcccaattcgtctagtccaccaccttgtggagggccgcgcccgcgcgcgccaccggacagtcggacacgcacagtgccctgggctccgtgcgcccgcgtcgcgcgcgcgtgctcctccgccggcgccgggtcagccgcctcccaatgcgtttcgtccaaagtacagcgagccgccgagcccatccagtatccacgcattccgcctgcccgcgcggccggccgcggctaccaccctccacccttcacggcttcgcacgcgcccgcgcgccgggcagatctagatgctatacccctccgcctgctactgctagctctcccccccccgtcccatgcacgcggttgcacgcgcccacgccggccgtagcatccgttccactataaaaaccccctccggaaccccacccctccacattctccatagcttggccaccgtagtaaagccggcccgccgccgccggcgcagcagcagccggcggtgcgggcgcctggggacgccgacttcgagttctccgtcggcagccacccgatgatggccgccgaccagctgatctccaagggccgcctcctgccgctccgggaggccccgcacggccacggcggcgccgacgccggcggccggccactcacgctccgcgacgagctgcgcacggacagccgccatggccgcgtcccccgcgcgcccaacctcctcctcctcctcccctacctggtgatcacccacgccgcgaccgtggaggagaagaggacggacggcgacggcgaccctatccttgcccggagccgccgccgccgactcagccggtgccgtggacatgcgtcgccgccgccgctcctccctcgcctgcacgccgcgccgcgccgctcctcccccgcccgcgtgctgcgccgctcctcacccgcctgcgcgctgctcctcccccgctccgccctcgtcgcagccgcagccgccgccgccgtctcttcgctcgccgccacgtcgccggccgccagacgtcctcctttcccgcgtcgctctggcgacctcttcccccaaccgccggccggctttgccacttac

SEQ ID NO: 23372 - DNA, 141 bp, Oryza sativa
  Clone ID: PAT_MRT4530_28459C.1
atggagatagacaggactaataccgtgaacgaacaaactcctcaaacaccgaaagagaccacgactggatctggaaacagacggccaagggaaggaggggggaggcaccaaggaggcatggtcggcctggagaggaactga

SEQ ID NO: 23373 - DNA, 325 bp, Oryza sativa
  Clone ID: PAT_MRT4530_2845C.1
atgcagctcaactcgaaagcaagaactcgtcaaaacaaaactaaagtaaaaggggggcgatgcgccgagattgtattgaacgtgactctatccatgtgcggcaatcaccttgaagcacctcaatctaacccgacatcacacatcaagttgtattgctaggatcggctacatcggcttacctagtccgactcagactcagccgatcttatcgtagccgatctggactccagccgatccctgctctgtttccgaactcgatctccgcctccgactttgcttcaatctaatcttcttttccaatgccgatattaccaaatttggttgt

SEQ ID NO: 23374 - DNA, 1068 bp, Oryza sativa
  Clone ID: PAT_MRT4530_28460C.1
atggggcctctccatctccaatctcccttcctcctctggtcccctgcgcctcctaccccaccactcccaccttctcctccaagcaagacgcgccgcccaccaccgccgccgcctcccttctgcccccacctctccgtcccttgcgtcgggctgccattgccgccgccatgccctccaccgcccggcgccatccggttcccgctctggcatggcgcggcgacgatcccggcctcctccgtgtgccgttcggtgaggggacatttcgtcgagcacctgccgcacgtggaggggcgcgtgcccggtgacggtgagggcgcgttcgccggcgtcccgccggagatgctccctcccaagaagaggctgctgcggtaccacccgtacgcggcggcgtggacgatccaggagatggcgaaccatgccagggaacagggagggttcgggggcaagcggccggctgttcctactcctcccggcgtggaggaagacgacgggctgcgcgccgagctgcgccgcctccgcatctcgcggccggcgctggtgctgacgaagcggctgaccccgtcggaccgcagccgcgagaaggcccgcctcgtcctccccgaggggctggtcaggacgtcgccgctgctgggcatgctgacggcgggggagcgccacctggtactcacgggggacggcggcggcctccccgtcccggcgttcgaccgcctgggccgcgcctacgccatggcgctcaagcgcgaccgctccccgacctgccgctcctaccgcctcacggggcagtggtcgctgttcgcgtcgcgccacgccatgcacgacggcgacgccgtcgaggtccgcgccttccggccccccgcgtggcaggcgcgcctcgagtcccgcggcgagggcggcctcggcatggcgctgctgctccgccggccccgaggccagcccacgccgccggcggccgtgaacgacgccgcgttctggagctaccgggagcgcggcgcggcggacggcctcctcctcctcgcccgaaccgctcctcgccgcggcgacggcggcgtgcagatcacggtgccatag

SEQ ID NO: 23375 - DNA, 2331 bp, Oryza sativa
  Clone ID: PAT_MRT4530_28461C.1
atggccaccacctccacctcgtcgctgctgcctctcctcccctccaggaccccgaccccgacccctcgccgccgcctcccgttcgccgccgccgccgccgccgcagcggcgccacctcgccccttcctcgtctcctcccctccgcctccgcccgcgccccgcgcccgcctcgcccgccgcgccgcagcggggggcctgtacggtggtggtggtggggaggaagagggagacggggaggatggggagatggaggaggagtattatgatgatggggacgaggagggggattgggaggatgatgatgcggaggagggggaggagatggacgtcgaggcgatggaggaggaggccctcggcgccgtcgccgacctctccgagcggctcagccgcgagctccgcatcgatgacgatgttcgggataaaagaagaatcatcagggataagacatcagcatctaaacatataccggataatcttcttccaagggtggcaataattggaaggcccaatgttggtaaatctgcattattcaatcgtcttgttgggggcaacagggctattgttgttgatgaacctggtgtgatggaagagcttgctattacaactactgttggtatggatgggattcctcttgcctctagagaagctgctattgctaggatgccatcaatgattgaaaagcaagcagttgctgctgttgacgaagcagctgtgatactattcatcgtggatgctgatatagaaattgctgattggttacgtcgcaactactctgacaagcatattatacttgctgtaaacaagtgcgagtctccacggaaagggcaaatgcaagctttagatttttggtcattaggattttctcctctgccaatatctgccattactggcactggaactggagagctccttgatatggaactggatggagttgaagaagatggaaactatattcctgctattgccattgtcggaagacctaatgtcgggaaaagtagtattctcaatgctttagttggagaagatagaactattgtgagccctgttagtgggacaacccgtgatgccatagataccgagttcaccacagaagatgggcagaagtacaaactcattgacaccgctggcatccgacgaagggcagcagttgcttctgctggcagcacaacggaaacactttcagtaaaacgtgcatttcgtgcaatccgccgtgaccgcttcgtgcaccataccgaccgcctcgacatctcgaacgatccagctcagctcaatctcccgaggcccatcccccgtggcggcttcccggccacgccaacgccttcttcttctgatgaactctccctggcaactggggcccgcaccgactcgcccaacggaatggggggttcgttcggatggttggagtttctcttatcgacctcgcacccgtgcgaggatgatgcggcggaggagcttcccgtcgagccgccggtggcggcgatggatgccgcccatgacggccgcgatgaggtgcggggagaagtcccctccgagccgtcggaagtactcgctggagaggaggaggcggcgatggatgccgcccatgacggccgaggcgaggtccggggagaggtcaccttcgagcgggcgatcggtgcctcctcccgtgcgggttacgaaggcatcaagctgggggaggagccctccctcaaaccggcgatggtgggcgcgcccgagattaagatgatcgagatagcagaggcctcctctgttgcccagtgggacttgttggcggggacggaggattgcagccctgagattaacccgaagattgtcgacctccagcagcagcagcaggaggcctctctccttcctgatgaggtcatctctgaggcagacgcgtcaatcttggcgcagtattcatcggtgacaaagaaagacgatgatgctgagttcttgatttgtcggccaaactttggttttgttacacgaccacagcaacacactcccaagaaacggcaccccaagaacaagcgggctatggggattaacttgttgtatcagctgctgttcgatttaaaagagctaatggagctttgtggccaagctgataagatccagagtgaggtgttccttaaaaaggcaatgaaaaaagcttgcagagattctgatgatgctgttgcagacatagtgtttcaggccctaaaggtagatggtttcattctgaggctattaaggtatctgaagagccaattcaatttttgccggacccaggcatggaagataaggaatgagatattgagaattggtggtacacccatcaatgatccactttccaaagattctccttga

SEQ ID NO: 23376 - DNA, 693 bp, Oryza sativa
  Clone ID: PAT_MRT4530_28462C.1
atggaaaattggcaggaggtgacactcatccagattttgttctgtaagatcggtatcaagggggcggcaatcggccagggatttgagaaaatgccaggaaatggtcgtgtttggatgatcgtggctctgaactctgaagaacgaactaaccagcctgagctatcctgtagatgttgtgctgttgtccagtttgctggttgccgctgtgcagaggttgatcggacggcgcgggtgggcgcgggcgggctggcggtgggcgtcgtcggggattcagcttcggtcgaaatatcgccgcccgcccagccgtcccgcgtccgagacggcgcccgcccccaatctttcccgcgcgctcgcatcgctgtttcgcctcgccgcgagcgcgagccaactgggaggctcgccgccgccgtgcctgcgccaggccgccgtggtcgccgcgagtggggaggggactggcggccgccgcgcgaggccaactccatgccctgccctgccgcgacctgtggagaggcgctaggccgccgaggccctgtcctgccgccgcgaccgggggcacgtggaggcggccggctgccaggcctgacggcgcggtggtgcaggcggacggccgcccagcccgacagttttccttttgttagaagattatctgtatttggtcagatatgtagccgaatgcccgatgttatgatatga

SEQ ID NO: 23377 - DNA, 1690 bp, Oryza sativa
  Clone ID: PAT_MRT4530_28463C.1
cttctgtctgctactaccatgcattcgaccggcatggagatggaggtggaggtcgccggcgacgacgaggcggtcccggaggcgccggagcggtccgtcgtcctcatctccgccggcgccagccactccgtcgccctgctcagcggcggggtggtgtgctcgtgggggcgcggcgaggacgggcagctggggcacggcgacgcggaggaccggccggtgccgacggtgctgacggcggcgttcgacgacgcgccggggggcgtcgcctccgtcgtcatctgcggcgccgaccacaccaccgcctactccgacgaggagctgcagctctacagctggggatggggcgacttcgggaggctgggtcacggcaactccagcgacgtgttcaacccgcagcccatccaggcgctccagggcgtccggatcacccagatcgcctgcggcgacagccactgcctcgccgtcaccgtcgccggccatgtccacagctggggacgcaatcaaaatggtcagcttggcctcggaaacaccgaggactccttgctcccacaaaagattcaagcttttgagggtgtccgtgtaaaaatgattgctgctggtgccgagcacaccgctgctgtaacagaagatggtgatctctacggttggggctggggtcggtatggcaacttgggactaggcgatcgcgatgaccgcttaatcccagaaaaagtttcttctgtgaatggtcaaaagatggtgcttgtagcgtgcgggtggcgccataccatcaccgtgtcctcctccggtagcatctacacatatggatggagcaagtatggtcagctagggcatggtgattttgaggatcacctggttccacacaagttggaagcattgaaggatactactatatctcaaatttcaggtgggtggaggcatacaatggcacttgcagcagatgggaaactctatggatggggatggaacaagtttggacaagtcggtgttggcgataatgaagatcactgctccccggtgcaggtcaattttccaaacgaacagaaagttgttcaagttgcttgtggatggaggcacactcttgccctgacagaagccaaaaatgttttctcatggggaaggggcaccagtggacagcttggccatggtgaaatagttgataggaacatacccaagatgatcgatgccttgagctcggatggatcagcttgcaagcagctggaatcatcaaaagccgtcccaatgtcagctaaagtttgggtctcgccatcagagcgatatgccatcgtgccggatgagaaggctggaaaaggcatccctgctggcaatggaacagagactcatgtgccccaaggagatgtgaagaggatgcgcgtctgattcagcaacatatacgatccagtgctcttcttccacttgatatcctctattagttaaccttagaattagcatcatatatacatataataaccttggggcagcatttatcctctaccatcttatgacatatgctgcccagtctttaattagtgtgttgccttttcatttcttaaaataatcagtgatattattcacagtgaggttggtcatgtatgacagtatgagtaactatggactgtcataggtatcaccatgggaaaaaaatcagtcagtttattattctgcttggcattgcaaaaaaaaaaaaaaa

SEQ ID NO: 23378 - DNA, 750 bp, Oryza sativa
  Clone ID: PAT_MRT4530_28464C.1
atggcgccacactccacgtccggcgccgccgcctgctccacgtccgacgccggccaccccgctccaagtccggcgtcggcgctccactccacgtccggcgcccgcctccccgtgcctgggcagcgccgggagagaagagacacaagccgggtggcggagcggcaatccgcggccacggcgacggtgccggccacgttcgccgacgggaggggggcgctcaagagtggcggctgcccggcgctcgtctccctcccggcgtcgtcgttcttcgctgacaacctcgtcggaggctttctactcacgacgctcgccgacactcatctgggacgaaggaagatgctcgtcctgtcactggcgaccatgcccgtgtccgtcctctcgtggctcctcatgggcaggttcaaccggcgcagctcggtggtcgagctcaccgcggcgtccgggctatgcagcctcgcgtgtgtcgtcatcccggcggacccggaggccagcaccggtggcttgcgcctcgccgccgagctatcctccttcgcgtcatgtgagaccacgcgctcatctggggcaagggtggtgaccacgccgacaacggcaagccaccagcttccgccacgccgtagcgccacgccatcgtggccttggccgcgccgccgcacacagctggccgccggcgcctgcgctgctgcgcccggccgtcgcctcgcaccgccccacgtcagctgtctcctgctcaggcgtgcactcgcgtggtga

SEQ ID NO: 23379 - DNA, 543 bp, Oryza sativa
  Clone ID: PAT_MRT4530_28465C.1
atggctgtcaaagaagtgcaagccctccgcaaggagttcgacgctcaacaagcaggcaaggccgtgcaagttttgggtcaggctctcctgaaggtctcctttggcactcaagaatacaagcgagaagaagagatacttttcgacgttgttgacatcccatacaactacaatgccatcttcggccgaggcactttgaacaaattcgaagcagtctcccaccacaactacctcaagctcaagatgccgactacaagcgaaggagataggcggatgcccttcggcctgaggaatgttggggctacattcgccaggccggtatacaaggtcttagtaccacaattggggcgaaacatcgaagcctacattgacgacattgttgtaaaaagtcgcaaggctttcgaccatgcgtcagacctgcaggagacattcgacaacatccatgcggctggcatgaaattgaacccagagaagtgtgtgtttggtgtttgcgcgggggttggtcttgccctctacaggcccttatccacatctaactcgggatag

SEQ ID NO: 23380 - DNA, 274 bp, Oryza sativa
  Clone ID: PAT_MRT4530_28466C.1
acacctacttcacctactactcctagggccgatcggatcggaccgggtcctactacttcaacaccgccaccgtcgccgaagataggagaagagggccgtactagacaccttactctttaccttggagtttgtgaacgagggccaccctgacaagctgtgcgaccaaggctgagatgctgagctaggtgcctgactcgtcgaggaccatgacagcaaggacgcttgcgagacctggaccaagacaaacatggacatggtgtttggtgagatcacc

SEQ ID NO: 23381 - DNA, 345 bp, Oryza sativa
  Clone ID: PAT_MRT4530_28467C.1
atgctagaagtggataatagttgccagctgttagagctagaagtgggtgataaccgcataaagcccttcttggcccagtacaaataccacgggcaaattgggctagctacggcccatcctaatttctcgctgaagtcatcaaccagtgcccgcgacgcccgtggctggctccgtccgtttgctgccacgacccacgagggggcgccggcggagtcacgagtactcgccgcgccccgcgaggaaagatcggcgccgctcacccacaagtccgccgctgtggctcgtgccgtccgatttcaggttttctcacttgaaccatctgaagcaattcaactgaacctttcc

SEQ ID NO: 23382 - DNA, 626 bp, Oryza sativa
  unsure (1)..(626): unsure at all n locations
  Clone ID: PAT_MRT4530_28468C.1
ggaagatggacggcgtcgtggtgttcgccgacgagaacagcatcctccggacggagctgttcgacgaggcgcagaaggtgaagtcggtgggcgccgtgcccgtcggcgtgctgggcgaggacgagggtaccagcgagacgttcctccaggcgccgtcgtgcgacgcggaggggaagctggtgggctaccacgtgtcggaggagaccatgctgccggcgaaccgtggcgacatgctgctgtcgagcaggctggagtgggccgggttcgtggtgaacgcgcaggcgctctgggagggcggcggcgcggcgtcgcgccccgagtgggtgagcgacatcgacgccatcgacgacggcgccgccgncagcccgctctcgctggtcaccgacgccgcccgcgtcgagccgctcgccagctgcggccaggccgccctggcatggtcccaccggtcggatgccctccacgaggtcaaattcccacacgaatggaaaattgaccctcctgtggtaaccatcgcttcccgccaacaggatgccaaaccagaaacaccactcaagcggaccacgctattgaatactgaaggtcagcactagaggccattttttggtggaaaatagaaatcagatcga

SEQ ID NO: 23383 - DNA, 1593 bp, Oryza sativa
  Clone ID: PAT_MRT4530_28469C.1
tcctcctgctgcttgccctttcccccctctcccccgccccctaactccacacaattattcacccaccccggccgccgccctgcgaccaccagctgctctcttatacctcaccacttgccacttccccaccgccggcttgcttcgcctatctgcgacgtatcgagctactctcagttcgaaatgaagctcccgctgctgcggccgctgtggccgatgctcgcgtcgccgggcggggtcgccggactccccgcccgagccgtccaagccgtcgctgcccgccgcgtggctgctgctgcacgcgctcttctgcgccacctccatgggcggtcgggttcaggttctcgcgcctcatcgtctacctgctgttcctccccacgccgatcaaccccaccgcccacctcgtctcgctcgtctccccgcccgtcatgcttgcccgccgccaacgcgacgaccaccatcacgacgacgacgaccaccaccacgacgaccgtgacgaccaccacggtggccgccgaggtcggggcacacccgcagcaccaccaccacggaccggtgttcgtcggccgccacccgatccgcgtccgcccgtggccgcaccctgaccccaacgagctcctcaaggcgcaccacatcctcgccgccgtccagaacggccggcagcgcagcagtcgtcgccgcggggctgggccgccgaggcccgtcattgccgtcacccctaccaccacctccgcgctccaggtgccctccctcacgtcgatggcgcacaccctccgcctcgtcgacggccctctcacgtggatcgtcgtcgagcctgagcaccacaccgacgccgtcgccgccgtgctgtcccgctccaacctcaacttcctccacatcacgggacccgactcctccacctcgcgcctgcgaatgcacgccctgagggagatacggaagaggaagatggacggcgtcgtggtgttcgccgacgagaacagcatcctccggacggagctgttcgacgaggcgcagaaggtgaagtcggtgggcgccgtgcccgtcggcgtgctgggcgaggacgagggcaccagcgagacgttcctccaggcgccgtcgtgcgacgcggaggggaagctggtgggctaccacgtgtcggaggagaccatgctgccggcgaaccgtggcgacatgctgctgtcgagcaggctggagtgggccgggttcgtggtgaacgcgcaggcgctctgggagggcggcggcgcggcgtcgcgccccgagtgggtgagcgacatcgacgccatcgacgacggcgccgccgccagcccgctctcgctggtcaccgacgccgcccgcgtcgagccgctcgccagctgcggccaggccgccctggcatggtcccaccggtcggatgccctccacgaggtcaaattcccacacgacacgttagcagttagctcgaaattgcatgggtcagatctaggatttgatcccgacaccatggcaagatggaaaattgaccctcctctggtaaccatcgcttcccgccaacaggatgccaaaccagaaacaccactcaagcggaccacgctattgaatactgaaggtcagcactag

SEQ ID NO: 23384 - DNA, 325 bp, Oryza sativa
  Clone ID: PAT_MRT4530_2846C.1
atgcagctcaacccgaaagcaagaactcgtcgaaacaaaactaaagtaaaagggtggcgatgcgtcgaaattgtattgaacgtgactctatccatgtgcggcaatcaccttgaagcacctcaatccaacccgacatcacacatcaagttgtatcgccgggattggctacatcggcttacctagtccgactcagactcaaccgatcttatcatagccgatctggactccagccgatccctgctctgttttcgaattcgatttccgcctccgacttcgcttcgatctaatcttcttttccgatgccaatattaccaaatttggttgt

SEQ ID NO: 23385 - DNA, 946 bp, Oryza sativa
  Clone ID: PAT_MRT4530_28470C.1
tgaatttggcctcactttaacgagtctaacgaatctgctgacacagaaggagaggccctggaccatggtggcatatcggatgggagatgatgtagatggcattttcagatcagtggctgaatatatcatcggtgatggagctgataacagatactggacgacaaattggacgggaaatggttgcttcgcctggaggtggcctatcctgtactcctatgtaggacactccaggttgtcggtcgcccaggccatggttaatcatagatgggtgcgagatttgcagggttccttgttcaatgaagccttgggtgacttctttcagctttgggacgaggttcatgatgtggctctacagcctaatgcagatgcaatcagattgaaactgactggagatagggcaattctcggctgcctcggcatatgatcttttcttcatggccaaagaggactgcccttatggagagatgctgaggcactccagactccagagcaccattgagagtctgttttttcatgtgactagccctgaaaggaagatgcctaacggcagacaatctggcgaagagaaactggccccacgatgaagtctgtccactctgccagcgagataatgaggactgccaccacctgttcgtggcctgtaattttacaatcgcggtttggcggttgatgaggagctggattaatgttgactttccaatcccctggtgatgaagatcaaccgctcacagactggtagcttcgggcccaggatgcattttcatgtaatgtaagatataattgtaagtatacatcctggtacttgacatgaattaggggagctgcagcgctgttttgcagctgctagcatgttctgtaaattgatgcaagaaaagtgacagggtgccagtggcactcatgttatctgaaatggctgttctatgttctctgagctaaaaaaaaaaaa

SEQ ID NO: 23386 - DNA, 1651 bp, Oryza sativa
  Clone ID: PAT_MRT4530_28471C.1
gctgcaggaattcggcacgaggctaaaacatcgccacgtcccgccaccccccttcaatgtccgtcgccaccggcggcggcgtcgtcctctcgcgtgcccaatgcgcaagccccaccacgccgcgcagcctccgccgccgccgccgctcccgctcccgctcccgctcccgccgcggaactgcccgctcgcgaccgcggtcctggcgctcctctccgtgctcctcgccacggcgctgtgggtcctcctcgtgctgtccccggcgtcccacgcgaggggcccagccgcggggctgtcggatgcggcggacgcggaggcgtttgcggtggcgggcggaggaggcggaggcggcggggagggcgcggaggccccgctgtcgctcggccacatcgtgttcgggatcgcgggctccgcgcacctctggccgcgccgccgggagtacgtccggatgtggtgggacccggccgccatgcgcgggcacgtgtggctcgacgccggggcgcccgcggcgccggggccgagcgcgtccggggaggggtccctcctcccgccgatccgggtgtcggaggacacgtcgcggttccggtacacgaaccccacgggccacccctcgggcctccggatcgcgcgcatcgccgccgaggccgtgcggctcgtgggcggcggcggcgggggcgcgcggtgggtggtgctcgtggacgacgacaccgtggtgtccgcggacaacctggtggccgtgctcgggaagtacgactggagggagatggtgtacgtcggcgcgccgtcggagagccactcggcgaacacctacttcagccacagtatggcgttcgggggcggcggcgtcgcgctcagcctccccctcgccacggcgctcgcgcggacgctcgacgtctgcatcgagaggtaccccaagctgtacggaagtgacgatcgcctccatgcttgcatcaccgagctcggagtgcccctctcccgcgagtacggattccatcagtgggatatcagaggcaatgcccatggtatattggctgctcatccaattgctcctttcatcagtatccaccatctggagcttgtcgatcctatataccctggtttgaactctcttgagagtttggagctctttacaaaggctatgaaaacagaacccatgagcttcttgcagcgctcgatttgttatgataaaaggcagaagtatacatttgcagtctctttgggttatgttgttcaagtgtacccctatgttcttcttcctcgtgaattggagcgatccgagcggacttacattgcatataataggatgagtcagcgaactgaatttgattttgacactaaggatattcagaaatcattgtgcaagaaacctatattatttttcttgaaggatgtttggaaggatggaaacataactaggggttcttatatacgtgcaagtgttcgggatgacctaaaaaacaaagtgttttgcttcaggtcaccccctttacctgacatagacgagattcaagtttctgcatccccattaagcaaaagatggcatctggtttgttctaatattcctaacaatatatcatatcttgtttctacatttacattggctaattgtcgtacccctgatataggcaccaagaaggttatgcagtgcgcttaa

SEQ ID NO: 23387 - DNA, 253 bp, Oryza sativa
  Clone ID: PAT_MRT4530_28472C.1
catgcttgaattgctcaagaggcgggaggaagaagatgcattggccctcgtgggagtggctgtctacgccaaaatatcttggcggtatgggtttcagggacttggtacttctcaaactcagatatttggtctgcccctaaacctcgatctgcctctttcacctggcgaatatatggtgaatacccgcttccctatccctgatgatgttactgtcaattcgctcacactggtggagaaaggggatttactcctg

SEQ ID NO: 23388 - DNA, 2502 bp, Oryza sativa
  Clone ID: PAT_MRT4530_28473C.1
atggcggcagatctgggaaagcagattttctcacagataggtcataacatagtaaaaaatgctctgatccaccaatgggtttctttgggtttcattgaggaatcaaacatattctcgactaggcagctcagtgagagatacatcaagcagctcttgggactgtccttccttcaactctcaaaatcacctctgactgctggactgtatcatgaagatgtcactctattcaccatgcatgacttagtgcatgatatagcaagattggtaatggtcgatgaaattttactagataacaaacaagacaactctggtggaatcagttaccattatgcactgctcagtaattgcttcaagccattggagtcatccacaggttacctagcaaagatacgggctttgtgctttacgaactgtagggaattccgtcttagtgatggtgcattttcttctggcaagtctttgcgtgtcttggatttgagtgattgctctatacaaaagttaccagattatattggtcaattgaagcagctgagttcattgttaggtatacctcaagctttacatggcctagccaaactcgaatatttgaatttgtcactgcagaatggagaaatccatcaagataagttacctctcatagggttgccagaagtcattggcagtctaacaaatctgaaatacttgaatttagcacggtgcatggattatgtctttggcagcccatcaacagatcaaactgacagtttcattggtagcatcagcactttttccaatctagaacatctggacttgtctaagaataaaattctctgtagtatacctgaaagtattggcagcctgaggatgctacataccttgaacctttcaggttccagcatgctagcaaggcttccagaatgtttgactaaaaaggaaagtctgaaggttctaaatgtgatgggctgcaaattgtttgaggccaagcttcctcaatccaacttcctcttcacattgccccactttgtggtgcacaccggtgaaggtcaatctagcagcaatcttcctctccttgaacatgcaattcttgatgaatttttggagctcagtaggcttgaaaatgtgaagtccacacaagaggcgcggagtataaaattgattgaaaaagaaagcattaattctctgaatttggagtggactggaggagctgataggtttgtggaggacatgaatgtattgggagagatggtaccaccaaacactttaaagaagtttgtgatagagggttatagagcatcagctttccatcctggtattactttgtgggatttaccgaagtgcaacagcctgccgccttttggtcagttaccaaacctaggagagattactctcggacgtatgcatggcattagaagaattgacaagggcatctatggtggaccgggagcttttcctcgcctgataggatttcacctatgggctatgcacagcttggaagagctggatttcagggacgatcttcaaacacaagtcatgtttcctatgcttcaagacatggaaatttctgactgccccaaagtaaggctgaaatcgagcccacctaatgctggcaactggacaataatactcagtgataatgtactatcatcacgggtagagagatgccacacctctgcttcctcctcttctgcagtggcttgcctgtcagaccatttatgcaagctggtgcctatgcatcagtgggtgttgctttgccacctccctccccttcttcatttacatatcgatggatgcggtgatcttagcagcgcatcgccggagatcatccgagccctctcctccttgaaatcactgatattagaagacaatgaaaaggcagaaggactgccaagatggttgggtgagctcacatgtctacagggcctgagtttagtaggctttcaaaagctgaaggacttggaagggaacatgaggcagcttacttcgctacagtcactaaatctggatggatgcagtatcatggagtcactaccacaatggttagaactcacctctctcgaaaacctgagattgaggtaccgcaaaaatctgaatgatttgcaacagacaatgtgtgacaacctcacctccctgcagccactaacattggaaaaatgcgttagaactccttctctacctgaaaggatgggcaacctcaactctctgaaagaactaaaagacgaccaggcagagcagccaagattgttgggtgggatcacatgtgtacagcacctgagtttagaaggctttcctgatctgctggacttgcaagggagcatgaggcaactcacttcactaacatcactacatctgtatcaatgcgatagcatgacatcgctaccacaatggttaggagaacttgcctctctcaaatggttgacgataaaggattgcggaaagctgaatgatttgcaagagactatgcaacatcacctccctacagtcactagaattggaagcttgccacagaattcactctctgcctga

SEQ ID NO: 23389 - DNA, 411 bp, Oryza sativa
  Clone ID: PAT_MRT4530_28474C.1
cttttttttttttttttttttttttttttttttttttttttttttttttttttttcttttaaccaaaaaattttattaaacccataattaactgggcaaagggcttggcaacaaataaaccgctgctgacactttttttgcccatttttactcggccgaaacccgctttccaaaccctataacccctcctaacttcctccaactggggatctggtatgctcgaaaatggacccaatttctccacccattctttccatgaaggcatggatgcataacaaaaaatttgataagctttgaaaaaaaacctgccctgaaaaataccattacccccttcttaacttcctaaaattaattttttgtattgaaccccagggacaaactataagacccctatcttatgtccctccagac

SEQ ID NO: 23390 - DNA, 192 bp, Oryza sativa
  Clone ID: PAT_MRT4530_28475C.1
atggaagaaaagaaaccagtcggcagcagacgtaggcagcttgtgttgaagatgctgacgcctgttagcggcgacggcgatgtagccagccgtgaagaagatagcatcaattggcgtcataacaggccagccgtgacggcggcggaaacaccagtcagcggcggacgaggcggctggttggtgaagacgtaa

SEQ ID NO: 23391 - DNA, 1221 bp, Oryza sativa
  Clone ID: PAT_MRT4530_28476C.1
atgccgtccgcgatcgcggcgtgcttccgctgcgcgccgtccgcggcggcggcggcgtcggcggcgtccggccccgcggggcccagcctggcgacctccgtctacgagacccacctcggcctcgccgcgctgtcctggacgcgcacctccctcggcctatccctccgcgccgtgctccgcctctcgtccccggccaccgcggcgtctgtggggacgtgcttcgacgaggacgccgacgaggagaccctggccttccgcgtccgcccctggctcctctggcggcggcgcgggacgaggcggttccgcgccgccggggaccgacgcgtcgacctggcgtgggacctcacccgcgcgcgcttcccgggctcgggttcgcccgagccttcctcggggttcttcgtcgccgtcgtcgtcgacggcgagatggtcctcgccgcgggggatttgtcagacgccgcctaccgcaggacgcgggcaaggcgccccgccggcccgcgccccgtgctgctctcccggcgcgagcacgtcgccatgcgcgacgccggccgcggcgggcgcgggcaccggagctgggtgaccgtgcgtggcaaggagcgggagatctccgtggatctcgtgtcccgcggccggggcagggacacggggagcagcggcagcagcagcagggagaaggacagggcggacgtcggcttgtccgtctccatcgacggggagcgcgtgcttcacgtccggcggttgcgctggaagttccgcggcagcgagcgtgtcgacctcggcggcggcgaccgtgtccagctctcctgggacctccacaactggctcttcccccaacgcgagcctcccaccacggacgccgcggcgcacgcgcacgcgcacgcggtgttcgtcttccggttcgacctcggcggcggcggcgaggaggcgtcagagcacgccaaggctctctgcgacaaggccccgaggagagacgccgccggcattctgagaggctacttcgcgcggtgggggcaaaaggactggagcgagaccggcagcgagaggaggaagagggggagaggccggcggctggccaaggcgagctcctcctcgtcggcgtccgtcgcctcgtcgacggcgtcgtgggccagcggctccaccgtcatggactgggcgagccccgaggaggccgagatgcagcgcggcgatggcttctccctcctgatctacgcatggaaatcatag

SEQ ID NO: 23392 - DNA, 460 bp, Oryza sativa
  Clone ID: PAT_MRT4530_28477C.1
cccgggctgcaggttgatatgcatctctcttctctttccttgattacaattatattttgtattcaactatttgcttatgttttcataagttcgttcagtatttgtatagaactatgaatcaatcaacaccattctactttggatccaccacggtctaacgatatatttcttctagagcaaacctggtggcttcttttcaagctatcttatattagagattggcagagtggcagctgggaactttttaaatatggatgtagtaaaattaagcattcaatggatcatattggacatatgtttatagaaatccattaggctgaattctaacttggtaatacatcccaactaggggttcagatttggagaagtttttatttgtgcttgtcgtatcattatgaactcagttacttaaggtgttataatccttacgttcaagtaaggactatcagaaaaatccttt

SEQ ID NO: 23393 - DNA, 180 bp, Oryza sativa
  Clone ID: PAT_MRT4530_28478C.1
atggtgcctagacagatactgagggggttgcgttcactgaaagaatggccggcgccggccaaccggaagccgatgatccatcacgctcagcaccacgcaagagatatcgtgtggtccacacgattacatacgatcgatctatgcagcggccgggccactagtcaaagatacgcaacatag

SEQ ID NO: 23394 - DNA, 1491 bp, Oryza sativa
  Clone ID: PAT_MRT4530_28479C.1
aaaccccgcaaaaaacgcgcaatcccggcggccatgacgccgctcgcccgccgcctgctgcacgcgagctcacccgccgccgccggaggcgagccgggggtgctggcctgccgcctcgcctcccgcgcggtggtccgcttcgcggggccagaggcgggccgcttcctccgctcgctcctcaccaacgacctcctcctctcgtcgtcgtcgcagcagaggtacgcgcccacgcccaacgcgcccgcgcgggcgccgccgccggcgtacgcggcgctgctgacgccgcaggggaggttcctctacgacctcttcctctaccgcccgcccccaccgtcgcagctgctcgaccgcacgggctccgcgccgctgaccggggagaggcccaaggggaaccaggaggatgagggggaggacgagcccggcgaggtgctcgcggacgtcgacgccgccgaggtcgacgagctactcgcttgcttcaagagatatcggttaagatccaaggttgagatagacaatgttagtaaggaattcctgtgttggcaaagatttggacgcaatgtggagcataccggaccttctactcaagaacctgaggcccaatccattggatgggggcaaggtgttgaccatgctgccgagtcagctgcacaagcaccgctagttgagtctgacaaagaagccgatgagcgccattacttgctctggcggatagagaatggagttgcagaaggctcaactgagatcccgaaaggtgaagcaattccgcttgagtacaattttgctggcttgaatgcaatttcatttgagaagggctgctatatcggacaggaacttattgcacgtacacaccatcgtggtgtcattaggaaacgcctaatgccattaatatttgaagatgaaaatgggcaagaactcaagcaggctgttgctccaggctcagaagtcgtggacaaggagtctggcaagaaaatcggtacagttaacactgctcttggcagccgtggtatgggcctgctgagacttgaagaagccctgaagcaaaattcaagccttgccatcaaggataatagggatgtgagagttaaggcgatcaaaccagactggtggccggttgagtggacacagatgcttgagcagcaaagtgctgttgcttgacatcataagttcagaatgttcagttcctcacttgaaatatccagtgaagttttggagagtttaaagccgaaaactaatacaggattccgttacggacctttcagaattcagaggcaatcagagcaatttcagtttagcagcttttgcttatgttctcagtttaacaattgacacagttacttgatcatgttgtctgatgtatgaaggcagagactgttttgttttctctgtcctctccacttgtatcgaccataaataagtgactgtacatgaccaaaccctgaaacactcatttcaataaattactccttgtcaacaaaaaaaaaaaaaaaaaaa

SEQ ID NO: 23395 - DNA, 325 bp, Oryza sativa
  Clone ID: PAT_MRT4530_2847C.1
atgcagctcaacccgaaagcaagaactcatcgaaacaaaactaaagtaaaagggtggcgatgcgccaaaattgtattgaacgtgactttatccatgtgcggcaatcaccttgaagcacctcaatccaacccgacatcacacatcaagttgtattgccgggatcggctacatcggtttacctagtccgactcagactcagccgatcttatcgtagccgatctggactccagccgattcctgctctgttttcaaactcgatctccgcctccgacttcacttcgatctaatcttcttttccgatgccgatattaccaaatttggttgt

SEQ ID NO: 23396 - DNA, 327 bp, Oryza sativa
  Clone ID: PAT_MRT4530_28480C.1
tctttatcgcgagcggtcgccctaccaaggttcatataatacaatttataggttgaaccaactctcaaaaaacacaaaagattggacgccgggtattttatacagcattatggactggtcaccggactatacgtcctaacttataacctgctttcagtagaacagataatgattgaatacccaagttgaacagagcagataacaaggggattactaagtttgaactggcggcttgcacattgcactctgatcctccactagaaactggtgcattggacttggaatgtccgggacaaaaaaatccacacattacattgtgtttctcct

SEQ ID NO: 23397 - DNA, 3144 bp, Oryza sativa
  Clone ID: PAT_MRT4530_28481C.1
ttaattgagttctgttgtttgcagctcagtgcctatgatgtctaggcaggagactacctctcgtatagttggtctcattccaggattgtggttgacacactggcatgcaacttcaagtaccttcagcatctgctcttcatgtcctgtgcctcggagtgttggatccaggacctcaatctgctttcctttggatctcatctcctggacccactcgatgagttcttttgatgcagacaagactggaatgggtcgcctcccggtgagtagttcaagcaggacaaccccaaaactgtacatgtcacctctcagtgtagccatccacccttgcccatactctgggggaacgtaaccaagagtgccaactagttcagttgtgacatgggttttgttgggaaggatcaatcttgataacccaaaatctgcaacataagctttgaattctttgtcaagtagaatgttgctggacttgatgtcacggtggactatgtttggcttacaaacatcatggatataagcaaggccctggcttgccccttgtgcgatcttgagtcgcattggccaatcaagaaatgaactggcatcgttgtccctgttgtgaagccaatcgtccaggctaccattctccatgtaggaatatatgaggaaccttgagtttccctggatgcagtaaccccacagtggcacaagattgtcatgctgtgccatggagagtgcatcaacctctgcactgaattccctttccatcagacacatgtcactattgagcttctttatggcaagcattgagccatcagatagctcacctttgtagacaagcccgtatcctccacaaccgatgatgttctccttgtcaaaattttttgtagccttcaggagatcagtgaatgtgagcttggtttgctccccctttccttgtggtaccatcaccaagggttgttctgaattgaggttggacgatggtgcttctgtcccatcattgctgtatctcctgtttttgctcaagaaacttgtgctcctcaacaaggtaaggagatgagctagcaagacaaggatggcaattcctccaaagaacacaccaaatgtaactgcaagaatggctttcttgatgtgtcgttttttggagatgtatgatgtttgagctgaactgcaatggtttgcaagcataggaccacataattttggattgccatcaaagatagaacttgggaatgtgctaagctgacctacagttggaactggtccttctaggtcattgttagaaacattaaatgctgaaaggaagtgcaatttgttcagtgcttcagggattgtaccagtgagattattgtttgacaagtcaagcatctgaagatttgtgagattgcagattgattctggtatctgtccagacaatttattggagctcaaattgagtaaaagaagtgccttcaactgaccaatctccttagggattgcgccagcgaagttattgatgcctagattgagcactttggggaaagcactgtttattcggtactgaagtgattgggctgtaaaaattggcagctcaaagacttttggtgcaacattgtctgtttttagcattggcatctccattaatgctgttggaatttctcctgaaaggctgttgttcgttatgtctagatagaagaggaagtttaggctgctgatccagataggtatttgtccagttagttggttgtcatgtaaaaataacatctccaaatttgtgagctttgataaccaatgaggtattttcccagacaatgaacaaccatacagggaaagaacctgaagattctcaaaaccatcaatgctatcatctaaaggtatggtttcgtgcatgaagttgatcgcgattatcaaggttgtgaggtttttggagctctgaagcatctgaagtgtactggttatatttgcaagagagttcttaacaagtgacaggaatgataaggacttcagattacctattttctctgacagctgcccacgaaagttgttgaaagataatcgtaatgcagttagattgctacatgagtaaatgctttctgggatcgtcccattgaatttattccacacgacatctaaagtttttagattgggtagtgtggagaagttaaccttggtgagctccccactgaagttgttcttttttaggtcaatggttacaaggtttgtgcagtcactcaacgttgatggcagctcccctgacatgttgttgttgtccagatggaactcctccagtctcttgagctgtcctatggaatgtgggatgctgccaatgaacttatttcctccaagatcaagggtgaccaaatttatgagcttggtgatgccgtcaattgatccttctaactgattgttaggaaaagagaggtgcttcaaagaggtaatatcaaagatctcatatggaatagccccagtgagattgtttttgccagagctgagcaatgtcagtgtggaacaattactgagccctggagggatgcccccactgaattggttataactaatatcaagcaaggcaaatgatggtgcactggcacagaacgaagttggtatcttcccagtaaagctgttattgctggcgttgagcgctacgagactcttcatcacctcccatgttgttgatggaaaatttcctgtaaacaagttgcttgatatgtttagtacctgcagaggccggtcatgggtcgaagatggcagatcgcttaagtctcctgtcaggtagttaaaactgacatcaaggatcatgatgctgctggatgacaccaattccagtggtaagccaccagacagtgagttgtgggacaagttgaggcgcatcaagcctatcaggttgccaagggaaggtgagatgatcccctcaagccctctagtagccagaaacacctcattgactgtcctatttgggttgcaggtgatcccttcccatacacagcagtccgtgccattcttccatgacatgcccaggccaccatcctttgaaagccaagcgagaaactggatcagggagttgctctctttctcggtgcaagaactggtgggagaggccaagaagagcagcagcgcaagagcaagaccaaaggaagttatggggaatctgttgctgtagttcttgttcgagaactggaggggttgcat

SEQ ID NO: 23398 - DNA, 389 bp, Oryza sativa
  Clone ID: PAT_MRT4530_28482C.1
atgctattggaatcattactgagataacgtcagtagctcctatccagacatgcatcagagacggtgaaagcctcaagaggagcatctacatcagtgatgccgataatgtgacaataaatgttgcgctgtggggagaccgagctacaagcttccctgcaaatgacattcttgaggctggccaaaagaggaatgtttctttatctggtaactctgcttgcaagtggtacataaaccttgacaaaccagaggtggctgccttaaaaaacagcatcaaaggaaattatgaaccgataaaatatatcgacctcccagcctcatctgatgctccaaacaatgcagaacaaaagaaaattattgagatcaaggacctgcacccttttaagttcaag

SEQ ID NO: 23399 - DNA, 2623 bp, Oryza sativa
  Clone ID: PAT_MRT4530_28483C.1
cgcccaccctccccgactgtccccccccggcatattctcttccacccccgaaaccactccaaaaccaaaccaaatctcgcggcgcatggcggcggcggcggtggcggcgaacggcggcggcgacggcgcgcaggcgtccaacgcgcccgcccccaccaggctcgcgtcggtctacagcgaggtgcagaccagccgcctcaagcacgcgctccccctcccctccgtcctccgctcccccttcgccctcgccgacggccccgccagctccgccgccggcaaccccggtgagatcgcgaagctgttccccaacctgttcggccagccgtccgtgtcgctggtgccgtcgccggagccggcgtccaccaggccgctcaaggtcggcgtcgtgctctccggcggtcaggcgcccggcggccacaatgtcatctgcggcatcttcgattacctgcaggaatatgcaaaaggatccgtcatgtatggattcaagggaggtccagctggagtcatgaagtgcaagtacgttgagctcactgcggattatgtgtacccctacagaaaccagggtggatttgatatgatctgcagtggtagggacaagattgaaacaccagagcagttcaagcaagctgaagacactgtaaacaaacttgatttggatgggcttgttgtcattggtggtgatgattcaaacacaaacgcatgccttcttgctgagtacttcagggggaagaacatgaaaactcgtgtcattggttgcccaaagactattgatggagatctgaaatgcaaggaggttccaacaagctttgggtttgacactgcttgcaagatatactctgaaatgattggtaatgttatgactgatgcacgctcaaccgggaagtactaccactttgtgaggcttatgggacgtgctgcttctcacattacattggagtgtgctctgcaaacacatcctaatgttgcactcattggagaagaggttgctgcaaagaaggaaactcttaaaagtgtcaccgactacattaccgacattgtctgcaagcgtgcagaacttggttacaactatggtgtgatccttatcccagagggtctgattgatttcatcccagaggttcaaaaactcattgcagaattgaatgaaattttggcgcatgatgttgttgatgaggcaggggcttggaaaagcaagcttcaaccagaatccaggcaactgtttgacttcctgcccaaaaccatccaggagcaacttttgcttgaaagagatcctcatggaaatgttcaggttgcaaaaattgaaacagagaaaatgcttattgccatggttgagactgaattggagaagagaaaagctgaggggaagtaccccgcacatttcagaggccaatctcacttctttggatatgaaggaagatgtggccttcctactatttttgattctaactattgctatgcgttaggctacggttctggggcacttctccaatgtgggaagacaggactgattacgtcggttggcaacctcgctgctcctgtggaagaatggaccgttggtggaactgcattgacatcgttgatggatgttgagaggaggcacggaaagtacaagccagtgatcaagaaggctatggtggaacttgacggggcaccgtttaagaagtttgcttcattgcgagatgagtggtccctcaagaaccattacatcagccctggtcccatccagttcagtggccctggaagcaacgatgcgaaccacaccttgatgttggaactcggcgccgaggcatagagagacacgacgataccgacgtgtaccttttaaattttttgttcttacagttttgaaaagttgagatggaacctcgcagagtgacctgcaggctccatatttgtggagtgctcaataagaggttccattgggagtttctgtggagtagagatatgtgtaccaataataactgatgttagctttgcatgatccattgctccatttttacacagaagttaacttggttttattgtagctctgggttttgttcaactggatgcgacgctataattatgggttttgttcaactggatgcgacgctataattatgaacataaataatccaggttgaggggcggttttggttttcaaaaaaaaaaaaaaaatataaaaaaattaatttataaatttaattaatattataaatttaaaatttttggggggggccccggccccaaattccccttatgggggttgttttccgcgccttaattgggcggttttttaaacgtgtgggtgggaaaacccctgtgtttcccaatttaatggcttgggaagaattcccctttttccggggggggatatatgaaaaggggcgccacccgtttcgccttttccaaacatttgcccaccccttattgtaatttgtgccccccccttttccgggcatttaaagcgcgcggggtggttgtgttttccccacaggggccctatacttttcaggactccttaagcccggctctttggtttttttccttttcttttttgacaatttgtggggttttttcccgaaagtgatttaaaagggggcgcttctttagaggttccactataaggtttaagggcccctctccc

SEQ ID NO: 23400 - DNA, 221 bp, Oryza sativa
  Clone ID: PAT_MRT4530_28484C.1
atgatggacaacggcggtggggtgccgcatcaggatggggagttcttcgagctagtcgagtcgatgattccgctcgaagggaacagtgcaaagcgcccgagtcgtattacagtatattgggcgtcgtatgacaacgtcgcgactgggaaaaccctggcgttacccaacttaatcgccttgcagcacatccccctttcgccagctggcgtgatagcgaagag

SEQ ID NO: 23401 - DNA, 1185 bp, Oryza sativa
  Clone ID: PAT_MRT4530_28485C.1
atggacagcacgagctgtctcttggacgacgcgagcagcggcgcgtccacgggcaagaaggcggcggcggcggcggcgtcgaaggcgctgcagcgcgtgggcagcggcgccagcgcggtgatggacgcggccgagcctggcgccgaggcggactcgggcggcgagcggcgcggcggcggcggcgggaagctgccgtcgtccaagtacaagggcgtggtgccgcaaccgaacgggcggtggggcgcgcagatatacgagcggcaccagcgggtgtggctcggcacgttcaccggcgaggcggaggcggcgcgcgcctacgacgtggcggcgcagcggttccgcggccgcgacgccgtcaccaacttccgcccgctcgccgagtccgacccggaggccgccgtcgagctccgcttcctcgcgtcccgctccaaggccgaggtcgtcgacatgctccgcaagcacacctacctcgaggagctcacgcagaacaagcgcgccttcgccgccatctccccgccgccccccaagcaccccgcctcctctccgacgtcctcctccgccgcgcgcgagcacctgttcgacaagacggtgacgcccagcgacgtcgggaagctgaaccggctggtgatccccaagcagcacgccgagaagcacttcccgctccagctccctccccctaccacaacctcctccgtcgccgccgccgccgacgccgccgccggcggcggcgattgcaagggcgtcctcctcaacttcgaggacgccgccgggaaggtgtggaaattccggtactcctactggaacagcagccagagctacgtgctcaccaaggggtggagccgcttcgtcaaggagaaggggctccacgccggcgacgccgtcggcttctaccgcgccgccggtaagaacgcgcagctcttcatcgactgcaaggtccgggcaaaacccaccaccgccgccgccgccgccgccttcctcagcgcggtggccgccgccgccgcgccgccacccgccgtgaaggctatcaggctgttcggtgtcgacctgctcacggcggcggcgccggagctgcaggacgccggcggcgccgccatgaccaagagcaagagagccatggacgccatggctgagtcacaagcacacgtggtttttaagaagcaatgcatagagcttgcgctaacctag

SEQ ID NO: 23402 - DNA, 192 bp, Oryza sativa
  Clone ID: PAT_MRT4530_28486C.1
atggggagcggcgagcaaactcgacggttccccatgagcaggacgcagcaagggagcggcgaggcatggagcagggctccagttaccaggaatagcggcggtgggattaggaggcgggagcaagcaggcatgacgacggtggcaatggcggtgacgacgttagtggcagttctgacgacgatgacaagctag

SEQ ID NO: 23403 - DNA, 168 bp, Oryza sativa
  Clone ID: PAT_MRT4530_28487C.1
atgtcacagtctgctactcatcgctaccagttcgccacgaagaaactagggctttcttctccagtcctccggttcctccgcaatgcacgcccgaagcgcggcggcgcgagccgtcgccggagggcgacggtgagacgccgcccgcgaccaaccagccaccgcccgaag

SEQ ID NO: 23404 - DNA, 3461 bp, Oryza sativa
  Clone ID: PAT_MRT4530_28488C.1
tttgtttcgtcttcttccccggcctttcttcctctctggctctccgctcgtgttcctctcgcgcggcggagatcgagggggcacaaccgcacaaattccattcgtttcgatccgtacgtttcggccttcccaaaatccccacttccatcatcacagcggtgctgcgggggggggggatgaggatcatgataaagggcggggtgtggaagaacacggaggacgagatcctcaaggccgccgtgatgaagtacggcaagaaccagtgggcgcgcatctcgtccctcctcgtccgcaagtccgccaagcagtgcaaggcccgctggtacgagtggctcgacccctccatcaagaagttatgttctcctcatgccatattgctgcaagcatacactgcttttgaagggctgatgactgaatggacaagggaagaggatgagaagttactgcatcttgctaaactcatgcctacgcagtggaggacaattgcccctggtgttggccggacaccgtctaggtaccttgagcgttatgaggaactccttcatggtgcctgtgaaaaggatgggaattatgagcctaatcatgaacgaaggaaagggcggcctggtgagattcacccgaaacccgagccaaaacctgaacatcatgatgctgttgacatgtctaatgctgatgatgatgaacttcgtagggcagattctcccagagccaagtccacaaggtaacgaccaagtggtgatgctcgaaaggaactctatttcgcaggacggtgacactgctaactgcaaaaatggatctaattaaatgatggtggtattgatacacggaagtgagagagacatagaaagggtatcgattacaatgctgatgttcgttttgataaaagtccgccaccaggtttttattatactgttggtgaggactcaacacatgagcatgcacagttcccaaccattatagaggagttttaagattagagaagagaagacatcgaagcacaattaagaaagcaagactttctcaggagcaaaattatacagaggcaggtggctctcgctgcatttgcacaggcaattaaactcaaggttccttaatcggtcacgaaaaggtccaagttaaagcttcttccaccctgaaactcttatcatttgctagtagggactgcaaacatgggtaatggcggcgatacatctttagttgaggaacttggcgaaggtagtactgccacaagagcattgctttctagttattcccaaactccaagacttgcaatgacgtgggtgcggacgccacaacgaactccagctgggaagggtgatgctattatgatggaggcagaaaatctagcgcgtctaagggagtctcagacccctcttttaggaggggataacccggagcttcacccatcagatttctctggtgttacaccacgtaagaaggaaatgcagactccaaatccaatggcaacacctttggcaagccctggccctggtgctactccaagaattggaatgacaccctccagagatggaagttcttttggtttaactccaaaaagtactcctttccgagatgagcttcgcataaatgaagaggtggatatgcaagatactgctaaacttgagcttcgtaggcaagctgaattgagaaaaagcctacgatctgggtttgcttctattccacagcctaagaatgagtaccagatagttatgccacctatcacggaggaggagaaggaagaagctgaagagaaaattgaggatatgtcagacaggcttgcacgagagagggctgaggaacaagcaaggcaggaagccttgctcagaaagagatccaaagttttgcagaggagcttgccaaggccaccggcagcttctatagaaattctccgacaaactctaattaagggtggtgaaagcagaagcaggagcaccttcgtgcctcctacatcacttgaacaagctgacgaactaataaatgaggagcttcttcggctccttgagcatgataatgctaaatatcctctagatgagaaaactcaaaaggataaaaagaaaggaagcaagcgccaggcgaatgggactccttctgtacctgagattgaagattttgatgaagacgaattaaaagaggccaattctatgcttgaggaggaggttcaataccttcgtgtcgccatgggacatgaaagtgaatctttggaagattttgtgaaagcacatgatgcatgccaagaggaccttatgttttttccaaataacaacagctatggtcttgccagcgttgctggaaattctgataagatagctgctttgcaatatgagtttgaaattgtgaagaagagaatggatgatgaagctaagaaggcttcgcggcttgagcagaaaatcaagcttctgacaccaaggataccaggtaggcttgggatgatgcaccataagcattgcaacatgtaccgagctggtaaactctggtcacaggttcaagatacattcaagcagatggacacttcagcaacagagcttgaatgctttcaagagctgcagaagcaggaacagatggctgcatcttatcgtataagaaatttgactgaagaagtaaacaaacagaaagcattagaacggactctccaaagccgctatggtgatctgttaactagttacaagaggatccaagagcagcttgaggagcataagaggcaactgatgatacaggaggaaatggaagcacagaagcgtgctcaggaggaggaggaaatggaagcacagaagcgtacgcaggcagaggaagaaaaagaagcggcgaaagctgaagaggaagcaagaaagatggatagggctgctgatgaagaagcggcaggaagcaaacaagtcaatgaggatcagatggatgttgacaactctaatgctgatggtgatgaattcgtaggtccgattcccccaggaccaggtactcaaggtgacgacaatgtggtggcggtcgaagagaactctagctcgcagagcggtgatactgctaccacggaagatggatcttgtggcatgatcgacgcatcaaaatcaggaggtcaggatcacatcgacagcaaggatgaacttcccactgttggtgccagtctagatgatggaagtgctgctgcatcttctgatcaagatgtctcaactgaggtgaatgccactgtccctgaatagaatgtcatttcttgtacttcatcttcgagggcggcacagagaaagctaagagggacggataccttgagagaaaaaaaagaagaggcaaattgaatgtccaaagctgtgcactgaatttttattcgctgcttgattgttagtgaacgacaaaatgcgggactaagcttgttgtacaatgttaattttgtcaattcccattgaggactctcagctcttagaattgctacgaaagaatgttagttcgatgtactatctgagaaattgaacttg

SEQ ID NO: 23405 - DNA, 325 bp, Oryza sativa
  Clone ID: PAT_MRT4530_28489C.1
atggctgttgagctggatgagttgtatgaaatgaggacaatatctaggtgctctgcagaggacacaggtacccagtggctctccttcccgtctcgccgacacggcgcaacgacggcggggtgcggcagagacggccgtccctccccctccctccctctccctctccccgtcggcctcgacggtgacggcgccctctcaacggcggcgtcgacggcaacgacagcgtcggcgtcgtctgagggtggatccgtcggcggtggcggccaccgcgggcggatccggcggcggtgctccctcctctgcctctcttcttcctccagcggcg

SEQ ID NO: 23406 - DNA, 313 bp, Oryza sativa
  Clone ID: PAT_MRT4530_2848C.1
gggttccaaaaaacgggaaaaacattgggtttgggggttttaaccgaacccggggtttacacaaagtaaccgaccaaaccctattacaaaggtgttaaggaaaaccagaactaaaacccggaagcggggggggaaaaaaaaaggggaccccctcaagtgggggggggtggtccccccaaattgttttggggctcccaaacccaccccgtttaaaggggggggtttaccccccctccccctaaatacggggggggaaaactggattccctgggcaaagggggacccccccttggggggggggggccaaaggggg

SEQ ID NO: 23407 - DNA, 579 bp, Oryza sativa
  Clone ID: PAT_MRT4530_28490C.1
acgcatagaacttagcacaagtgctcatgataagccaccctgctagcaaacaggagcctatgcctgttgcgtttgtcaaccggcattaggggctatttgctgatgctaacatgttgcagaatgttgcggcccagttggcccaaagcatgctatcgacaaggggcagctttcatgtttataaaggactatatgcaagcttgtgaagcttttgcagatggcttgaagttggaccctgcaaatgaagatatagcgaaagctttaagggatgcccaggaggccatgaaggaccaaatggagcacagaggttgagtgtcagccttatgttgagcctctattttgttgctagctgaagttcgtccttcatcagcaacccaggacattttggccgccaacggacaagcttgtgctcttgcaagcttcagatggcaactcgtgttaatcgtggtcgaattaacaagctccaattgcactcttcacatttcgtagtatgttctctgttctagagactagagagtttaaatgttaactatatatgtggaaactatttcatggtttgtggaaaaaaaaaaaaaaaaaaaa

SEQ ID NO: 23408 - DNA, 933 bp, Oryza sativa
  Clone ID: PAT_MRT4530_28491C.1
tgaggagtcagcaaaaaacataaaattcatactttgcctcttttgaaaatatgtctggcttaaaaatcaactttgataagaatgagctgattattgttggacttgaaaaagaaaaggaactaaattctgttctatattgacttgtaaaatagatcagggtggcctggggattcttgatttatttagatactatgaaagtagcattattggggaagtggctttgaaagctggagaatgatgagggtcttcggcagagtatgttgtatgacaagtacttgaagaacaaaactttgtgtttagataaacacaaaacaggagactcacaattttggtctgggctacttgagagatgagatacaagattttttttttctgaaatattgtagaaaggaagtaaggaatggcactatgactttgatttgcgaagacatatggataggagacaggactttggctgaacaattccgagagttatataatataactttcactaaaatagtaacaatagcaaaggtctttgagatgggttgggatgcctttgaattcagaaggacactaggtggggatatggctgtgaaatgagaacattaataaaagctttgtaatgggaaaattttgcaaaatgggaaagacaagctcatttggacacttacaaaaagtggggtttttactgtcaaatctttttactatgcaatgaagggacacaggtcgtgcaatacttactgcaggggatctcaattggcaatgaagttgcaagatagtggttatccctttaagaaaatctggagattcaagattcctattaaaattaaagtgctcatttggttagctctaaaaaatagtattttgacaaaagacaatcttataaaaagaggatggaggaagggtactgcaaaatgtcagttctgcaacaaacatgaaagcataaatcac

SEQ ID NO: 23409 - DNA, 231 bp, Oryza sativa
  Clone ID: PAT_MRT4530_28492C.1
cacttttaggtttgcgatcagcggcgaggcaccatccgggccgggctgtaatggaaaacacctgctgcttcctacaccagttcacggcccgcgtcgtcgcgcgcgtcgccttcccgtgcccggggacgcgggccaacctcctcgtgtgccgcgcccagaatcatgacgacgccgccgtcctcaggcgggcggtgctggcccacctcgccggagcgaccggggtgggggggg

SEQ ID NO: 23410 - DNA, 345 bp, Oryza sativa
  Clone ID: PAT_MRT4530_28493C.1
atggggcgccagcatgataaaggtgattgtcgagagtggtgtggtggcgggggctatgggagttcgcggcgggcgcacggcttgaggtgggggtgctgccatgggatatccagccgaggtagcggcgatggtggtgttgtgaggctgactggcgacgaggcgctggcacggtggctgcgtgtcgaaggtggacgggtggtgggctgctgtttccggattgacctcgactcgggagagcagaaagatcacggacaaaagcccagccttggggccagtaatgaccacgtctgcgggcaccgcttttcccttgaggcggtggcgatacttttgggtggcatcgtctag

SEQ ID NO: 23411 - DNA, 468 bp, Oryza sativa
  Clone ID: PAT_MRT4530_28494C.1
atggcttctctaccggccccgatcgcttccaccccaggatcgactccgccgtcctcgctgccctccacctcaccgccgccgccgccggcggccaacgccacggaggaccagccgagctccaggcagctcgtctacgacctcgccgtggacctcagcttccggaacgcgcaccgccgcctctccatccgctacctcgacaccaagctcggccccgccgacgacgcgctcccgctcttccgccagaaccccaagaacacaaccgtgctgcacccggcgttccgcggcgtggtggcggtggatggcggcacggcggcggagctggagcgcgaggccgcggaggggacggtgcacgtgaagaaagtccaatttgattcccacaatatagattcgatcagatacggctcccgctcttgcatccctgaaaccaagtatatccactactcaactattaaaactggtgtagaatga

SEQ ID NO: 23412 - DNA, 360 bp, Oryza sativa
  Clone ID: PAT_MRT4530_28495C.1
atggcaaaatgtgtgaagcacaccaatcaaggggtcctgttctttttcttggttcttgtggtgtgctcttctattcctacacaagcaagaggtcaaactgcaagcaagatcggaagcaatatgttgatgggagtaaaaaaggcagccagcattggagttaaacttaatgtttgcgccgtgaccgccggtgggttctattgctgttcaaaggaccagctgtgctatccaacccttgagcaatgccttccaaagtgcaactacaaggaaaagggatgtgctgctaatcaaccaactatggttccaattcataaaaccatgatgggtcgaaaaacaaaaccaagcaatctatctcagaaatga

SEQ ID NO: 23413 - DNA, 468 bp, Oryza sativa
  unsure (1)..(468): unsure at all n locations
  Clone ID: PAT_MRT4530_28496C.1
atggccgccgagaggcgcgatgtgcacgagacaacgagaacagtttccgacatcgcgtctcttcacggcgtcacgataacgaagaacgaggaggccgtaaaaaagaagaccgagaccgtgataaccgccacaaccgctacgatcacgacgatcgcgaacggcgggtgctggncgatactggtcgagaacgccgccatancgacgacgacgacgaagatcggcgccgagacaccaacggaagacgacgacaggattctcgagaacccgaccgacgtcctcgtaatcgtacaccggaaccaagtgacccatcgtcatcgtcgtcatcttcctcatcctcatcatcagataggtatccacgaaggacgtacgaccgccgacaacccatcgcccccagcgctggttgaagagctttcagtcgttcactgcgtgatgtctgatggcctgagagatttcgaccaggagcaatag

SEQ ID NO: 23414 - DNA, 1824 bp, Oryza sativa
  Clone ID: PAT_MRT4530_28497C.1
atggagttcgccgtcggcagcgggagcgtgcgtgatctgccgccttccaagcggttcaagtacgtcggcggctccagtctcgggatggcgccgtgcctgccggcgaggaagcggttgtgcccgccgatgctggaggcggcggcggcggcggcggcggccgtccccgtttgcctcccggcgaagaagcgggcttatgcggcggcggcggcggtggaggggggcggtttcgctctgtgcctcccggctaagaagcgcgcctatgcgccaccggtggatgatgccgtcgcgccggcgtgtcttccggccaagaagcgcatccacgcgccgccgccgccgccgccggatagtggtgcttctccctcagtcccgactacgaagcgcgtcgacactctgccaccggcggcggcggataaggctgctatttctccgagcatcccggtcccggtcaggaagcgtgttcacgcgccgcaaccgccgccggcgccggcgccggagaaggcggcggtttctccgagcatcccggtccctgctaagaagcgcgtcagcgcgacggcggcggcggcggctactgacgcttctccccgcgtcccgttcaaggatctcgtcaacaccctgccgccgccgagagacgccgccgtttctccgagcatcccggccaagaagagcgcccgcgcgccgccgtccccgaaggacaccgccgctccggtctcggtttgcctaccgagcaataagcgcgtgatgccgccgtttctcccgccatcgccgcctccatccaaggagtcggatggagctcgcgtcgccgctgttaaagaagccaagcctcaaggatccaataaacgtggcgccaccaccaattcgagcgtggcaaatggtgtggaagatgattatgcaagagctgaagcatccaagattcaagagaagcccaagattccggagaagcctatcaatcatgaagaaatcaaggagcaagtgtcgaagaaacaaagatcaaacacttgcagagaatcgaaagatcaggaatgcaatcaatcctgcagtgctattagtgcgaagcaatctgaagtcgaagcactcgagaaagcttgcaaagcgattgatctcaacgaagcagcacgggaagaagactcctgggatggagagagagtggcgcgagagccaacgcaagaggccatggcggcggcggcggaggaggaggtggaagaggaggacgacggcgtgcactgcgcggtgtgcgggagcaccgacggcgacccgtcggaccccatcgtgttctgcgacgggtgcgacctcatggtgcacgcctcctgctacggcaacccgctcgcctcgttcatccccgacggcgactggttctgctccgtctgcaccgccgccgccgccaagaagagcaagggcaacaagccgccgccgccgccgccacgctgctgcctctgcccggcgaggggcggcgcgatgaagcgcacgacggacgcgcggtgggcgcacatcgcgtgcgcgctgctggtgccggaggtgttcttccgcgaccccgacggccgcgacggcgtcgactgctcccgcgtccccgcgcaccgcttcgccacggcgtgctacgtctgcgagagcggcggcggctgcgcgctcgagtgctcgcagcccaggtgcggcctagggttccacgtctcctgcggcctcgacgccggcctctgcatcgagtaccaggaggccaaggccggcggcggcggcggcggcgtcgtcgccggcttctgcttggagcacaccaagctctgggaaaagcaacaattgacaggcaagtacaagattgtgtcaagagggcagaaatga

SEQ ID NO: 23415 - DNA, 557 bp, Oryza sativa
  unsure (1)..(557): unsure at all n locations
  Clone ID: PAT_MRT4530_28498C.1
attccgcggagcgctatcctctctcgctctctttattagttcgtcttcctccgcccatctctttcgttctctccgctgtgtttcgttctcttgaatttctctccgatttcgttgtggtcgctgatgatgggggatggcagatccctagtcccccccccaccccccccccccaacacccccaatctggtcgngctacccttcatcaacggaggccattctgccccctcaacggagcgttctggagcaggctctgcgcacccggccctgagatatcgcccgccgcgcatggcatggcctgtgcacatagaggaaccaccagatcctcgcgctcgaatctacgccgccataccgtagatagctaccccatcaccgaccttgcgatcatcccctgcgactccgatacttgcaacactactcttcaggaaaacttactctcgcagtacccagctctcccttaggggacgccttgtcggcgccatagttccagctgttactgacctgcgcctcaatgctgggtgatctggcctggctttgctccgagtcattaccccctgcct

SEQ ID NO: 23416 - DNA, 1566 bp, Oryza sativa
  Clone ID: PAT_MRT4530_28499C.1
ctatccccccctctctatcccggactcgtacagaacggcgagcggcgggcagaggggagcagtaggcggagcgacggcggacggtgggcggagcatctcgcggcggccaagcgaggaggggtagctcacgtgcgggcgaagaaggaggcggcgcgcggtggctgggcgagaaggggcggcacgcggtggctgggcagcacaagcggagcagccgacggcgtggagctgcatgcttgtggagctaagccttgacttggattgcagcgggaacaccactccacaggcatcctcgacagcacggacgaagccgggttctcggaccgggagggaggcgggcaccacgtggtgctgacgtggcgccgacgtggcagccacggcggggcagcacgcggcggcgcgcacggacgggttaagccggcccagcgggcactcggcgacggtgcggcaccggcggcgaccggcggacggcggcggcgatgcggtagacagcggcggcgcggcggtggcgacggcgaacggcgcggcgagcggcggacggcggacgactagaggcggacgggcttcaagagaaccggcgcgcaacgaaggaggagttctggcggtagattccgacagaggagaggtggatgaggcggcccgcacgacggcgaatgtgacggcgtcgacggcgcggctcggcaacaacggcttgcagcgaccggagcggcggcggcggtggcggagaggagggcagcggtggtggggaggcgcgggggaaggcggcgacgtgggcgacgtggcccgggaggcgagggagaggcgggagtggtggttggggaggccggcctcctccttgggtactgcctgagctgctcggacttggtccacgagcgtaagccgtgcctccagggcagccacgtacccatgttctacaattcccaagttgagatgttcaagctcttgtagcaacttgtcactcatgtctccaatacccaaggcgttgcagtagcttttcctgctcagagcatctgctaccacattagctttgcctggatgatagtgtatccccatgtcgtaatattttatcaactctaaccatcttcgctgtcggagattcaaatcaggctgggtgaagatatacttcagactcttgtgatccgtgtaaacttcacaacggttaccgatgaggtagtgccgccacatttttagagggtggaccactgctgccaactctagatcatgagtagggtaattgctttcatatgggcgcaattgccgcgaggcgtatgcgaccacttgaccttcttgcatcagaacacatcctagcccttggcgggacgcgtcgcaatagacttggaagtctttcgtctgatcgggcagaatcagaactggagcagacactaatttcttcttgagctcctcaaaactcttgccacactcggctgcccacttgaatttctcgtctttcttaagcaactgaatcataggtctggcaatcctctgataaccagaagtcgcatttgctgaacttggcacaaagctggtgctcttgcaacttcttgagtaccagatgaagatgttgctcat

SEQ ID NO: 23417 - DNA, 2404 bp, Oryza sativa
  Clone ID: PAT_MRT4530_2849C.1
cccacccccgcgcgacgccacgccacgccaccactcgccgcagcgccgcgcccaaatcccccaaaaccctagcgcggcgagcggagggagagagagagaaggcgcgccatggcggctgcggcgacagcggcgaacctggccggcaagcagggcgtgcgggtcgtcgtcatcggcgaccctggcaccggcaagtccagcctcgtcgtctccgtcgccaccgaggccttcccggagaacgtcccccgcgtcatgccgcccacccgcctccccgccgactacttccccgaccgcgtcccaatcaccatcgtcgacacctcctccagcccggagcacagggcgaagctgatcgccgagtgccaggcggcggacgcggtggtgctcacgtacgcctgcgataggcccgccacgctggagcggctcagcacattctggctccccgagctccgccgcctccagttaaaggcacctgtgattgtcgtggggtgtaagctggaccttagggacgagcagcaggtcagccttgagcaggtgatggcgcccatcatgcagacattcagagagatcgagacctgcattgagtgctctgcgcttcgccagatccaggttcccgaggtcttctactatgcccagaaggcggtgcttcacccaacagcacctctatttgatcaagaggcgcaatctctaaagccacggtgtgtgagggctttgaagcggatttttattctatgtgaccatgacagggatggagcactcagtgatgtggagctcaatgactttcaggtcaaatgcttcaatgctcctctccagcctactgaaattgcaggcgtgaagagagtggttcaagagaagatgcctgaaggcgtgaatgacaatggccttaccttgactggattcctttttcttcatgctctttttattgagaaaggacgactagaaactacatggactgtcctaaggaagtttggttatgataatgaaatcaagcttagagatgaccttattccaacaattaaacgagcgcccgatcaaaccctggagttgacaggtcaagccattgatttcttgagaggaattttcaatatgtttgacacagataatgatgatgctttgctacctgctgagctggatgatcttttttccactgcacctgaaaacccatggtctaataatccatatgtggactgtgctgaaaggaatgtcttgggtgggttgtcccttgaaggatttctctccaagtgggctcttatgacacttctagatccagcaaatagttttgccaaccttatatatgttggctattcgggtgattttggctcagcatttaccactatgaggaaaagacgagttgatcgtaaaaagcagcaaacgcaacggaatgttttccagtgctatgtttttggtcccaggggtgctggaaagacagcattgctacaatcattccttggaaggcaaccttctgatgctctgcctatgaatggtgaacggtttgcagcaaatactgttgaactatctgggtccagaaagacacttgtatttcgagagattcctgaagatgatgtcagaccattactggctgatagggaatccttggcaccctgtgatgtagcagtattcgtttatgatagctgtgatgaattttcttggcaaagaacaagggatttgcttgtggaagtggctacacatggagaaaatactggctatgaagttccttgtctgattgttgctgctaaggatgatcttgaccaatctccattggctctgcaggaatcaacgagagtgagccaagacatgggaatcgaaatgccaattcctattagcgtgaggttgagagatttgaacaatattttctgtagaatagtccatgctgcgcagcagcctcatctgagcattccagagactgaagctgggaaaacacgcagacaataccgtcaacttctgaaccgttcccttatggttgtctcagttggagctgccgttgcagttgtgggaatagctgcttaccgagtctatgcagctaggaagaacacatcgtcttgaagctctcctggacagtgctgaaataaagtgctttcctcctttcactgcccatcaaccggatcttttcagataattttttacttctgagcttcataacgtgaaactttgtccagagaacccttttatgtacagatgtgttttcagcaatcaatcgttctgcgtattggatttcgcattttgcggctataattatgtagctgataaactgctatgactaaactagctctggcaaaacattagtactgccgtacaattttgttcttttagcaaatgtgctgttactatatcatgtctcggttctttttttaattaatggccctggattcttttggcattgagaatgatatgtcagattgtcttttttacc

SEQ ID NO: 23418 - DNA, 813 bp, Oryza sativa
  Clone ID: PAT_MRT4530_284C.1
atggatagtgggcggcggcgtgctggggcggacgggcggagggtgttggaggcgacgggctacggcgacgagtcctcggctcaagcgggcgctgccgaggcggctggcgatgaatcctcctcggggagggcgcagcgagcggcgctcgtggcgcagagggcacggtgggtggcgccaaggagggcattggaggcggtgcgctacagcgacgacgtcgccatgtgcaccgccgctcgctacccagctccgccctccgcctccgcatctcgcactgtggcggcgggtcttcgttgtgggaggagaggagcagcaggagacgcgcgagacgagggcggcgagaccggatgcgggccatgcggcctccacttccatcgacgtgccggagggcggcggggcagcagggggaagacgaagcagattgagcgccacttcaccgccttccgctcctgccacgacgccctccgcctccaccctcgccaagtcgccgtcgccctctgccatggccagaccaggccgctgcttgtcgccgccgccatggatgaggctgctgctgtggcgcatggggcagatggaagggtcgacgaggatggacggccacgcgtttcagggaggagtggcggctcgggccagcacgcgatggagtcgggcgcgggcaagcgcggcggctccgtcagcacggcggccccgcggccgaggagcggcggctccgtcggcgcgtcggcgtttgctcggctaaaaactctgggttattacatgctttccataagttgtgagagcaggctgcaaaaacaaatagggccagctttgaggtga

SEQ ID NO: 23419 - DNA, 185 bp, Oryza sativa
  Clone ID: PAT_MRT4530_28500C.1
gtcaagggacaggatgggaacgaggtattcttccgcatcaagagatctacgcagtctgaagaacttgatgaacgccctaatttgtgaaccctcattcttgttggaattaattgaaatgcttattgccattcctaatttgaatggttccttaaggcttcccttggccggaaccaaaaccccctgaa

SEQ ID NO: 23420 - DNA, 1386 bp, Oryza sativa
  Clone ID: PAT_MRT4530_28501C.1
tatcgcgaatcacataagagttcaagccaaagctaagaggccatgagatcagctatggctactgcatcggtggttacctatcttcagaggccgagagagcttccggtgccggagttccgggcaccgccgccgtctccggtcaccggcgtcctcacgagcagtagctccggctctcttgcatacggcgagtgccccgatagcaacgaagacgacgagatcggcaggttcttgcgccgctccgccagagtcccggtgctgcggctgccggagagggccgtcccgcggaagaagaaagcggcgtgggcacctccggtcatcgacgtgcgcctgctggccttgccggaggccggcggtccggtggcggaggcgctgaggtcggcagccgtcgcgtttggctgcttccaggtggtcggccatggggtcgaccggagcttggtctcagcagcgttgcgtcatgtggcagctgcaactgcaagggcagcgacgccggagccggaggaggtggaggtcaacggagacgatgagaacggtgaggagatgtggtggtcgcctggtgacggaggccaagaaatggcgggaaattgggcgctccaaagtggcgccagccacttcaggaacacagcagacgctttgttcattcagctggagcaaaccgcaaccaaaataatggacgtcctgcagcgaggcggcgccgttgccacgcaatccatcgccggagctgacacaaacggctcgctcctctgcatccgcaagcaccgccgcaggcaagacgaccgcagcggcggcgcctctggcccgatccgccacgacgacatcctgaggatgctggtccggagctcgcggtgctcgcgggccctcgccctccacctctgccccggcgcctcggcgttccacatcttctcccggcgaggctggtccagattcaggcccatggacggcgccgtcgtcgtcaccgtcggcgaccagctccaggcatgcaacggtgggctctacaagagcgtggccgggaagccagcgtacagcaatgacgacctccgaggaaacggcggcgacaccggtgtcgcctccgcggagttgttctactgcttcccttcggccggcacggcggctggcaaggcgagcgaggtgttgagcgcggatgccggcaagatcatcccgttgaacctgcagttcatggtggctgcttgccttgtgcttggataccactttctcctgtcaagcttgcattcgacttggttgttgtgatttgtgaaatacaggacctgttctctgaatatgcaactcggctttgtctgtacagtttttgtcagtcactactgctcactactcaacttggtgcctggaaaaaaaaaaaaaaaaaaaaaaaaaaaaaaaaaaggggggggc

SEQ ID NO: 23421 - DNA, 447 bp, Oryza sativa
  Clone ID: PAT_MRT4530_28502C.1
acgccaccacgcgcgcttttaaatggtgtggatccaatacctgtcaatagagggcttgttggcgcctactcattgacaaccagcaaaggcgagaaggctgccattgcgaagccaaatgacgagagagccatttgcaccgaacaattcatagggctttacagggaaagcccttgggcagcctggccttaaaagatcggctcgagttgaggagactggcttagagagggcgctgcctaccttgggtattatgagaacactgctaatgggccgcgaacggcgcctgcgaagatccctcatcctgtaagcaatgcggatgaatgggttagtccagccaagatggcggcctcctagggcttgtgcaagggcctgaacgccagattgcatcatctcagcagttgattcctcatgattttgatgcccgtggccatgggacttcaagcttttctg

SEQ ID NO: 23422 - DNA, 634 bp, Oryza sativa
  Clone ID: PAT_MRT4530_28503C.1
aaacgatcagagaaccagagcacttacgttggagatgacttgacccgataaatgatagcatgactagcacacgcacgattacaataaacgatcctaggaagggggaacatatgccatttttcttttggtcctaccgctaacgcacaaacttactatgacaaaaggtggaccattgcatgccttgtataatacacactacaccgaacaaacgcccacccagagttgaaaaggggcaaattattcagtcatgaaacaaatgaacaactttttgataggacaccatcaatcgcccgcagaatgcttaacgtgacacgggattgagaaaactgaaaagaaactgccttggagataaccgattaacaagccgtagcttataagcacttccggggaacaattgcgggaccggacttatcatactctcccttggagatccacatcttgttgtaaggtgctaagggaggcaaggttggaccctcctatccaaacgctggatcagctctaatgcggtgccaccaccttgatcttcatgctgcttggtgcgagggcagtggtctccttgctcatacggtcagcaataccaaggaacatgggtgatccacctatgcaaacatggttaccatacatgtccttcctg

SEQ ID NO: 23423 - DNA, 353 bp, Oryza sativa
  Clone ID: PAT_MRT4530_28504C.1
atgccgcggcggcgtcgtggcgtccgggcgtcgtgccgccgcggcggcgtggcgcggcccggcgtcgtggcgcggcttcgtccgcactgctggcgcgacatcgttgccggtggcggccgcatcgaggtcggggtcggcatcgtcggcgcggcggagtcgtgtttggccgcgacgacgtcagaggcggcggcaacgagacggctggcggcgagatgcggccgcggcggaggtggcgacaacgacgcacgtgagacgacggcgagatacgacggcggcgtcggcgcggggatgccccaggcagtggcggcgaaggagaagccgagagagagatcgatcggggaaaaaacttctaa

SEQ ID NO: 23424 - DNA, 1419 bp, Oryza sativa
  Clone ID: PAT_MRT4530_28505C.1
atggacggtcgtcccttgcttccgaatgaggaggaggaggaggcgctccccggcgtgtccgacttccgcgggcgccccgtttaccgcgccacctcaggcggctggcgctccgccctcttcgtcgccgtgttggagttggccggcagcttcgcctacttcggcgtgtcggcgaacctgatcacgtatctgacggggccgatggggcaatccaacgcgtcggcggcggcggcggggtacggcatgctgacggtggcgtcgtcggtggtggcgtccaagtcacaggtgggcatcttgtacgtgtcgctgtacctggtggccttggcacaggggttcgacaagccatgcgggctggcgttgggcgcggagcagttcgacccggagcaccccagggagagcgcctcccgcagctcactcttcaactggtggtacttctccatggccaccggcatcaccgtctccatcgccaccgtcagctacatccaggagaacgtcagctggggcgtcggcttcgccatccccttcgccgtcgtctcctgcgccttcctcctcttcctcctcgccacccccacctaccgcctctcctccgccgccgccagccccttgctctcgctacgacactacaagcagtcgtcggaggaggcgcgccgcatgctgcgcctgctccccatatgggcgacgtgcctggcgtacggcgtggcgtacgcgcagatcatgacgttgttcaacaagcagggccgcacgctggaccgccacatcggccacgccggactggagctcccgcccgccgcgctccagacgttggggccggtcaccatcatggtgtccgtgcccatctacgaccgcgcggtggtgccaatgctgcggcgcatgacgggcaacccgagggggctgaccacgctgcagcgcacggggacgggcatggcgctgtcgctggcggcggtggcggtggcggcggcggtggaggggcgtcggctggagacggtgcgggagcaacggccggcgatgagctgggcgtggctggtgccgcagtacgtggcgatgggggtggcggacgtgctggcggtggtggggatgcaggagttcttccacggcgagatgccggaggggatgcgcagcctggggctggcgctctactacagcgtcatgggcatcggcggcttcatcagcagcgcgctcatatcggcgctggatggcatcaccaggagagacggcggcgacgggtggttcgccgacgatctcaaccgaggccacctcgactacttctactggctgctcgccggcgtcagtgccgcggagctggcaatgttcctctgcttcgcgcgctcctacgcctacagaaacgccaacaaggggcccctgctgcttgttgtaccatctaatactccggtttctccttgtacaaatcatcatcatgcatga

SEQ ID NO: 23425 - DNA, 327 bp, Oryza sativa
  Clone ID: PAT_MRT4530_28506C.1
tgcgtgtctccttcctcctcgcgagctcgccggccgcctcgcctgcgtcgatctccagtgggcagcggcgccggtgtctgctgcttgcgccgtatactcgcccgctgccaagagcacccctggtgaatttgcaagatcagttgggagtaaggacattctggatgctgtaaaattggtttttataagcagagcaggagatgaggctaactgctgggcaagtgcatcgacatgagcttgcattggcatctttgatatcatgcttggaccttggcgacaacctcccattgagaatgctttgaataccacgagcggtttgatttcaccaga

SEQ ID NO: 23426 - DNA, 1827 bp, Oryza sativa
  Clone ID: PAT_MRT4530_28507C.1
atggacggtcgtcccttgcttccgaatgaggaggaggaggaggcgctccccggcgtgtccgacttccgcgggcgccccgtttaccgcgccacctcaggcggctggcgctccgccctcttcgtcgccgtgttggagttggccggcagcttcgcctacttcggcgtgtcggcgaacctgatcacgtatctgacggggccgatggggcaatccaacgcgtcggcggcggcggcggtgaacgcctggtcgggggcggcctgcatgcttcctctcctcggcgccttcctcgccgactccttcctcggccgctacccatccatcctcctcgcctgcaccctttacctcctggggtacggcatgctgacggtggcgtcgtcggtggtggcgtccaagtcacaggtgggcatcttgtacgtgtcgctgtacctggtggccttggcacaggggttcgacaagccatgcgggctggcgttgggcgcggagcagttcgacccggagcaccccagggagagcgcctcccgcagctcactcttcaactggtggtacttctccatggccaccggcatcaccgtctccatcgccaccgtcagctacatccaggagaacgtcagctggggcgtcggcttcgccatccccttcgccgtcgtctcctgcgccttcctcctcttcctcctcgccacccccacctaccgcctctcctccgccgccgccagccccttgctctcgctacgacactacaagcagtcgtcggaggaggcgcgccgcatgctgcgcctgctccccatatgggcgacgtgcctggcgtacggcgtggcgtacgcgcagatcatgacgttgttcaacaagcagggccgcacgctggaccgccacatcggccacgccggactggagctcccgcccgccgcgctccagacgttggggccggtcaccatcatggtgtccgtgcccatctacgaccgcgcggtggtgccaatgctgcggcgcatgacgggcaacccgagggggctgaccacgctgcagcgcacggggacgggcatggcgctgtcgctggcggcggtggcggtggcggcggcggtggaggggcgtcggctggagacggtgcgggagcaacggccggcgatgagctgggcgtggctggtgccgcagtacgtggcgatgggggtggcggacgtgctggcggtggtggggatgcaggagttcttccacggcgagatgccggaggggatgcgcagcctggggctggcgctctactacagcgtcatgggcatcggcggcttcatcagcagcgcgctcatatcggcgctggatggcatcaccaggagagacggcggcgacgggtggttcgccgacgatctcaaccgaggccacctcgactacttctactggctgctcgccggcgtcagtgccgcggagctggcaatgttcctctgcttcgcgcgctcctacgcctacagaaacgccaacaaggggcccctgctgcttgttggaaagaggaggctgtgggttgagtggcaggcctcggcatggttagctattgctgctaggcgcgacagggaaagggcgtcgtggcaatggaaggaagggtgcgacgacgacgagggcaggaggcagaggatggggagctcctttgctggacgtagctggcgacggaggatagacaacggcgacccccagcctagatgcttgctgcaatggaggaggaggatgtgcgtcggcgaggaggcgacggagatggaaatcagcaacatatgcgatagagactacttgaaatcagcagtggacgtacggtggcaacgtgaggaggggaccctggcgcctggcgcttgctag

SEQ ID NO: 23427 - DNA, 206 bp, Oryza sativa
  unsure (1)..(206): unsure at all n locations
  Clone ID: PAT_MRT4530_28508C.1
gtgagatgccatccntgacacccccagatgatgagagtataaggacactttacatnggtggccttgatagnngagtcacngagcaggatttgaggnatcaatttaatncccatggtgagatngagaccataagaatggtttcngcagcgtgcttgtgcatttgtnacnnacaccacaagagnaggtncngagaaagctgcagagga

SEQ ID NO: 23428 - DNA, 365 bp, Oryza sativa
  Clone ID: PAT_MRT4530_28509C.1
gatgagaaaaagggaagggggggggcagacagacaaaaccattcgggcggttccccacccaaacaagcaaccggaagcaagaccaccccccctccctagccccacaccaacaaaccccccccccccccaccgaaaggaaaacaccggacagccaaacccacccaaaaaaggaaggcggggcgaaacaaaccaggccagcgaacccacaagacagggcgggccaccccacaccaagccaggaccgttccttttccaaaccaagcaagcctgggcccgcccgacccggcccggcccgccccccccccccaaaccaatcaaggcacggacccccactgctggctggccccccccccccccccctccgg

SEQ ID NO: 23429 - DNA, 474 bp, Oryza sativa
  unsure (1)..(474): unsure at all n locations
  Clone ID: PAT_MRT4530_2850C.1
ctccntggtacnnagttcgagngccncngggtttncngctngaattttncttngntnctaatcntttnttnaagaactnggtgcttaccaccacataccccatgattgatnaagatgaaccagntntggncaacgccnttggtactgaaattgaatggttncntgcgnagtgtttgnnacangnggttntngngnagnaacctgcgaatggctntccnnacgntaaacctatnnccnnnactgnacactgtgncngcttntttcncttnttnngcccnccanaagttnntgntgatgntnaggaaattgntnacgntacagctgnacagttgcccaacccctggngcaagattatnnccttggatctaccatnngcngaccnntnattncnnctgctgtanntggtttgctggagaggctgntnnacatcaggncttnnaaggcattatggatcatgnacatcatnaccatnaa

SEQ ID NO: 23430 - DNA, 541 bp, Oryza sativa
  Clone ID: PAT_MRT4530_28510C.1
tccgggctgacacttcgcgctctcctgctcaaacaacagcgcttatcccaaataagagttcttaaggcagcactatagcattgcggcaagccccttcttgcaatcagctgagttatcaactgaaaaaacaaccagatcttgcaacagctcaggctggcggcgcaacaatctcactaccagaacattaacgttggccacaccatagcgcacacctacacctccagcagtttggcgatctatacattgaccggaatctggctcaagcgcaagcactgctggcttttaacttgccatctacatatgggatctaccctcaggtactactagtagccaccgggctcagtcatctacccacccctctgtgcgcgtgttcatctgtcacgtggaattatatcacacatatatgcaagcttccggaaggtgaaaatataagctcaggtatcattgcatgtgacatatgaaacttacagtgatataaatagaaataaaattatctttcatatttcaaaaaattaatggggaaagatggacatgggccggg

SEQ ID NO: 23431 - DNA, 480 bp, Oryza sativa
  Clone ID: PAT_MRT4530_28511C.1
accaaatctggttattgacatatactgtgatacgacggttaacagcgaagatagactgtttacatcatttggtgtacctgttctgatatgttacatcaactacctaaatatgtgcttctgaacataaaggtgaaacaggttcctctaaacagtaaataactactacatctgaatataggtgtagcaagtatacatgacaacctattgattgttggctatgtagtgtaaaaattcaactaaacagacatggtataaaatgctgaagttagtactttacagtacaggagacagccaagtccaagtagtggtcaccattcttattgctctgcgaacaagctacttcagggaggtggttggctattctccggagaaggtatccatcagattgcctaatcaagatatggcatttggaatggaatacaactaatggttctcaatctttacgtcatccacttgagtcagagatgagcacgtttgatg

SEQ ID NO: 23432 - DNA, 273 bp, Oryza sativa
  Clone ID: PAT_MRT4530_28512C.1
ctagccctgcgtcgagctctggtcgccgtcgacgcctggggtcccctgtgctggctcttccatagcagctagttttggccccaccagctggctacggcgcccagcctggcttgatcgcgggtaaagattgttgactaaggtatgggctaaactcccgagcccgcagtgcctcggagaccgggaggaaagtgggaagttaaggcgacgtatgaacgtgactaaactcccaccgcccaactcccagaatgataggacagaagatcgggcccgcat

SEQ ID NO: 23433 - DNA, 315 bp, Oryza sativa
  Clone ID: PAT_MRT4530_28513C.1
atgagaacagattacaaagagagtaaccgaacagacaataccgatgagatcgtagtcgagggactcgacaagatctcccggcgagttggctccgtggactccggcttcgtaaactttggtggaggaggtggttccgagttccgaccttccggcgtagtggcgacaaacaatggacttccagtgagcttgcatcagaacatagtcacgctggcgaagcacgcacaaactcgttcgatagctgcaccagcactagcagcaacaaagcatgatgcaccacgaagccggcaaggactggtggaaggctgggagcatcag

SEQ ID NO: 23434 - DNA, 133 bp, Oryza sativa
  Clone ID: PAT_MRT4530_28514C.1
gcgccttgtcttggttgatggcaaggtcaggactgacaagacggacccagctggtttcatggatggcatttccatccccaagactggtgtgaactacaagcttctgtacgacaccaagggacgtttccgcctt

SEQ ID NO: 23435 - DNA, 333 bp, Oryza sativa
  Clone ID: PAT_MRT4530_28515C.1
atggagatgggcaaatacagcagcagcgagaggaagaagggccccgagaaggacacgtccatcaggtcggccaccgtgtccttctcgtcctcctcgtcgtcagccggtacacgcccttcttgctggcgtagcgtcgtgacgaccgcgaccgcgagacggcgctgctgcggcggcgacgagcacgacacggcggcgcgcgcctccgtcctccacggtgaccaccacctcggcggcatcggcaagaaggtggacgcgagcgcgggcgcgggtgtcaggacgctcgtcgagcgcaacgatttctactgccaggaatgcaacacgcacggcaaatag

SEQ ID NO: 23436 - DNA, 155 bp, Oryza sativa
  Clone ID: PAT_MRT4530_28516C.1
gcgcgtcttgacgcggaacacgccggagaccgggggcgatcgctagtgtcggccgtcccaccggccctactgtcgccaacgaagcggaggcggagcgcgccagtggaaactgcgcggatcgacaggatggcggaggtggggctaaaacccggcgg

SEQ ID NO: 23437 - DNA, 304 bp, Oryza sativa
  Clone ID: PAT_MRT4530_28517C.1
gtccgtacgctttctcggactcgtggacagacgcgtggtctgtcagtggatctgggtatggtgcgggctgtggaagctacaatggcggttctattcatacaaacgcttaggctgaaccttctcaaagtgccaaaataacaacgtgactgatgtgactgcttaagaagaaaacatatgtttgtgcagcctttaaggatgagagcgccactgcaatccttacagctctgcactaggatgatgtttcggtgttcagccgttgcacatggtgatgctgtttcttagattgtaactgaactttatcatc

SEQ ID NO: 23438 - DNA, 453 bp, Oryza sativa
  Clone ID: PAT_MRT4530_28518C.1
atgcgaagatcaggtccactgaaccagttcaagctgggttactcgtatcttctctcctttgttactctgtcctcttgctacaaggccagagacaaccacacgggaaaaggagaggtaggaaggcagagcagaggtagcaagaaaccagcggagcagcgaggtccgagcgacgagcagtggagaggtggtcgttctcccggaacgacgggaggagtggctgatccaagcgaagccggtggccgatcgttagggcggagaagcgctgaagcggtgatgctggtggagggaggcgaagccggtgaggagacgacccttggtgcacacagcggcctgcatacaacgagggccgatggagaggtcaaggaggcgacgtcgggtggcgaggtggagccgcctgatggcccatgggtgggtgaggtagtggtgctagtgacagggatcctagaggtgtag

SEQ ID NO: 23439 - DNA, 801 bp, Oryza sativa
  Clone ID: PAT_MRT4530_28519C.1
atgggtgcgaagacagacaaaggcaaggttcgacgatcacaaggcagagggtttgggtatgggcacccattgccatcggtcgttggtctccctgtagccgaggcaaagaggaggataaaacaatgcaggccagatgtctacattgaggtcctttcggagaaacttggatgtgatattggagaggtggcctttcacatactcaactactttgggtcatatcgacctatgtgggcttctctgcttttcggccccaaaaatatcaggcttctgtaccgggcagatcgagttatggctctggcaataggaatcagacgaggtcacaggtacaggcgcctcgccaagtgtaacaagagacacgccccgttcttgtctcgtaccgactctgcttcggacggccgttcaccagttctgctcctgcatccttttgccatcatcagtgccttctcgaagtgcagaggaattattaaagcacctgaagatgagatgaccgcatacttccaacatggtttggttcacgcgaaacgttggattggttatcgtttcgcggtctcttctggtcgatttggtgggttagcgggtgattgtggaacaagtcgggtgcagggtgctagtggtttccgtaagcagctcgacttgacaacaaatttcgccacccaatccgtaatagagcgtacagtctctgccggtgcaacagcagggagatcaacaaaaatggaatacagtaaattagacttggtgcaggagtggcgttttagacttaattcgcacttgacagctactaggggttttactttttcttag

SEQ ID NO: 23440 - DNA, 1840 bp, Oryza sativa
  unsure (1)..(1840): unsure at all n locations
  Clone ID: PAT_MRT4530_2851C.1
gtgttgaagcagatgtaccatgctcctgtaaccgctagctaccaccagagcgcgtgggcgaaaattggccggattgtcaacccgtacatccatcgctatgcaccattcctcaatacacccatttctgcagcccaaagatggtggttcagccagggaccgagtgacggtcagaatgcacaacacaggcagggcaaccgtttcgcccttctcccctcagcctccaggggcaatgatctctctggagggaacacctgcatttcctacatgaaagagaggtcaaataatatcgaagaaatcacatgggtgcagaactgcattttgccacaaccagacaggcaggctgatgcagaaagaaagatccttgatgatgctcttgacagaaagccgcagattgactgggttgaagaagatatctcttcttggatggataagagttacacaagcagcaatttggagtataacttattaatgcaaaacattcaggtcttagaaagtagtttggctggtaaagacttggtaaggctggaaagagatatccttgtacatatcgaacggctgggagcattgaaatcattcaacgcgtctatctccagggccactctaacacaaacatatgaattagagttttcacttcctggggatattattaagcttgatccagagattcctctcgaggagcaaaatgttgtggtaattgttcgaagtgggaaaagtcaagagaggaaactgaaaagaatgaaagcatcagaaaagggctctcgggtctccgtgaaaacaccctcacgaaaatcaaagaagtccagtagtagtcaatttatagctgagtggaaaaactatccaggccgaagaaggagcattgtacgagaacaatcagcattgctggttactatcaaggagtgtgcaaaccttgagaaaataagagaaaacttgttgaaggatgggagtgaagtcagccatgcaagctgggccaaggcagctggaattgatgaagcattgttgaggagtaggctgcaagaaggttactgctgccgagagagattactggtaaccaccgagtggctagtcaagtacattgcaaagacatacgctggaatgggaacagcttttgaggatctactgcaggctgggaaaatgggtgtccttaatggagctgagaaattcgacagccaaaaaggatgcaagttctcaacttatgtgaagtactggataaggaaagcaatgttagcacttcttgctgaaaactctggagtaatccagctgcccgcaaggatggagggtataattcgtaaggtcagggaagcgagaagggcgattcgctacaacacagggaggaacccaccagatgcagaaatcgcagccctcatcggtgtatcagttgccaatgttaggttggcacggaaatgctctcgtcgagttgtgtcgctttacacagagatcggagttggacagaatgcaaaatttgtggaagtgactccggacacatctttagaagctccagatgaggctatgttccggatgcagttgagagagagactgcttcatgtcctggacaggctccccccaagagaagggcacgtactgaagctgcggcacgggctggaagatgggaaatgcaggtccctggagcagattgggagcatttaccatgtctccaaggagtggataaggaaaatagagaagtcggccatgtccaagctgaggaacgacgacgtgcataatgaactcaaggacttctgtggattctagttacccagcaaaaggtcaaatttaaaaaagaaattttaccctggnaaaaaaaaaaaaaaaaaaaaaaaaaaaaaaaaaaaaaaaaggncagggc

SEQ ID NO: 23441 - DNA, 380 bp, Oryza sativa
  Clone ID: PAT_MRT4530_28520C.1
ttctctcaccatcaggggtaaaagcaatacgggggcgtggaaacatcatatcgaggtagtcatcggctcttccaccatgggcctatcttcctcctcgctggccattaaggccactcttaaagtgttcagcgaggggcgcattaccatgcacaagtctgaagctaacaccaagcccgcctcgtactggagcccttggtacggcaccaaccgcgtactatacctcggaccactctccacgctagcctttctaactacctgacctgcgattttctcggcgactacaggtgggacaccgcatggctcttcgccgacccggatacgtactgcaacaacctggagctattagttatccactccacgagggcgatactcggcactct

SEQ ID NO: 23442 - DNA, 233 bp, Oryza sativa
  unsure (1)..(233): unsure at all n locations
  Clone ID: PAT_MRT4530_28521C.1
cgaccacgcgtccgcccacgcgtccggcctgcttcacacaagcatattttgttctgtatttttttgtttaaaaaaaacaagtgaaaccctggctcttctatttaattatgaaaatactggtgcgctccggcgtgccctttgcggaaaacagggtgacacctgagttccacaatgcttttattattctgttcggtgcacactaggccanggaccccggtatcagcatctgtccg

SEQ ID NO: 23443 - DNA, 2200 bp, Oryza sativa
  Clone ID: PAT_MRT4530_28522C.1
ctcctctcttcgtccctgcgtagagagggagagagagagaaggaaccccttttgcctcctctttcctgccaagaaccacattttcccccaatctttcttcagattttccacacaaatctgtacgccttttcggtctaaagaaaaattcagcatcgatattggtgtctttctgcaagaaaggtgggcattggcagcaccaacgctccatccatttaccttctgagcaaacagcttcctgtgaagatcaccttttcttggtgctgcaatctgcattggcaccaaatcaagattcaacatttgctcccatatcatcaaaccaagattcagcagtgtgattttggttgccttgaagctgcattgaggaacctttcatgtgatttttttgatgcacattgatcatccatggctgcgaaaaaccatgcgagatcccatggcggatggagcagggggcgcgaaggtggggaccccgggcctagtgctttcagcccatcatgcctgctatgtattcacggtcaaattatctaacggtgacttgccacctgttgcacttgaagatgatatgattattgaaatttggggactgcctgcaagagtgcatcaagcattggaacttgttgcttgtcatttgagaaagtacctggttcatcgaagtgtcatcccactgtttgacccccatgttataatgaagatgcaagttccaattttctatgctgaagcggtaattggcccaactggtgcacgaattgattacattcgccaagccagcggatcaagcgtcgtgataaaggatcttgatgacagtgcaatgtctattgagatcactggaagtgctgcaacagatgttcaaattgcagagcagttgataaaggacaacaattttttggtggattcaggcgagctttgcttgatcatcctgctccatgtggccgcaggagcatcctacctggcgacgaggttggcgcgcatccacaagctcaagatgccatgcatcctgtgcacaaggatggatcatgcccttcatgggaagccatggttctcttcggatttggtctgcgccgcgcataggcagctgtgttcttgctgttcggagccattcaccaaggcgcgcaatgcgcataggatttctgagactgccagtgtttctggggagatcaaccgggaacaaatccctgcagatcattcaaaagataaggcctttgtggtgggtattgaggaggtgaatgaatctgatagttcaccacgaacatatgaacaatccacaaagaacaatggcgcttctggaaatgctgggactgcaaagctagcacccagtggatctactgtgcctatgcgcgttttcgtcgatcgcaacagcagcgtaaagaacggtttcataagtagggccaatctttcatcacctcggccatcacaaataatctctgccaaggacagcaattcaaccactcagcaagaagtgaaggcattcctttcacagatgtctactgtaaggggcattgacagttcttggagtgatggagctcctagccccggaatcaatgcgcaaaccgatgaaagcaatgccaatggcaggaggccatccctcgagaggaactattctgtgatagaaccatcggatgcgaacctcgctgatgaagttgagggagagagctctcctgagaacctgaagcggcttcttgagctcaacaagaagtcgatgagtgctctctacaaagagcttgaggaagaacgtagcgcttcggcgatcgcggctagccaagcaatggccatgatcaataagttgcatgaggaaaaggctgcaatgcagatggaggcactgcaatacctgaggatgatggaagagcaggccgatcatgaccacgaagcgattcagaatcttcacgacttgcttacggagagggagaaagaattacttgacatggatgctgagcttgagaacttcaggaggctagtccagaatgaacaattcaatggcgggaaacatgatatcgctggcataatgaatgaaacagacatgccgtttgaggtcttgaatgacttgggctacacgaagaacaccatgtcgggcgatagccagccatttactagagttgagaagaattgcaactcagagataattttcccccctgatttcacaccttctggtcatgaggcatatatgagtggccggttatttccacaggaattcgtcatccgccactag

SEQ ID NO: 23444 - DNA, 927 bp, Oryza sativa
  Clone ID: PAT_MRT4530_28523C.1
ccggcgcggtccggaattcccgcgttctgttcctcctttctctctcctctcttcgtccctgcgtagagagggagagagagagaaggaaccccttttgcctcctctttcctgccaagaaccacattttcccccaatctttcttcagattttccacacaaatctgtacgccttttcggtctaaagaaaaattcagcatcgatattggtgtctttctgcaagaaaggtgggcattggcagcaccaacgctccatccatttaccttctgagcaaacagcttcctgtgaagatcaccttttcttggtgctgcaatctgcattggcaccaaatcaagattcaacatttgctcccatatcatcaaaccaagattcagcagtgtgattttggttgccttgaagctgcattgaggaacctttcatgtgatttttttgatgcacattgatcatccatggctgcgaaaaaccatgcgagatcccaggacttctggaggagattctggtccatgctgtcttatgcttgcagcgagctttgcttgatcatcctgctccatgtggccgcaggagcatcctacctggcgacgaggttggcgcgcatccacaagctcaagatgccatgcatcctgtgcacaaggatggatcatgcccttcatgggaagccatggttctcttcggatttggtctgcgccgcgcataggtcggagatatcatctctggcatactgcagtagccacaacaatcttgcacaatgtgatgatctctgcaaaagatgcactgtagcaacgaatgatgtggttgacacatggagatcgaaatccaggcagctgtgttcttgctgctcggagccattcaccaaggcgcgcagtgcgcataggatttctgagactgccagtgattctggggagatcaaccgggaacatattcctgcagatca

SEQ ID NO: 23445 - DNA, 1104 bp, Oryza sativa
  Clone ID: PAT_MRT4530_28524C.1
ctatagctcatcagtgttatagataagatatcttgtgagtgtttagggttttcgataattcggtcgaccattcgttggttcttggtggaagggagggaggttcttgtttggtgatgtcttgtacctccccagacccgcccgattactgctcggccgcatcgcctgagcttaagctataccaagccttcatcttctccgtgccggttttcttcacgttcgtcttgcttctcttcttctacttgttctacttgcgacggcgcagagcaaactggcagtccttgcgcatgaggactaataacttgatacggggagataaccccagattggagtgcggcataaagaaggagatgcgggaaatgttgcctgttgtggtcttcaaggagagcttcttgatcagggaaacacaatgctctgtctgcttagcagactatcaaccggatgagcggctccagagaatacctccttgtggccataccttccacatcgattgcatcgaccactggctctcgacaaacaccacttgccctctttgtcgagtatccctccttccatcccccaaaaccgccagcattgatccagtggatttggaagcacagaccgttgaagagaacagctctttggatgaaaaaaggtgagtaaactacaggatgaaaggtacacaaaagcgaaatttcccctcatgtcatggtggcaaccaaaaagtcttgggaacttcctggcacttgcagttcaaataccgccacaattcaagacaaaagggcgttgcgtcttcagcacagtaagcagtaatgaagaaacattggaatttcctcaaatgatcatatcagaattagggcaaagtcaatggttagcagtccctgttagtaactgaggcatgattgtccaggtcgacggattcatgtgatgagttcatactgctcaatttgatggtgtcacctatgactgacagcttagactttgaagccagcagcttggcctcctcgtaggagtaaatataaatccgtttcaccatgctacaaaattcatcccaaggatcatccccgacaagcatcatgtcatcctcatcatcggtgtaaacaacttgccatctctgcagggagggac

SEQ ID NO: 23446 - DNA, 1125 bp, Oryza sativa
  Clone ID: PAT_MRT4530_28525C.1
ccacgcgtccggcaggccgatcatgaccacgaagcgattcagaatcttcacgacttgcttacggagagggagaaagaattacttgacatggatgctgagcttgagaacttcaggaggctagtccagaatgaacaattcaatggcgggaaacatgatatcgctggcataatgaatgaaacagacatgccgtttgaggtcttgaatgacttgggctacacgaagaacaccatgtcgggtctcgaatccgaattggcgtatcgttcggaatcgataagcagattggaggataagctctgcgtctccacaaacagacttgcttctgacgatgccaaaattaatcaagagggattgataggaggggctgattttgggagctcaccaacgcatggtgaatcaacttctgatcagcaagatgatggaaacaaatctgttcagaaccataaggataactgttcttgttctcatccagaggatgggaaaacgagtgatgcaaatcttaaggatgaagtctcactgttgcatacgagattgcaggcacttgaagctgatcaggagtttcttaagcatgtgttaaactccctaaggtgtagccctgatggactgcagtgtgtacaggcgatagccagccatttactagagttgagaagaattgcaactcagagataattttcccccctgatttcacaccttctggtcatgagctcttctcatgtagtgctacagaccttcatggtgcttcttgttagagcagcattgaagaggtctagaaatcgatgtcggtgaaagatcatctgaaatgaggaaaaggagcatgcactgacaaaaaaaacttccattccttgtactaatcttcaagttttcattgaccaggctggccccctgttgctgtaattctgtcactgcttcagtaaattactgaaacagacaaaggcatctcctctatatcgatgtgattgctgttaggagcaagtttgtaactgtagatgtaactgatgcttgcggttcttgcaaaagaggagtttaactagtagaatatatacagtgttcatatcaaattaatcaatgtctccttgcttcagaaatgcaaggttttctgcctcatccaattgttttctccatacgttt

SEQ ID NO: 23447 - DNA, 418 bp, Oryza sativa
  Clone ID: PAT_MRT4530_28526C.1
gactaatagaaaatagatcatatgctattctacttctcctggggaagattcacagtccatagttcagatctgtggtaaaatattgttcgtaactgcatttttccaaaaggaaaaggctatacgtgatgtaacgacccgcgtctcccaggtcgggcccgcttacatctggcagctttcataggtcatagactgccctcacagaccaacacaagtcttttcttcacactttgtccttactcgtgcgcacccgggaagaatttcccggtcggtcacccatcccaaattgctccaggccaagcacgcttaaccctggagttctttggaaatcggcttcgagaaaagaagttgcaatttgttgatatgagtattctattaatcctattaagcattaggccgggatgttacaccctcacaccct

SEQ ID NO: 23448 - DNA, 1432 bp, Oryza sativa
  Clone ID: PAT_MRT4530_28527C.1
atggcctcccatctcctcctccgccttcccgcccctcccccgcttctcctacacttcccgcagcggcgagtgaccctgccacagagccgggtgtcccccacggcgccgctgctcggggcccgcctcgtcttctccccagcctccgccgtccgtccggcccgggcgagggggtcctcgatcggcggcgcgggggaggacgactcagacggcgaggtggacggggccccgcgcctcgtcggggaggactcggcggcgttccggctgggcgaccagcgggtggcgtcgtgggtctacttcggcgggatactcgccgtggtgctgtgggggctcaacgtgctgtggatcgacccggccaccggggtcgggaccaggttcctcgaggccgtcgccgccgtctccgacaaccacgaggtgcgccggtggttggtaatttctaaagggaaaaagtcagttgtcactatgctgctccttaccatcatttttgctgtcgtccatagtggtatggcaagcttacgtgaaactggtgagaaaataataggggagagagcttaccgtgtaatgtttgctggaatctcactgcctttagcagttagtactgttgtctactttataaatcatcggtatgatggcattcagctatggcaagttcagggtatttcaggcatccatgagcttgtttggctctcatctttcatctcattcttctttttgtatccatctactttcaatcttttagaagtggcagctgttgacaagccaaaattccacatgtgggaaactggaataatgcgcatcactagacatccacagatggttggacaggtaatttggtgcttagcccacacgttatggattggcaattcagttgctgttgcggcatccgttggattaattggtcaccatctgtttggtgtttggaatggtgataggaggctggcatcacgctatggtgaagcctttgaagttctgaaaaagagaacaagtgttattccttttgctgcagttatcgatggaagacagaaactacccaaagattattacagggagttcatccggttaccatatctcgcaatcactgcattaactttgggagcatactttgttcatcccttaatgcaggcgtccagctaccaactcccttggtgattggtgtacataacaatgtccacaaagagaacacgatacagaaatagtgactttgtactttgatagacctgatagcctggccttgcattcgttattttaatactggcctgctcacacttgttgtaaaagaagactaacgaaagagtaccaggttgatgtagatgggagtattcaagacaaatggattgcacgttgccatgcttcctgaggacatctctatactcattagttgtgcatctataccaactagtgagcgtgcacatgcaaggcacgtcacggatagaca

SEQ ID NO: 23449 - DNA, 480 bp, Oryza sativa
  Clone ID: PAT_MRT4530_28528C.1
atggtttgtctcctcctcacgcgccgagctgggcggctgcccgcctgcaccagcgcgacgtcaggcccggcgaggggccgcctccacgctcctccagccgcggtggcacgacaggtcccccgctggctcccggcgacggccggacgcgggcgaggcgagcacgggcaccacgcacggcggtcgcccggtctcctccccactcgcggcgagcccgacgctccggtcacgacggcggtgcgcctcccagccggctcgcggcgacggccgaacgaggacgatgctccgcgcgttggatggatggattgggggcgccgtgacgccgtctccgtcgggatggatggattggggattattttggactgcagcggcgaccgggataggaactgggcggcgtggtggctggccgtcaccatggccaccaccaccaacgagccagctgctgcaagcgccaccccctcgaccggcggagcgatggtgtag

SEQ ID NO: 23450 - DNA, 200 bp, Oryza sativa
  Clone ID: PAT_MRT4530_28529C.1
cggagaggagcgaggaggacgcgcggcgactttacacggagtggaagggcaagcacggcaagagctacaactccgtcacaaaggaggagccatggtacacggcatataaggacaacctgcggtacatcaactagtacaactccgcctccgacgcttgggtgcactcattaaggctgagtctcaagcgatttacctacctc

SEQ ID NO: 23451 - DNA, 191 bp, Oryza sativa
  Clone ID: PAT_MRT4530_2852C.1
aagctttttttttttccgtactcccaactgtccctcccagtttgtcagtttcttactttctctactttcctcttgagccctctgacttctcatgctcaattctcttatattcagttctacgatcccatctcgtctcttctcctttcgttttattttttttttaagcgcaccttcctctcgttgagaagctt

SEQ ID NO: 23452 - DNA, 422 bp, Oryza sativa
  Clone ID: PAT_MRT4530_28530C.1
gcgcagcgcacgcatgctcttgtactctattttgcgcgccctctttttttttttttgggtaaccaattcaagggaaatcctactttgcattattattcacatttcattcaatttttaggaaatgtttttacacatggatgtacagggacaaaccgtgtacagcaatgctgggcgtgccattgcacagttaagtgagccttaccttgctcgcaacatatgtgtcatgatgaatcccaaatgacattttaccgctaggctctttggaggatgtttgtggggaacacttggcctcaactgataaatttttgaggactcctcggcgtggatcacctaagacatcattggaaacactgattgcacatttggggttgtcaacacatgcctctttcaccaaatccagagtgctctatgcatgggaattt

SEQ ID NO: 23453 - DNA, 640 bp, Oryza sativa
  Clone ID: PAT_MRT4530_28531C.1
cttctctttttttttttttttttttttttttttttttttttattttttttttttttttaaaacaaaaagctagctttcaaaagaaaggatcaaaaaattatatcaaaaaaagcattggtcctcttctcaaaatttggaagacaaatttcttcctaactgaaaaagggacaagggatttttttttacatcaagcggacgggcactacattggcagggtattaaacctaaaaacggccacacccatctattgaaacccaaatcgggggattggtagccccaggattagcttaactaaaaagaatctaaaatatccccaaaacccaccgggggaggggaaaaaaagaacaatgctgcagaagggggcttggaaaccggacaaacatcacaccaccagacgggaagcaaaaaatgagcccatgctatggcaccaaaaaaaatcaagggcagccaatcaaggcaagactaggagatgctatctagcccggagggatttaaaggggtctgatttgtttgagcggcacatgcagccggggcatggaaaggggtaaaaaaattcattggctcttttcatttcaatacccttgggaacgctgggggttctcaaattccccaaatgacggttcagggacttccatccgaa

SEQ ID NO: 23454 - DNA, 203 bp, Oryza sativa
  Clone ID: PAT_MRT4530_28532C.1
atcctcatacaagatactggtataaccacatggaggtggaaatatagacgggaacaaatagcactgatacatcacctgcgagatcgacatgctatggtgagggagaaaatgtgcctggtctaacaggaacagaccctccatgcaatttgacatacacaattctaactggtcattctgaaatggcagtaaagtacaatccgtgc

SEQ ID NO: 23455 - DNA, 105 bp, Oryza sativa
  Clone ID: PAT_MRT4530_28533C.1
gcaaagtataccaactatttggaaattatgaacgaataatgctcaatcacatcaatgtgccaaggagtctttacataactgtcaaccttggtataaatttgaaag

SEQ ID NO: 23456 - DNA, 552 bp, Oryza sativa
  Clone ID: PAT_MRT4530_28534C.1
atgctgccggatccgccctcggccgccacaaccgcgccggacggagaagacagacggcgaaggaagccgccgttcctggatccaccctcagtagacgccaccaccgtcagatccacccgcgaccactgcgccagagggagaagaggccaccaccgccgccggatccgcccgcggttgccgccaccgctgacggatctacccgcgtacgccgcacatgccgtcgtcgcagtcgacgctgccgtagggacggccgtcgccgagggagcgcgaatgccgccgatgccattgtcgggagcggtccgccgtctccgccgcaccccaccgtcgccgccgcaaggacgggtgggtgccgccgccgccggccgggggaggaaggccgccgctcggggggaagggcgtcgctcgcgggaggaaggccgccgttcggggggaagggcgccgccaccgccgctcggaggaaagagatggggttttgtttccccgatctcgacgctcggccgtctgatcaaaaccctagagatcagacggctggcgtcgtccgggctgaaatag

SEQ ID NO: 23457 - DNA, 509 bp, Oryza sativa
  Clone ID: PAT_MRT4530_28535C.1
gctctctctctctctctctctctctaaagattccatctttgatttccgtttctctctctgagaaggaaggaaggaggtcgccggcggcgatggggttcccgtcggtgtgctactgcgtgatactgccgcagccgctggtgctggtgctgcagctgctcgacctgctgcgccacgccttcctgctctgcctctccgcgctcggcctcgccgcgccgccgctcccggacgaacaccccgcctacgcgccgcctccgccgccgccggcgtcgatggcggccctccccgccgacctcgtctgggcgttccagcccgcgccggagccggccgccatcaaggcgcgcctccccgccgtccgctacgccgacttcgtcaggtgccgccgcgccgccgcggcggccgcggcgtcgtgcgttttgtgcctctgcgcgctcgaagcgcgccaccgggtgcccgagctgggcaactgcgcccacgcgttccccaaggcgtgcctccccaattggctttaa

SEQ ID NO: 23458 - DNA, 144 bp, Oryza sativa
  Clone ID: PAT_MRT4530_28536C.1
tctctataagtagcttacctcctggctgcttttgtggtcattattgcaatccattggagtcttgaacgaggtcaatgggctaggaggtggccttgtcccctcctactggtgcgtgggcgtttggctacacgacctcgtggagat

SEQ ID NO: 23459 - DNA, 192 bp, Oryza sativa
  Clone ID: PAT_MRT4530_28537C.1
tcagcacagccgtcgcaacggacgagctcgagcgccttctctagattggccacgacttccgaaatggctggccgctcctcccaccgcagccgtcatcgcaacctgcatgatcatggtgatgaggccgccgatgtccgccccgaccagctgcgccaccgtcgccgcctgacccagcccgccccacagtgccat

SEQ ID NO: 23460 - DNA, 207 bp, Oryza sativa
  Clone ID: PAT_MRT4530_28538C.1
atggagtcgtgggggcgagcgcctgccttggatcttggccacggcggcgcccttgagctcacaggggctgcgaccctcgatcccagggcggaggcggacgcggacggggggaagcgccgtcggggcgggcgcgccctgaccttatcgatggtgacctccacgacggcgttgaactcactcaagacggagggaataactgaagactga

SEQ ID NO: 23461 - DNA, 759 bp, Oryza sativa
  Clone ID: PAT_MRT4530_28539C.1
atgacaattcatttgccggcttgggccattaaggccattgataaaattagacgtggatttctttggagaggaagaaaggaagcaagtggtggtcaccgtttaattgcttggcccatagtttgtcagcctcaagagtttgggtgttttggaatcttcgatcttaagcttctcagttatgctctaaagggtgagatggctttggatgcaaaaaaggaaccattgaagccatggtcgacgtttcctatccgacacattgaggaagtggcgccgcgccattttgctttggtgccaaagcggaaggttaacaagcgtactgttcttcaggccttaaccaatcgttcgtggatctccgatattcagggagctttttccattgtggttagaggattttcttggcttatggaatgccctttgctcggtgatattacaaccagggtcaccgggcatacattcttggaggttctcaacttcaggctaactagctcgattaagaagcgattacaattgaaacaaaaagcatcttcctgcgcctgtgaacatgtcgggaacacaaggaacaatgggcagagcaacgctgcgctggcagccatcctcgaccagctgaaaaagatggagatcaccctgggagagcatacggccaccatcacccgccttgagagcaacaaggcaaccacagatcgcaaggcaaaaggcatctactcccatccaggtgggggacacaacgacggatcatcagatggcaagggtctgaacagctag

SEQ ID NO: 23462 - DNA, 273 bp, Oryza sativa
  unsure (1)..(273): unsure at all n locations
  Clone ID: PAT_MRT4530_2853C.1
aactaatgatggttcttttggacaaaactaattttcgcatatgaaagagaggtccacctataccacaacgactgcgaaaatcatccatcttcgtactcggggcaacggcctgcctgcgaaaatagaagaaatgaacaaaaaaaaaaaaacgccggcccgcaccgggagccgccggtggcctcccccctccctcctctggcaagatctgggagggagggggaaggggagcncccgccgccacctagcccgcgctggcgccgttccacgccgatg

SEQ ID NO: 23463 - DNA, 458 bp, Oryza sativa
  Clone ID: PAT_MRT4530_28540C.1
aatcaatataaaaatttaatacggacaaaaacttcgaaacatttttttgatctattgctgggacttttagaacagtactcatttgccaacgaaaatggaagaagatctcagaaattgaaccggtctgtttcctttcacgatatgaacacaatggaagaagataccgagtcctcttgttgttaatagaggcacaacagatattgaactgatctgttgaatgacaagcgcttgcttgatcgtattatccaaaaaagcaaaaaaaaatataataatgtgcaattgaagacgaaagaaattttggtttcacaatgagatgaatgtgtaaactagaaagcggatttaatatgttagccgtgctggagtgccaatacggtttataccaatttgggcttgcgttatgagcatcactcgtgtacattatgttgtaaagacaattatttatatattcagccctcctt

SEQ ID NO: 23464 - DNA, 140 bp, Oryza sativa
  Clone ID: PAT_MRT4530_28541C.1
attggtatctgacaccctcgaattgctctatccccactatacctaacatagtgcttcaccgtggcgggcaagtacgcacactgaaagttttcttcccagatccaggtcacatagataggtacgacctgtggcctacccat

SEQ ID NO: 23465 - DNA, 5469 bp, Oryza sativa
  Clone ID: PAT_MRT4530_28542C.1
atgacctcagtgatgacggtgggggcgggcggcggcggcgagctcaggcgcgacggatctggtggcggcacggtggatccggctcaggcgtggcagatccggcagcggcgcgatggatccgacgcggtggcgagtggcagcggcgagctcgggcgctggcggattccgtcgtttccggagagtccgttttcgcagaagaagagtttgaagagttccaaggccagcaaggcaactcctggtttggaatggtatattcctggtttggagatagaactgtgcagccggggtggttgttcagaatggttgggcctatacaacaggatgccgcgttacaagcctgagtacctgtttggtgttgagggttttgtccaggagttgcgtacgatgtcctttgtcattggatttgggactgcccctttttatgcccagattcctcatgatcgtcatgaagagaagtgccgagtcaaagtcaccttgaacagtaatagtgaagatatcccctcagtgatgtttgaagctggaggaagaaactacatccatgcatgtcaggaggcggcaaggatcgccataggagagctccgtgatcgctacagtgatcagttggccgacactgagtatcgctaccatcctcgccaaccccagggaagtgaccgtgacagttaccttgagactgaaggaattgagaatgatgctaccacgaagcatttggttgagatgttgtgggctatggatgaaagtcgtgcggagactgtgttagccgctcaagatcgtgaagaccggaatcgcggtaagatttgcaagttagaagacaaggtggatcgtttggagaaggaattagccgcattgaagggagaagcaccgccgcagaaggccaggattcgtcttaccgcaaggaagagagctctatttgtccctcgctatcaactggcgccaaaggttcatgtgatggagaaagaagttgccccagctcaagcggatcctccggtcatcatcataagtagtgatgaagaagaagaatccaagcgcaacaattccaagattgagtggatggtgaacactcgcagcaatgggaatggtcccaacaaccccaataacaacaacaatggagagaatcccactcttgctcaagttcttgctcaacagacacagcttatgaacatgatgatgcagcaatttcagaatcagcaaaaccaaggaaataatcatgcacctccacagaacaagttagcagaatttcttcgtgtgaggccgcctgttttctctagtaccactaatcctgttgaagctagtgattggctgcatgccatagagaagaagttggatttacttcagtgtactgatcaggacaaggtctcatttgcatcacatcagttgcatggccctgcctctgaatggtgggatcacttccgccttaacaggactactgctgaacctatcacttggcttgaattcaccgctgctttccggaagacgcatataccatcaggagtagtgtctctcaagaagaaggagttcaggtcgcttacccagggatctcgctctgttacggagtatctgcacgagttcaatcgtcttgctcgttatgctccggaagatgtgcgcaatgatgaagagcgccaggagaagtttttgggaggacttaatgatgagctttcttacccactcatggttggagattatcctgatttccagaaattagtggataaggctgttcgtcaggaggacaagtacaatcgcatggagcagaagaaacgccggattgctcaattcaagacacaacaggggaataatcagaagccgcgtcttactttaggaccccagtctgtgccacagggaggttcttcgtctgttgttcgtccgcagcgtcagttcttcaacaacaatgctggcaacaacatccgtaatcaagctccacgtcctgttgcagttccagcacagcaacaacctgccaagagggagcaaggcaacaagcccgtggtgtgtttcaactgtggagatccaggacattatgctgacaagtgtccgaagccccgacgcgtgaaggttgtccctgcccagaataactctgctgtaccagcatccaaggctcgtgtaaatcatgtcgctgctgcagaagctcaaggtgctccagatgtgattttgggtacgttccttgttaactcagttcctgcaacagtacttttcgattctggtgctacacattcattcctatctatgagttttgcgggaaatcatgggatggaagtagaagatcttagacgtcctttgatggttagtaccccaagtaatcaagcactctctttgcaacgtagcccctctgtcagaatagaaattcaaggagtaccatttctggccaatcttatcttgttagaatccaaagaccttgatgtcatcctagggatggactggttagccagacataaaggtgtgatagactgtgccaacaaaaaagtaactctcaccagctatgatggtcgagttgtaactgttcatgcattgtcatctgagtctttaaggtcaagactgaaccagataactttggaagagattcctatagtccgggagtatcctgatgtgttcccagatgatttacctggtatgccgcctaaaagggatatagagttcagaatagatttggtacctggaacaactccgatccataagagaccttatcgaatggcagccaatgagttggcagaagttaagaggcaagtagatgatttgctacagaaaggatacatcagaccgagttcatcaccatggggagctccggttatttttgtggaaaagaaagaccatactcagagaatgtgtgtggactatcgtgcactaaacgatgtgactatcaagaataagtatccactacccaggattgatgatttgtttgatcagcttaaaggtgccactgttttctccaagatagatcttcgatcagggtatcatcagttgagaatcaaagaggaagatatacctaagacatcttttaccactaggtatgggttgttcgaatgtactgttatgtcttttggacttaccaatgcccctgctttcttcatgaacttgatgaataaggtgtttatggaatacctagacaagttcgtggtggtctttattgatgatattcttatctactctcgaaccaaagaagagcatgaggaacatcttcgccttgcattggagaagctacgagaacatcaactgtatgctaagtttagcaagtgtgaattttggttgtctgaagtgaaattccttggtcacgtcatctcagccggaggagttgccgtcgatcctagtaacgtggaatccgtaaccaattggaagcaaccaaagacagtttcagaaattcgcagtttcctaggcctcgcaggatattatcggaggtttatagagaatttttccaagattgctaagcccatgacacgactgcttcagaaagatgtgaagtacaagtggtcggaagaatgtgagcagagttttcaagagttgaaaagtcgcttaatatcagctcctattttgattttgcctgatccaaagaagggttttcaagtgtattgcgatgcatccaaacttgggttaggttgtgttctgatgcaagatgggaaggtggttgcctatgcctctcgacagttacgtccacatgagaagaactaccctactcatgatattgagttagctgcagtcgttcatgcattgaagatttggcgtcattatcttttcggtactcgtacagaagtgtacaccgatcacaagagtttaaagtatatctttactcagccggatctgaacatgagacaacggagatggttggaattaattaaggattatgacatgggaattcattatcatccgggaaaggctaatgttgtagtagacgctcttagcggaaaaggctattgcaatgctacagaaggacgacagttgccattggaattatgcaaggaatttgaaagattaaatttgggaattgtcggtagaggtttcgttgcagccttagaagcgaagcccactctaattgatcaagttagagaagcccaaattaatgatcctgatattcaagagatcaagaagaatatgagaagaggaaaagctattggtttcttggaggatgagcaaggaactgtatggttgggtgagagaatctgtgtccccgacaacaaagatctaaaagatgcagttctgaaagaagctcatgatactttatactccattcaccctggtagtactaagatgtaccaggatctcaaggaaagattttggtgggcaagtatgaagcgtgaaatcgtagaatatgtagcagtatgtgatgtttgtcagcgagtcaaggcagaacatcagaaacccgccggtttgttgcagcctttgaagattcctgaatggaaatgggaagaaataggtatggattttattactggtttacccagaacgtcatcaggccatgattctatttgggtgatagtcgacagacttaccaaagtggctcattttattccggtaaagacaacctattccggaagtcgtttggcggaattgtatatggcaaggattgtgtgtttgcatggcgtccctaagaagatagtgtctgatcgaggcagtcagtttacttcaaatttttggaagaaacttcaggaagagatgggttctaagctgaactttagtactgcttatcatccacagacagacggacaaaccgaaagggtgaatcagattttggaagacatgttgagagcttgtgctttagatttcggtggaagttgggataagaatctaccttatgcagaattttcatacaacaacagttatcaagctagtttacagatggctccttacgaagcactgtatggtcggaagtgccgcactccgcttttgtgggatcaaacgggagaacgtcaggttttcgggacggatatcctaagggaagcagaagaaaaggtaaaggtcattcaagaaagattgcgagtggctcagtctcgacataagagttatgccgacaatcgccgtagagatttgagttttgaagaaggagactatgtgtatcttcgtgtcacgcctcttcgaggagttcatcgttttcacaccaagggaaaattggcaccgcgttttgtgggaccttataagattgtcagtagaagaggagaggttgcttatcagttagaattacctcaatctttggcaggagtccataatgtgttccatgtgtcacaattgaaaaaatgtttaagggtacctaccgaagaagctaatattgagcagatagaagtccaagaggatttgacttctgttgagaaaccaatccgtatcctggaaacaaatgagagaagaaccaggaatcgagttatccgtttctgcaaagttcaatggagtaatcactcggaagaagaatcaacttgggaacgagaagatgaattgaagtcagctcatccgcacctgttcgccagttcttccaaatctcgaggacgagattctgtttaa

SEQ ID NO: 23466 - DNA, 306 bp, Oryza sativa
  Clone ID: PAT_MRT4530_28543C.1
atggctaggcgtgccagcattattgttgcggccgtgatcgccgcgtgcgtcctgctggtctgtatgacgacgtcgtccgtcgtcgacgcggcggcggctgcgcctgcacggcggctgctggggagcgggagggacgacgacgccgtggcggcgccggtcgtgaacgtggctgcggccgcggagccaataatgcagcagccggcccagatggtggcacctgtggtggcagacggcgacgacggcggcgtcgtgcccgcggggtccaagaggctcagccccggaggaccggatcctcagcatcactga

SEQ ID NO: 23467 - DNA, 5805 bp, Oryza sativa
  Clone ID: PAT_MRT4530_28544C.1
gatttgtcaggaggatcagcgcaaccagatggatcgcaaaagaaagggagcttagttcagggcgcgtcaggggaacaaccatagtgccacccccggcaacggcggtctcggatgagagcggcgatggtgggtccagcgggcaagggcggcagtctcaagcgagagctcgggtggtggcggtggcttgcaaccatgcgaatcccgtcgacggcggcaacagtagtgccggatccagcacctcctccccctcccgtgctgacctcgccgcctctccaatgacgatgacggtggcagcagcagcgacgatagtggatccaggcacgatgacgacgatagtcgatccaggcgtcgcatcggtgatacattctagggtccgtgcgccgccgtcgtttcagccgtcgccgtcgctcgggaagaccaccgtcgtgctcgccaagtcgtcgccgtcctcgtccgccccttcgccgtcgccggagatcaccggagcagcttcgccgtcgttgacccgaaggttcccgccgcttcctcctcgatgctttaactggtaataatttgattagctcctggtttggaatggtatattcctggtttggagatagaactgtgcagccgatgccgcgttacaagcctgagtacctgtttggtgttgagggttttgtctaggagttgcgtacgatgtcctttgtcattggatttgggactgctcctttttatgcccagattcctcatgatcgtcatgaagagaagtgacgagtcaaagtcaccttgaacagtaatagtgaagatatcccctcagtgatgtttgaagctggaggaagaaactatatccatgcatgtcaggaggtggcaaggatcgccataggagagctccgtgatcgctacagtgatcaattggccgacactgagtatcgccaccatcctcgccaacctcagggaagtgaccgtggcagttaccttgagactgaaggaattgagaatgatgctaccacgaagcatttggtggagatgttgtgggctatggatgaaagtcgtgcggagactgtgttagcagctcaagatcgtgaagaccggaatcgtggtaagatttgcaagctagaagacaaggtggatcgtttggagaaggaattagccgcattgaagggagaagcaccgccgcagaaggccaggattcgtctcaccgcaaggaagagagctctatttgtccctcgctatcaactggcgccaaaggttcgtgtggtggagaaagaagttgctccagctcaagcggatcctccggtcatcatcataagtagtgatgaagaagaagaatccaagcgcaacaattctaagattgagtgggtagcaactcaagatgatgaagacgagccttcaatcgacctccgatgcttggaagaactagacaatgggaatggtcccaacaaccccaataacaacaacaatggagagaatcccactcttgctcaagttcttgctcaacagacacagcttatgaacatgatgatgcagcaatttcagaatcagcaaaaccaaggaaataatcatgcacctccacagaacaagttagcagaatttcttcgtgtgaggccgcctgttttctctagtaccactaatcctgttgaagctagtgattggctgcatgccatagagaagaagttggatttacttcagtgtactgatcaggagaaggtctcatttgcatcacatcagttgcatggccctgcctctgaatggtgggatcacttccgccttaacaggactactgctgaacctatcacttggcttgaattcaccgctgctttccggaagacgcatataccatcaggagtagtgtctctcaagaagaaggagttcaggtcgcttacccagggatctcgctctgttacggagtatctgcacgagttcaatcgtcttgctcgttatgctccggaagatgtgcgcaatgatgaagagcgccaggagaagtttttgggaggacttaatgatgagctttcttacccactcatggttggagattatcctgatttccagaaattagtggataaggctattcgtcaggaggacaagtacaatcgcatggagcagaagaaacgtcggattgctcaattcaagacacaacaggggaataatcagaagccgcgtcttactttaggaccccagcccatgccacagggaggttcttcgtctgttgttcgtccgcagcgtcatttcttcaacaacaatgctggcaacaacatccgtaatcaagctccacgtcctgttgcagctccagcacagcaacaacctgccaagagggagcaaggcagcaagcccgtggtgtgtttcaactgtggagatccaggacattatgctgacaagtgtccgaagccccgacgcgtgaaggttgtccctgcccagaataactctgctgtaccagcatccaaggctcgtgtaaatcatgtcgctgctgcagaagctcaagatgctccagatgtgattttgggtacgttccttgttaactcagttcctgcaacagtacttttcgattctggtgctacacattcattcttatctatgagttttgcgggaaatcatgggatggaagtagaagatcttagacgtcctttgatggttagtaccccaagtaatcaagcactctctttgcaacgtagcccctctgtcagaatagaaattcaaggagtaccatttctggccaatcttatcttgttagaatccaaagaccttgatgtcatcctagggatggactggttagccagacataaaggtgtgatagactgtgccaacaaaaaagtaactctcaccagctatgatggtcgagttgtaactgttcatgcattgtcatctgagtctttaaggtcaagactgaaccaaataactttggaagagattcctatagtccgggagtatcccgatgtgttcccagatgatttacctggtatgccgcctaaaagggatatagagttcacaatagatttggtacctggaacaactccgatccataagagaccttatcgaatggcagccaatgagttggcagaagttaagaggcaagtagatgatttgctacagaaaggatacatcagaccgagttcatcaccatggggagctccggttatttttgtggaaaagaaagaccatactcagagaatgtgtgtggactatcgtgcactaaacgatgtgactatcaagaataagtatccactacccaggattgatgatttgtttgatcagcttaaaggtgccactgttttctccatgatagatcttcgatcagggtatcatcagttgagaatcaaagaggaagatatacctaagacagcttttaccactaggtatgggttgttcgaatgtactgttatgtcttttggacttaccaatgcccctgctttcttcatgaacttgatgaataaggtgtttatggaatacctagacaagttcgtggtggtctttattgatgatattcttatctactctcggaccaaagaagagcatgaggaacatcttcgccttgcattggagaagctacgagaacatcaactgtatgctaagtttagcaagtgtgaattttggttgtctgaagtgaaattccttggtcacgtcatctcagccggaggagttgccgtcgatcctagtaacgtggaatccgtaaccaattggaagcaaccaaagacagtttcagagattcgcagtttcctaggcctcgcaggatattatcggaggtttatagagaatttttctaagattgctaagcccatgacacgactgcttcagaaagatgtgaagtacaagtggtcggaagaatgtgagcagagttttcaagagttgaaaagtcgcttaatatcagctcctattttgattttgcctgatccaaagaagggttttcaagtgtattgcgatgcatccaaacttgggttaggttgtgttctgatgcaagatgggaaggtggttgcctatgcctctcgacagttacgtccgcatgagaagaactaccctactcatgatattgagttagctgcagtcgttcatgcattgaagatttggcgtcattatcttttcggtactcgtacagaagtgtacaccgatcacaagagtttaaagtatatctttactcagccggatctgaacatgagacaacggagatggttggaattaattaaggattatgacatgggaattcattatcatccgggaaaggctaatgttgtagcagacgctcttagcagaaaaggctattgcaatgctacagaaggacgacagttgccattggaattatgcaaggaatttgaaagattaaatttgggaattgtcggtagaggtttcgttgcagccttagaagcgaagcccactctaattgatcaagttagagaagcccaaattaatgatcctgatattcaagagatcaagaagaatatgagaagaggaaaagctattggtttcttggaggatgagcaaggaactgtatggttgggtgagagaatttgtgtccccgacaacaaagatctaaaagatgcagttctgaaagaagctcatgatactttatactccattcaccctggtagtactaagatgtaccaggatctcaaggaaagattttggtgggcaagtatgaagcgtgaaatcgcggaatatgtagcagtatgtgatgtttgtcagcgagtcaaggcagaacatcagaaacccgccggtttgttgcagccattgaagattcctgaatggaaatgggaagaaataggtatggattttattactggtttacccagaacgtcatcaggccatgactctatttgggtgatagtcgacagacttaccaaagtggctcattttattccggtaaagacaacctattccggaagtcgcttggcggaattgtacatggcaaggattgtgtgtttgcatggcgtccctaagaagatagtgtctgatcgaggcagtcagtttacttcaaatttttggaagaaacttcaggaagagatgggttctaagctgaactttagtactgcttatcatccacagacagacggacaaaccgaaagggtgaatcagattttggaagacatgttgagagcttgtgctttagatttcggtggaagttgggataagaatctaccttatgcagaattttcatacaacaacagttatcaagctagtttacagatggctccttacgaagcactgtatggtcggaagtgccgcactccgcttttgtgggatcaaacgggagaacgtcaggttttcgggacggatatcctaagggaagcagaagaaaaggtaaaggtcattcaagaaagattgcgagtggctcagtctcgacataagagttatgccgacaatcgccgtagagatttgagttttgaagaaggagattatgtgtatcttcgtgtcacgcctcttcgaggagttcatcgttttcacaccaaaggaaaattggcaccgcgttatgtgggaccttataagattgtcagtagaagaggagaggttgcttatcagttagaattacctcaatctttggcaggagtccataatgtgttccatgtgtcgcaattgaagaagtgtttaagagtacctaccgaagaagctaatcttgaacagatagaagtccaagaggatttgacttatgttgagaaaccaatccgtatcttggaaacaaatgagagaagaaccaggaatcgagttatccgtttttgcaaactccaatggagtaatcactcggaagaagaatcaacttgggaacgagaagatgaattgaagtcagctcatccgcacctatttgccagttcttccgaatctcgaggacgagattctgtttaa

SEQ ID NO: 23468 - DNA, 4949 bp, Oryza sativa
  Clone ID: PAT_MRT4530_28545C.1
ttcttatagtgagacataactgagtatatagcctggatcatcaaattgggaacttgtagtgacttccgatatggacgtcaattcaatcttgccatgtggggtgatcatgtcctattaggactcttgttgtaggttgtatacccattattatatggaaagttatctctaaatatagataaagatacaaacaaaatctccgggatctcctctaccttttctcctttggaatctttggctcaatcggtttggaatgagtttgattcgagttcgaatcggatcggctttcctctctccaagccgcgagtttccttcgccgttgctgtcgccgtgggccttcgccgccgcctccgagccccggagcgtcatcgccgccgtcgacccgaagagcttcgccgcttcctcctcgtcgccgtcgccgtccgttgtttctccgccgtcgttttggtcgtcggtgagttcgccgcgccgtccgctacccgttggtgccctttgttagcgtcctcgcgccgccgttcgccggcgagcgtgcgccgcctgagccgtcccagccgccgagccgccgccgccggggtgacgtcatcgctgacgccatcaagtccgtccgccgtgagccgctgtggacccgatcgatctcggccgtccatcttggatcgatgccgcgttacaagcctgagtacctgtttggtgttgagggttttgtccaggagttgcgtacgatgtcctttgccataggatttgggactgcccctttttatgcccagattcctcatgatcgtcatgaagagaagtgccgagtcaaagtcaccttgaacagtaatagtgaagatatcccctcagtgatgtttgaagctggaggaagaaactacatccatgcatgtcaggaggtggcaaggatcgccataggagagctccgtgatcgctacagtgatcaattggccgacactgagtatcgctaccatcctcgccaaccccagggaagtgaccgtggcagttaccttgagactgaaggaattgagaatgatgctaccacgaagcatttggttgagatgttgtgggctatggatgaaagtcgtgcggagactgtgttagccgctcaagatcgtgaagaccggaatcgtggtaagatttgcaagctagaagacaaggtggatcgtttggagaaggaattagccgcattgaagggagaagcaccgcctcagaaggccaggattcgtcttaccgcaaggaagagagctttatttgtccctcgctatcaactggcgccaaaggttcgtgtggtggagaaagaagttgccccagctcaagcggatcctccggagaaggtctcatttgcatcacatcagttgcatggccctgcctctgaatggtgggatcacttccgcctgaataggattactgctgaacctatcacttggcttgaattcaccgctgctttccggaagacgcatataccatcaggagtagtgtctctcaagaagaaggagttcaggtcgcttactcagggatctcgctctgttacggagtatctgcacgagttcaatcgtcttgctcgttatgctccggaagatgtgcgcaatgatgaagagcgccaggagaagtttttgggaggacttaatgatgagctttcttacccactcatggttggagattatcctgatttccagaaattagtggataaggctattcgtcaggaggacaagtacaatcgcatggagcagaagaaacgtcggattgctcaattcaagacacaacagggaaataatcagaagccgcgtcttactttaggaccccagtccatgccacatggaggttcttcgtctgttgttcgtccgcagcgtcagttcttcaacaacaatgctggcaacaacatccgtaatcaagctccacgtcctgttgcagctccagtacagcaacaacctgccaagagggagcaaggcagcaagcccgtggtgtgtttcaactgtggagacccaggacattatgctgacaagtgtccgaagccccgtcgcgtgaaggttgtccctgcccagagtaactctgctgtaccagcatccaaggcccgtgtcaatcatgtcgctgctgcagaagctcaagatgctccagatgtgattttggtccgggagtatcctgatgtgttcccagatgatttacctgccaatgagttggcagaagtcaagaggcaagtagacgatttgctacagaaaggatacatcagaccgagttcatcaccttggggagctccggttatttttgtggaaaagaaagatcatacccagaggatgtgtgtggactatcgtgcactaaacgatgtgactatcaagaataagtatccgctacccagaattgatgatttgtttgatcagcttaaaggtgccactgttttctccaagatagatcttcgatcagggtatcaccagttgagaatcaaagaggaagatatacctaagacagcttttaccactaggtatgggttgttcgaatgtactgttatgtcttttggacttaccaatgcccctgctttcttcatgaacttgatgaataaggtgtttatggaatacctagacaagttcgtggcggtctttattgatgatattcttatctactctcgaaccaaagaagagcatgaggaacatcttcgccttgcattggagaagctacgagaacatcaactgtatgctaagtttagcaagtgtgaattttggttgtctgaagtgaaattccttggtcacgtcatctcagccggaggagttgccgtcgatcctagtaacgtggaatccgtaaccaattggaagcaaccaaagacagtttcagagattcgcagtttcctaggcctcgcaggatattaccggaggtttatagagaatttttccaagattgctaagcccatgacacgactgcttcagaaagatgtgaagtacaagtggtcggaagaatgtgagcagagttttcaagagttgaagaatcgcttagtatcagctcctattttgactttgcctgatccaaagaagggtttccaagtgtattgcgatgcatccaaacttgggttaggttgtgttctgatgcaagatgggaaggtggttgcctatgcatctcgacagttacgtccgcatgaaaagaactaccctactcatgatcttgagttagctgcagtagttcatgcgttgaagatttggcgtcattatcttttcggtactcgtacagaggtatataccgatcacaagagtttaaagtatatctttactcagccggatctgaacatgagacaacggagatggttggaattaattaaggattatgacatgggaattcattatcatccgggaaaggctaatgttgtagcagacgctcttagcagaaaaggctattgcaatgctacaaaaggacgacagttgccattggaattatgcaaggaatttgaaagattaaatttgggaattgtcggtagaggtttcgttgcagccttagaagcgaagcccactctaattgatcaagttagagaagcccaaattaatgatcctgatattcaagagatcaagaagaatatgagaagaggaaaagctattggtttcttggaggatgagcaaggaactgtatggttgggtgaaagaatttgtgtccctgacaacaaagatttgaaagatgcaattctgaaagaagctcacgatactttatactccattcaccctggtagtactaagatgtaccaggatctcaaggaaagattttggtgggcaagtatgaagcgtgaaatcgcagaatatgtagcagtatgtgatgtttgtcagcgagtcaaggcagaacatcagaaacccgccggtttgttgcagcctttgaagattcctgaatggaaatgggaagaaataggtatggattttatcactggtttgcccagaacgtcatcgggccatgactctatttgggtgatagtcgacagacttaccaaagtggctcattttattccggtaaagacaacctattccggaagtcgcttggcggaattgtatatggcaaggattgtgtgtttgcatggcgtccccaagaagatagtgtctgatcgaggcagtcagtttacttcaaatttttggaagaaacttcaggaagagatgggttctaagctgaactttagcactgcttatcatccgcagacagacggacaaaccgaaagggtgaatcagattttggaagacatgttgagagcttgtgctttagatttcagtggaagttgggataagaatctaccctatgcagaattctcgtataacaacagttatcaagctagtcttcagatggctccttacgaagcactgtatggtcggaagcggagtgcgtgtcgcactccgcttttgtgggatcaaacgggagaacgtcaggttttcgggacggatatcctaagggaagcagaagaaaaggtaaagatcattcaagaaagattgcgagtggctcagtctcgacataagagttatgccgacaatcgccgtagagatttgagttttgaagaaggagactatgtgtatcttcgtgtcacgcctcttcgaggagttcatcgttttcacaccaagggaaaattggcaccgcgttttgtgggaccttataagattgtcagtagaagaggagaggttgcttatcagttagaattacctcaatctttggcaggagtccataatgtgttccatgtgtcgcaattgaaaaagtgtttaaggatacctaccgaagaagctaatattgagcagatagaagtccaagaggatttgacttatgttgagaaaccaatccatatcttggaaacaaatgagagaagaaccaggaatcgagttatccgtttctgcaaagttcaatggagtaatcactcggaagaagagtcaacttgggaacgagaagatgaattgaagtcagctcatccgcatctgttcgccagttcttccgaatctcgaggacgagattctgtttaa

SEQ ID NO: 23469 - DNA, 219 bp, Oryza sativa
  Clone ID: PAT_MRT4530_28546C.1
atggggaggcagtggcagcgagtagagataaggaggaaagggtgggcggctcgggatgggggcggagatggagcaaagctcaccaggcacaacggaggcgcggacgggatgcggacagatcaactaacctccgatgctaatagaaataaatcaggcctgatcaactcccctacacagaatgtgagacagtgcaagacacctgctgattgtcgcacctga

SEQ ID NO: 23470 - DNA, 4956 bp, Oryza sativa
  Clone ID: PAT_MRT4530_28547C.1
atgccgcgctacaagcctgagtacctgtttggtgttgagggttttgtccaggagttgcgtacgatgtcctttgtcataggatttgggactgcccctttttatgctcagattcctcatgatcgtcatgaagagaagtgccgagtcaaagtcaccttgaatagtaatagtgaagatgtcccctcagtgatgttcgaagctggaggaagaaactacatccatgcatgtcaggaagtggcaaggatcgccataggagagctccgtgatcgctacagtgatcggttggctgacactgagtatcgctaccatcctcgtcaaccacagggaagtgaccgtggcagctaccttgagactgaaggaattgagaatgatgctaccacaaggcatttagttgagatgctgtgggctatggatgaaagccgtgcagagactgtgttagcggctcaagatcgtgaagattggaatcgtggtaagatttgcaagttagaagacaaggtggatcgtttggagaaggaactagccgcgttgaagggagaagcaccaccgcagaaggccaggattcgtcttaccgcaaggaagagagctctatttgtccctcgctatcaattggcgccaaaagttcgtgtggtggagaaagaagttgccccagcagatcctccggtcatcatcataagtgatgatgaagaagaagaatccaagcgcacccattccaagattgagtgggtagcaactcaagatgatgaagacgagccgaacgagcctacaatcgacctccgatgctcggaagaactagacaacgggaatggccccaacagcaacaataacaacaacaatggagagaacccaacacttgctcaagttcttgctcaacagactcagttaatgaacatgatgatgcagcaacttcagaatcagcaaaaccaaggaaataaccatgcacctccccagaacaagttagcagaatttcttcgtgtgaggccgcctattttctctagtaccactaatcctgttgaagctggtgattggttgcatgccatagagaagaagatggatttgcttcagtgcactgatcaggagaaggtctcatttgcatcacatcagttgcttggccctgcctctgaatggtgggatcacttccgcctgaataggattactgctgaacctattacttggcttgaattcaccgctgctttccggaagacgcatataccatcgggagtggtgtctctcaagaagaaggagttcaggtcgctcacccagggatctcgctctgttacggagtatctgcacgagttcaatcgtcttgctcgttatgctccggaagatctgcgcaatgatgaagagcgccaggagaagtttttgggaggacttaatgatgagctttcttacccactcatggttggagattatcctgatttccagaaattagtggataaggctatacgtcaggaggacaagtacaatcgcatggagcagaagaaacgccggattgctcacttcaaggcacaacaggggagtaatcagaagccgcgtcttactttaggaccccagtctgtgccacagggaggttcttcgtccattgttcgtccgcagcgtcagttcttcaacaacaatgctggcaacaacatccgtaatcaagtcccacgtcctgttgctgcctcgacacagcaacaacctgccaagaggaagcaaggcagcaagcccgtggtgtgtttcaactatggagacccaggacattatgctgacaagtgtccgaagccccgacgcgtgaaggttgtccctgcccagaataactctgctgtaccagcatcaaaggcccgtgtcaatcatgttgctgctgcagaagctcaagatgctccagatgtgattttgggtacgttccctgttaactcagttcctgcaactgtgcttttcgattctagtgctacacattcattcttatctatgagttttgcgggaaatcatgggatggaagtagaagatcttagacgtcctttgatggttagtaccccaagtaatcaagcactctctctgcaacgtagcccctctgtcagaatagaaattcaaggggtaccatttctagccaatcttatcttgttagaatctaaagaccttgacgtcattctagggatggactggttagccaaacataaaggtgtgatagactgtgccaacagaaaagtaactctcatcagcaatgatggtcgagttgtaactgttcatgcattgtcatctgagtttttaaggtcaagactgaaccagataactttgggagagattcctatagttcgggagtatcccgatgtgttcccagatgatttacctggtatgccgcctaaaagggatatagagttcagaatagatttggtacctggaacaactccgatccataagagaccttatagaatggcagccaatgagttggcagaagtcaaaaggcaagtagatgatttgcttcagaagggatacatcagaccgagttcatcaccatggggagctccagttatttttgtggaaaaaaaagaccatacccagaggatgtgtgtggactatcgtgcactaaatgatgtgactatcaagaataagtatccgctacccagaattgatgatttgtttaatcagcttaaaggtgccactgttttctccaagatagatcttcgatcagggtatcaccagttgagaatcaaagagtatgggttgttcgaatgtacggttatgtcttttggacttaccaatgctcctgctttcttcatgaacttgatgaataaagtatttatggaatacctagacaagttcgtggtggtctttattgatgacattcttatctactcccgaaccaaagaagagcatgaagaacatcttcgccttgcattggagaagctacgagagcatcaactgtatgctaagtttagcaagtgtgaattttggttgtctgaagtgaaattccttggtcacgtcatctcagccggaggagttgccgtcgatcctagtaacgtggaatccgtaaccaattggaagcaaccaaagacagtttcagagattcacagttttctaggcctcgcaggatattatcgaaggtttatagagaatttttccaagattgctaagcccatgacacgcctgcttcagaaatatgtgaagtacaagtggtcggaagaatgtgagcagagttttcaagagttgaaaagtcgtttaatatcagctcctattttgattttgcctgatccaaagaagggtttccaagtgtattgcgatgcatctaaacttgggttaggttgtgttctgatgcaagatgggaaggtggttgcctatgcatctcgtcagttacgtccgcatgaaaagaactaccctactcatgatcttgaattggccgcagtagttcatgcgttgaaaatttggcatcattatcttttcggtactcgtacagaggaatttgaaagattaaatttgggaattgtcagtagaggttttgttgcagccttagaagcgaagcccacactaattgatcaagttagagaagctcaaattagtgatcctgatattcaagagatcaagaagaatatgagaagaggaaaagctatcggtttcttggaggatgagcaaggaactgtatggttgggcgagagaatttgtgtccctgacaacaaagatttaaaggatgcaattctgaaagaagctcatgatactttatactccattcaccctggtagtactaagatgtaccaggatctcaaggaaagattttggtgggcaagtatgaagcgtgaaatcgcagaatacgtagcggtatgtgatatttgccagcgagtcaaggcagaacatcagaaacctgccggtttgttgcagcctttgaagattcctgaatggaaatgggaagaaatcggtatggattttatcactggtttacccagaacgtcatcaggccatgactctatttgggtaatagtcgacagacttaccaaagtggcacatttcatcccggtaaagacaacttattccggaagtcggttggcagaattatatatggcaaggattgtgtgtttgcatggtgtccctaagaaaatagtgtctgatcgaggcagtcagtttacttcaaatttctggaagaaacttcaggaagaaatgggttctaagctgaactttagtactgcttatcatccacagacagacggacaaaccgaaagggtgaatcagattttggaagacatgttgagagcttgtgctttagatttcggtggaagttgggataagaatctaccttatgcagaattctcgtataacaacagttatcaagctagtcttcagatggctccttacgaagcactgtatggtcggaagtgtcgcactccgcttttgtgggatcaaacgggagaacgtcaggttttcgggacggatatcttaagagaagcagaagaaaaggtaaagatcattcaagaaagattgcgtgtggctcagtctcgtcataagagttatgccgacaatcgccgtagagatttgagttttgaagaaggagattatgtgtatcttcgtgtcacgcctcttcgaggagttcatcgttttcacaccaaaggaaaattggcaccgcgttttgtgggaccttataagattgtcagtagaagaggagaggttgcttatcagttagaattacctcaatctttggcaggagtctataatgtgttccatgtgtcacaattgaaaaagtgtttaagggtacctaccgaagaagctaatattgagcagatagaagtccaagaggatttgacctatgttgagaaaccaatccgtatcttggaaacaaatgagagaagaaccaggaatcgagttatccgtttttgcaaagtccagtggagtaatcactcggaagaagaatcaacttgggaacgagaagatgaattgaagtcagctcatccgcatctgttcgccagttcttccgaatctcgaggacgagattctgtttaa

SEQ ID NO: 23471 - DNA, 291 bp, Oryza sativa
  Clone ID: PAT_MRT4530_28548C.1
atggcagaagtcgaggaagaccttgtcctttttggtcatcgcacaatcatcctggcccttggagtcgataaatgcatcgcgagcaaagctccggccgatgttggcgactcgagccctggaggaagcccatcaaatttcctcaacttgatcaatgacaaccctacagacgtggcgcaggaccctgagaaccctcatggggtcgcgcctccctccaggggcacggctcagagacggtcttgggacggcgtgagcgaaagcatggctcaaggctacgcattgtatatgccctaa

SEQ ID NO: 23472 - DNA, 4089 bp, Oryza sativa
  Clone ID: PAT_MRT4530_28549C.1
atgccgcgttacaagcctgagtacctgtttggtgttgagggttttgtccaggagttgcgttcgatgtcctttgtcattggatttgggactgcccctttttatgcccagattcctcatgatcgtcatgaagagaagtgccgagtcaaagtcaccttgaacagtaatagtgaagatatccccttagtgatgtttgaagctggaggaagaaactacatccatgcatgtcaggaggtggcaaggatcgccataggagagctccgtgatcgctacagtgatcaattggccgacactgagtatcgctaccatcctcgtcaaccccagggaagtgaccgtggcagctatcttgagactgaaggaattgagaatgatgctaccacgaagcatttggttgagatgttgtgggctatggatgaaagtcgtgcggagactgtgttagccgctcaagatcgtgaagaccggaatcgtggtaagatttgtaagttagaagacaaggtggatcgtttggagaaggaattagccgcattgaagggagaagcaccgccgcagaaggccaggattcgtcttaccgcaaggaagagagctctatttgtccctcgctatcaactggcgccaaaggttcgtgtggtggagaaagaagttgccccagctcaagcggatcctccggtcatcatcataagtagtgatgaagaagaagaatccaagcgcaacaattccaagattgagtgggtagcaactcaagatgataaagacgagccttcaatcgacctccgatgcttggaagaactagagtgactttttccccggtttctcttcttgtgccctgtccatgccaatggtgaacactcgcagcaacgggaatggtcccaacaaccccaataacaacaatggagagaatcccattctggcccaagttcttgctcaacagacacagcttatgaacatgatgatgcagcaatttcagaatcaggaaaaccaaggaaataaccatgcacctccccagaacaagttagcagaatttcttcgtgtgaggccacctgttttctctagtaccactaatcctgttgaagctagtgattggctgcatgccatagagaagaagttggatttacttcagtgcactgatcaggagaaggtctcatttgcatcacatcagttgcatggccctgcctctgaatggtgggatcacttccgccttaacaggactactgctgaacctatcatttggcttgaattcaccgctgctttccggaagacgcatataccatcaggagtagtgtctctcaagaagaaggagttcaggtcgcttacccagggatctcgctctgttacggagtatctgcacgagttcaatcgtcttgctcgttatctccggaagatgtgcgcaatgatgaagagcgccaggagagtttttgggaggacttaatgatgagctttcttacccactcatggttggagattatcctgatttccagaaattagtggataaggctattcgtcaggaggacaagtacaatcgcatggagcagaagaaacgtcggattgctcaattcaagacacgacagggaaataatcagaagccgcatcttactttaggaccccagcccatgccacagggaggttcttcgtctgttgttcgtccgcagcgtcagttcttcaacaacaatgctggcaacaacatccgtaatcaaggtccacgtcctgttgcagctccagcacagcaacaacctgtcaagagggagcaaggcagcaagcccgtggtgtgtttcaactgtggagatccaggacattatgctgacaagtgtccgaagccccgacgcgtgaaggttgtccctgcccagaataactctgctgtaccagcatccaaggctcgtgtaaatcatgtcgctgctgcagaagctcaagatgctccagatgtgattttgggtacgttccttgttaactcagttcctgcaacagtacttttcgattctggtgctacacattcattcttatctatgagttttgtgggaaatcatgggatggaagtagaagatcttagacgtcctttgatggttagtaccccaagtaatcaagcactctctttgcaacgtagcccctctgtcagaatagaaattcaaggagtaccatttctggccaatcttatcttgttagaatccaaagaccttgatgtcatcctagggatggactggttagccagacataaaggtgtgatagactgtgccaacaaaaaagtaactctcaccagctatgatggtcgagttgtaactgttcatgcattgtcatctgagtctttaaggtcaagactgaaccagataactttggaagagattcctatagtccgggagtatcctgatgtgttcccagatgatttacctggtatgccgcctaaaagggatatagagttcagaatagatttggtacctggaacaactccgatccataagagaccttatcgaatggcagccaatgagttggcagaagttaagaggcaagtagatgatttgctacagaaaggatacatcagaccgagttcatcaccatggggagctccggttatttttgtggaaaagaaagatcatactcagagaatgtgtgtggactatcgtgcactaaacgatgtgactatcaagaataagtatccactacccaggattgatgatttgtttgatcagcttaaaggtgccactgttttctccaagatagatcttcgatcagggtatcatcagttgagaatcaaagaggaagatatacctaagacagcttttaccactaggtatgggttgttcgaatgtactgttatgtcttttggacttaccaatgcccctgctttcttcatgaacttgatgaataaggtgtttatggaatacttagacaagttcgtggtggtctttattgatgatattcttatctactctcgaaccaaagaagagcatgaggaacatcttcgccttgcattggagaagctacgagaacatcaactgtatgctaagtttagcaagtgtgaattttggttgtccgaagtgaaatttcttggtcacaaagatgtgaagtacaagtggtcggaagaatgtgaacagagttttcaagaattgaaaagtcgcttaatatcagctcctattttgattttgcctgatccaaagaagggtttccaagtgtattgtgatgcatccaaacttgggttaggttgtgttctgatgcaagatgggaaggtggttgcctatgcctctcgacagttacgtccgcatgagaagaactaccctactcatgatattgagttagctgcagtcgttcatgcattgaagatttggcgtcattatcttttcggtactcgtacagaagtgtacaccgatcacaagagtttaaagtatatctttactcagccggatctgaacatgagacaacggagatggttggaattaattaaggattatgacatgggaattcattatcatccggggaaggctaatgttgtagcagacgctcttagcagaaaaggctattgcaatgctacagaaggacgacagttgccattggaattatgcaaggaatttgaaagattaaatttgggaattgtcggtagaggtttcgttgctgtcggtgatatgggaccgggagtattgcgcccggaggcttgaggcagatggaatcgcccacgtggcctggcaccttcggggacgtcgggcccgagggtgaggtgtccgccctcctcctgatttccccgagggggggtcgggttgctcctgccccggccccgagggccgaggtggcgactggcggtctgacgcacgcctcgccccatcccgtcaggatgagagcctccaagcactcgtccctagccggagccggcgtgttagctcctggaggtggcacgttggacccggtcagatatatgtcaggcttcatcctaaccattacaggcaagatattgtatgaagaagggcgaacatgcagattgttaaactgacacgtggtggacaagaatgaccgatttgtgaccggtctgacactggtcatgtcgccagcagacagccatgttcccacgtcgcgcctgcctccggcggaagtggaggtaggtatgggccgtcccat

SEQ ID NO: 23473 - DNA, 270 bp, Oryza sativa
  Clone ID: PAT_MRT4530_2854C.1
atgcgccgccaccgccgccccgccgtggccgagccgtcccggctcgggccggcggcgttggccgcgcacgtcacgcctttgctcggctcagtagcaagagcgaggaagaagaatgggaaaagaaaagaagagacagcaggggtaatctttatgcctcgggagagtgttgccggtgatgaattgggagtcatcttgggaaaagatgacgtccggatgatcaggatatcatgcgggatgcttaggctaaagattgatgcacgtagttggtga

SEQ ID NO: 23474 - DNA, 2848 bp, Oryza sativa
  Clone ID: PAT_MRT4530_28550C.1
atggtgggttgtgggcacatggttttgatggtcgtgctcatgacaattaaggaccggttcacgagtttcggttgtgaaacatttatcgtgccaaccacaagccagcatgggcaacggctttatcttttgtatagcatggttcattgcggggcaccagactgagaagtggcggagataagcccacgggggtcgctggggagtccatgccttgtttataagggggtgattatgatccaggaaggtgcgctgcagtggattgtgttatgcgaggggtattgtcacaactcctttccgagatgccgcgttacaagcctgagtacctgtttggtgttgagggttttgtccaggagttgcgtacgatgtcctttgtcattggatttgggactgcccctttttatgcccagattcctcatgatcgtcatgaagagaagtgccgagtcaaagtcaccttgaacagtaatagtgaagatatcccctcagtgatgtttgaagctggaggaagtaactacatccatgcatgtcaggaggtggcaaggatcgccataggagagctccgtgatcgctaccgtgatcagttggccgacactgagtatcgctaccatcctcgccaaccccagggaagtgaccgggccaccgctcaagatcgtgaagaccggaatcgtggtaagatttgcaagttagaagacaaggtggatcgtttggagaaggaattagccgcattgaagggagaagcaccgccgcagaaggccaggattcgtcttaccgcaaggaagagagctctatttgtccctcgctatcaactggcgccaaagatggtgaacactcgcagcagcgggaatggtcccaacaaccccaataacaacaatggagagaatcccactcttgcccaagttcttgctcaacagacacagcttatgtacatgatgatgcagcaatttcagaatcagcaaaaccaaggaaataaccatgcatctccccagaacaagttagcaggatttcttcgtgtgaggccgcctgttttctctagtaccactaatcctgttgaagctagtgattggctgcatgccatagagaagaagttggatttacttcagtgcactgatcaggagaaggtctcatttgcatcacatcagttgcatggccctgcctctgaatggtgggatcacttccgcctgaataggactactactgaacctatcacttggcttgaattcaccgctgctttccggaagacgcatataccatcaggagtagtgtctctcaagaagaaggagttcaggtcgcttacccagggatctcgctttgttacggagtatctgcacgagttcaatcgtcttgctcgttatgctccggaagatgtgcgcaatgatgaagagcgccaggagaagtttttgggaggacttaatgatgagctttcttacccactcatggttggagattatcctgatttccagaaattagtggataaggctattcgtcaggaggacaagtacaattgcatggaacagaggaaacgtcggattgctcacttcaaggcacaacaggggagtaatcagaagccgcgtcttactttaggaccccagtctatgccacagggaggttcttcgtctgttgttcgtccgccgcgtcagttcttcaacaacaatgctggcaataacatccgcaatcaaactccacgtcctgttgcagctccaacacagcaacagcctgccaagagggagcaaggcagcaagcccgtggttgtccctgcccagagtaactctgctgtaccagcatcaaaggcccgtgtcaatcatgttgctgctgcagaagctcaagattctccagatgtgattttgggtgctacacattcattcttatctatgagttttgcgggaaatcatgggatggaagtagaagatcttagacatcctttgatggttagtaccccaagtaatcaagcactctctttgcaacgtagcccctcggtcagaatagaaattaaaggagtaccatttctggccaatcttatcttgttagaatccaaagaccttgatgtcatcctagggatggactggttagccagacatagaggtgtgatagactgtgccaacagaaaagtaactctcaccagcaatgatggtcgagttgtgactgttcatgcattgtcttctgagtctttaaggtcaagactgaaccagataactttggaagagattcctatagtccgggagtatcccgatgtgttcccagatgatttacctggtatgccgcccaaaagggatatagagttcagaatagatctggtaccaggaacaactccaatccataagagaccttatcgaatggcagccaatgagttggcagaagtcaagaggcaagtggacgatttgcttcagaaaggatacatcagaccgagttcatcaccatggggagctccggttatttttgtggaaaagaaagaccatacccagagaatgtgtgtggactatcgtgcgttaaacgatgtgactatcaagaataagtatccgctgcccagaattgatgatttgtttgatcagcttaaaggtgctaccgttttctccaagatagatcttcgatcagggtatcaccagttgagaatcaaagaggaagatatacctaagacagcttttaccactaggtatggattgttcgaatgtacggttatgtcttttggacttaccaatgcccctgctttcttcatgaacttgatgaataaggtgtttatggaatacctagacaagttcgtagtggtctttatagatgacattcttatctactctcgaaccaaagaagagcatgaagaacatcttcgccttgcattggagaagctacgagagcatcaact

SEQ ID NO: 23475 - DNA, 5151 bp, Oryza sativa
  Clone ID: PAT_MRT4530_28551C.1
atgtctttcgtgattagtttcacacttctcaccatagttaatgatgctataactggtaataatttgattagctcctggtttggaatgatgccgcgctacaagcctgagtacttgtttggtgttgagggttttgtccaggagttgcgtacaatgtcctttgtcattggatttgggactgcccctttttatgcccagattcctcatgatcgtcatgaagagaagtgccgagtcaaagtcaccttgaacagtaatagtgaagatatcccctcagtgatgttcaaagctggaggaagaaactacatccatgcatgtcaggaagtggcaaggatcgccataggagagcttcgcgatcgctacagtgatcaattggccgacactgagtatcgctaccatcctcgtcaaccacagggaagtgaccgtggcagttaccttgagactgaaggaattgagaatgatgctaccacaaggcatttggtggagatgctgtgggctatggatgaaagtcgtgcggagattgtgttagcagctcaagatcgtgaagaccggaatcgtggtaagatttgcaagctagaagacaaagtggatcgtttggagaaggaactagctgtattgaagggagaagcaccaccgcagaaggccaggattcgtctcaccgcaaggaagagagctctatttgtccctcgctatcaattggcgccaaagtttcccccggtttctcttcttgtgccctgtccatgccagatggtgaacactcgcagcaacgggaatggccccagtaacaataacaacggagagaatcccactcttgctcaagttcttgctcaacagacacagctaatgaacatgatgatgcagcaactccagaaccagcaaaaccaaggaaataaccatgcacctccccagaacaagttagcagaatttcttcgtgtgaggccgcctgttttctctagcaccactaatcctgttgaagctggtgattggctgcatgccatagagaagaagttggatttgcttcagtgcactgatcaggagaaggtctcatttgcatcacatcagttgcatggccctgcctctgaatggtgggatcacttccgtctgaacaggactactgctgaacctatcacttggcttgaattcaccgctgctttccggaagacgcatataccatcgggagtggtgtctctcaagaagaaggaattcaggtcgctcactcagggatctcgctctgttacggagtatttgcacgagttcaatcgtcttgctcgttatgctccggaagatgtgcgcaatgatgaagagcgccaggagaagttcttggaaggacttaatgatgagctttcttacccactcatgactggggattatcatgatttccagaagttagtggataaagctattcgccaggaggaaaagtacaatcgtatggagcaaaagaaacgccggattgctcaattcaagacacaacaggggaataatcagaagccgcgtcttactttaggaccccagtctatgccacagggaggttcttcgtctgttgttcgtccgcagcgtcagttcttcaacaacaatgctggcaacaacatccgtaatcaagctccacatcctgttgcagctccagcacagcaacaacctgccaagagggagcaaggcagcaagcccgtggtgtgtttcaactgtggagacccaggacattatgctaacaagtgtccgaagccccgacgcgtgaaagttgtccctgtccagagcaactctactgtaccagcatcaaaggcccgtgttaatcatgttgctgctgcagaagctcaagatgctccagatgtgattttgggtacgttccttgttaacttagttcctgcaacagtgcttttcgattctggtgctacacattcattcttatctatgagttttgcgggaaatcatgggatggaagtagaagatcttagacgtcctttgatggttagtaccccaagtaatcaagcactctctttgcaacgtagcccctctgtcagaatagaaattcaaggagtaccattcctggccaatcttatcttgttagaatccaaagaccttgatgtcatcctagggatggactggttagccagacataaaggtgtgatagactgtgctaacagaaaagtaactctcaccagcaatgatggtcgagttgtaactgttcatgcattgtcttctgagtctttaaggtcaagactgaaccagataactttggaagagatttctatagtccgggagtatcccgatgtgttcccatatgatttacctggtatgccgcccaaaagggatatagagttcagaatagatttggtacctggaacaactccgatccataagagaccttatagaatggcagccaatgagttggcagaagtcaagaggcaagtagatgatttgcttcagaaaggatacatcagaccgagttcatcaccatggggagctccggttatttttgtggaaaagaaagaccatacccagagaatgtgtgtggactatcgtgcactaaatgatgtgactatcaagaataagtatccactacccagaattgatgatttgtttgatcagcttaaaggtgctactgttttctccaagatagatcttcgatcagggtatcaccagttaagaatcaaagaggaagatatacctaagacagcttttaccactaggtatgggttgttcgaatgtactgttatgtcttttggacttaccaatgcccccgctttcttcatgaacttgatgaataaggtgtttatggaatacctagacaagtttgtggcggtctttattgatgacattcttatctactctcgaaccaaagaagagcatgaagaacatcttcgccttgcactagagaagttacgagaacatcaactgtatgctaagtttagcaagtgtgaattttggttgtctgaagtgaagttccttggtcacgtcatctcagccggaggagttgccgttgatcctagtaatgtggaatccgtaaccaactggaaacaaccgaagacagtttcagagatccgcagtttcctaggcctcgcaggatattatcggaggtttatagagaatttttccaagattgctaagcccatgacacgactgcttcagaaagatgtgaagtacaagtggtcggaagaatgtgagcagagttttcaagagttgaaaagtcgcttgatatcagctcctattttgattttacctgatccaaagaagggtttccaagtgtattgcgatgcatccaaacttgggttaggttgtcttctaatgcaagatggaaaggtggttgcctatgcatctcgtcagttacgtccgcatgagaagaactaccctactcatgatcttgagttagctgtagtagttcatgcgttgaaaatttggcgtcattatcttttcggtactcgtacagaggtatataccgatcacaagagtttaaagtatatctttactcagccggatctgaacatgagacaacggagatggttggaactaattaaggattatgacataggaattcattatcacccgggaaaggctaatgttgtagcagacgctcttagtagaaaaggctattgcaatgctacggaaggacgacagctgccattggaattatgcaaggaatttgaaagattaaatttgggaattgtcagtagaggtttcgttgcagccttagaagcgaagcccactctaattgatcaagttagagaagcccaaattaatgatcctgatattcaagagatcaagaaaaatatgagaagaggaaaagctatcggtttcttggaggatgagcacggaactgtatggttgggtgagagaatctgtgtccccgacaacaaagatttaaaagatgcaattctgaaagaagctcatgatactttatactccattcaccctggtagtactaagatgtaccaggatctcaaggaaagattttggtgggcaagtatgaagcgtgaaatcgcagaatacgtagcagtatgtgatgtttgtcagcgagtcaaggcagaacatcagaaacccgccggtttgttgcagcctttgaagattcctgaatggaagtgggaagaaatcggtatggattttatcactggtttacccagaacgtcatcaggtcatgactctatttgggtgatagtcgacagacttaccaaagtagctcatttcattccggtaaagacaacctattccggaagtcgcttagcggaattgtacatggcaaggattgtgtgtttgcatggcgtccctaagaaaatagtgtctgatcgaggcagtcagtttacctcaaatttttggaagaaacttcaggaagagatgggttctaagctgaactttagtactgcttatcatccgcagacagacggacaaaccgaaagggtgaatcagattttagaagacatgttgagagcttgtgctttagatttcgatggaagttgggataagaatctaccttatgcagaattttcgtacaacaacagttatcaagctagtcttcagatggctccttacgaagcactgtatggtcggaagtgtcgcactccgcttttgtgggatcaaacgggagaacgtcaggttttcgggacggatatcctaagggaagcagaagaaaaggtaaagatcattcaagaaagattgcgagtggctcaatctcgtcataagagttatgccgacaatcgccgcagagatctaagttttgaaggagattatgtgtatcttcgtgtcacgcctcttagaggagttcatcgtttccacaccaaaggaaaattggcaccgcgttttgtgggaccttataagattgtcagtaaaagaggagaggttgcttatcagttggagttacctcaatctttggcaggagtccataatgtgttccatgtgtcgcaattgaaaaagtgtttaagggtacctaccgaagaagctaatctcgaacagatagaagtccaagaggatctgacctatgttgagaaaccaatccgtattttggaaacagatgagagaagaaccaggaatcgagttatccgcttttgcaaagtccaatggagtaatcactcggaagaagaatcaacttgggaacgagaagatgaattgaagtcagctcatccgcatctgttcgccagttcttccgaatctcgaggacgagattctgtttaa

SEQ ID NO: 23476 - DNA, 5079 bp, Oryza sativa
  Clone ID: PAT_MRT4530_28552C.1
attccgtcgtttccgagagtccgtttttgccggagaagagtttgaagagttccaaggccagcaggcaagctcctggtttggaatggtatattcctggtttggagatagaactgtgagccggggtggttgttcagaatggttgggcctatgcaacaggatgccgcgctacaagcctgagtacttgttggtgttgagggttttgtccaggagttgcgtacaatgtcctttgtcatggatttgggactgcccctttttatgcccagattcctcatgatcgtcatgagagaagtgccgagtcaaagtcaccttgaacagtaatagtgaagatatccctcagtgatgttcaaagctggaggaagaaactacatccatgcatgtcagaagtggcaaggatcgccataggagagcttcgcgatcgctacagtgatcattggccgacactgagtatcgctaccatcctcgtcaaccacagggaagtaccgtggcagttaccttgagactgaaggaattgagaatgatgctaccacaggcatttggtggagatgctgtgggctatggatgaaagtcgtgcggagatgtgttagcagctcaagatcgtgaagaccggaatcgtggtaagatttgcagctagaagacaaagtggatcgtttggagaaggaactagctgtattgaaggagaagcaccaccgcagaaggccaggattcgtctcaccgcaaggaagaagctctatttgtccctcgctatcaattggcgccaaagatggtgaacactccagcaacgggaatggccccagtaacaataacaacggagagaatcccactttgctcaagttcttgctcaacagacacagctaatgaacatgatgatgcacaactccagaaccagcaaaaccaaggaaataaccatgcacctccccagacaagttagcagaatttcttcgtgtgaggccgcctgttttctctagcaccctaatcctgttgaagctggtgattggctgcatgccatagagaagaagttgatttgcttcagtgcactgatcaggagaaggtctcatttgcatcacatcgttgcatggccctgcctctgaatggtgggatcacttccgtctgaacaggctactgctgaacctatcacttggcttgaattcaccgctgctttccggaaacgcatataccatcgggagtggtgtctctcaagaagaaggaattcaggtgctcactcagggatctcgctctgttacggagtatttgcacgagttcaatgtcttgctcgttatgctccggaagatgtgcgcaatgatgaagagcgccagagaagttcttggaaggacttaatgatgagctttcttacccactcatgatggggattatcatgatttccagaagttagtggataaagctattcgccagaggaaaagtacaatcgtatggagcaaaagaaacgccggattgctcaattaagacacaacaggggaataatcagaagccgcgtcttactttaggaccccgtctatgccacagggaggttcttcgtctgttgttcgtccgcagcgtcagtcttcaacaacaatgctggcaacaacatccgtaatcaagctccacatccgttgcagctccagcacagcaacaacctgccaagagggagcaaggcagcagcccgtggtgtgtttcaactgtggagacccaggacattatgctaacaaggtccgaagccccgacgcgtgaaagttgtccctgtccagagcaactctacgtaccagcatcaaaggcccgtgttaatcatgttgctgctgcagaagctcagatgctccagatgtgattttgggtacgttccttgttaacttagttcctcaacagtgcttttcgattctggtgctacacattcattcttatctatgagtttgcgggaaatcatgggatggaagtagaagatcttagacgtcctttgaggttagtaccccaagtaatcaagcactctctttgcaacgtagcccctcttcagaatagaaattcaaggagtaccattcctggccaatcttatcttgttgaatccaaagaccttgatgtcatcctagggatggactggttagccagactaaaggtgtgatagactgtgctaacagaaaagtaactctcaccagcaatatggtcgagttgtaactgttcatgcattgtcttctgagtctttaaggtcagactgaaccagataactttggaagagatttctatagtccgggagtatccgatgtgttcccatatgatttacctggtatgccgcccaaaagggatataagttcagaatagatttggtacctggaacaactccgatccataagagacctatagaatggcagccaatgagttggcagaagtcaagaggcaagtagatgtttgcttcagaaaggatacatcagaccgagttcatcaccatggggagctcggttatttttgtggaaaagaaagaccatacccagagaatgtgtgtggatatcgtgcactaaatgatgtgactatcaagaataagtatccactacccaaattgatgatttgtttgatcagcttaaaggtgctactgttttctccaagtagatcttcgatcagggtatcaccagttaagaatcaaagaggaagatatcctaagacagcttttaccactaggtatgggttgttcgaatgtactgttagtcttttggacttaccaatgcccccgctttcttcatgaacttgatgaataggtgtttatggaatacctagacaagtttgtggcggtctttattgatgaattcttatctactctcgaaccaaagaagagcatgaagaacatcttcgcctgcactagagaagttacgagaacatcaactgtatgctaagtttagcaaggtgaattttggttgtctgaagtgaagttccttggtcacgtcatctcagcggaggagttgccgttgatcctagtaatgtggaatccgtaaccaactggaacaaccgaagacagtttcagagatccgcagtttcctaggcctcgcaggaattatcggaggtttatagagaatttttccaagattgctaagcccatgaccgactgcttcagaaagatgtgaagtacaagtggtcggaagaatgtgagcgagttttcaagagttgaaaagtcgcttgatatcagctcctattttgatttacctgatccaaagaagggtttccaagtgtattgcgatgcatccaaactgggttaggttgtcttctaatgcaagatggaaaggtggttgcctatgcattcgtcagttacgtccgcatgagaagaactaccctactcatgatcttgagtagctgtagtagttcatgcgttgaaaatttggcgtcattatcttttcggactcgtacagaggtatataccgatcacaagagtttaaagtatatctttatcagccggatctgaacatgagacaacggagatggttggaactaattaagattatgacataggaattcattatcacccgggaaaggctaatgttgtagcgacgctcttagtagaaaaggctattgcaatgctacggaaggacgacagcgccattggaattatgcaaggaatttgaaagattaaatttgggaattgtcgtagaggtttcgttgcagccttagaagcgaagcccactctaattgatcagttagagaagcccaaattaatgatcctgatattcaagagatcaagaagatatgagaagaggaaaagctatcggtttcttggaggatgagcacggaacttatggttgggtgagagaatctgtgtccccgacaacaaagatttaaaagagcaattctgaaagaagctcatgatactttatactccattcaccctggtatactaagatgtaccaggatctcaaggaaagattttggtgggcaagtatgagcgtgaaatcgcagaatacgtagcagtatgtgatgtttgtcagcgagtaaggcagaacatcagaaacccgccggtttgttgcaggctttgaagattctgaatggaagtgggaagaaatcggtatggattttatcactggtttacccgaacgtcatcaggtcatgactctatttgggtgatagtcgacagacttacaaagtagctcatttcattccggtaaagacaacctattccggaagtcgctagcggaattgtacatggcaaggattgtgtgtttgcatggcgtccctaagaaatagtgtctgatcgaggcagtcagtttacctcaaatttttggaagaacttcaggaagagatgggttctaagctgaactttagtactgcttatcatcgtagacagacggacaaaccgaaagggtgaatcagattttagaagacatgtgagagcttgtgctttagatttcgatggaagttgggataagaatctacctatgcagaattttcgtacaacaacagttatcaagctagtcttcagatggtccttacgaagcactgtatggtcggaagtgtcgcactccgcttttgtggatcaaacgggagaacgtcaggttttcgggacggatatcctaagggaagcgaagaaaaggtaaagatcattcaagaaagattgcgagtggctcaatctctcataagagttatgccgacaatcgccgcagagatctaagttttgaaggaattatgtgtatcttcgtgtcacgcctcttagaggagttcatcgtttccaaccaaaggaaaattggcaccgcgttttgtgggaccttataagattgtcataaaagaggagaggttgcttatcagttggagttacctcaatctttggcagagtccataatgtgttccatgtgtcgcaattgaaaaagtgtttaagggtcctaccgaagaagctaatctcgaacagatagaagtccaagaggatctgtctatgttgagaaaccaatccgtattttggaaacagatgagagaagaaccggaatcgagttatccgcttttgcaaagtccaatggagtaatcactcggagaagaatcaacttgggaacgagaagatgaattgaagtcagctcatccgctctgttcgccagttcttccgaatctcgaggacgagattctgtt

SEQ ID NO: 23477 - DNA, 324 bp, Oryza sativa
  Clone ID: PAT_MRT4530_28553C.1
atggcgggcgtgagcgacagctacaatggtagccccttgggcctcccccacgtggatccggcaataggctcgagtgggaggccaacggcggctctccctagcctcccattccaacgcggatccggcagcaggcagcatgatggcggtaggcacgggctccgcaacatgcgcggacgtcagcgacagtgtggattcggcctccacgcgcgcggattcgcggctggcgatgatggttggtacggaaccgccgacagtggagacgggagaggcagatccgccagcgacgatggtggcggcaaccggctagggtgccggaagtgctaa

SEQ ID NO: 23478 - DNA, 5007 bp, Oryza sativa
  Clone ID: PAT_MRT4530_28554C.1
cgaaagtcggcccaaaacctctcttctctctcctcggcccaaattccgtcgtttccggagagtccgttttcgcagaagaagagtttgaagagttccaaggccagcaaggcaactcctggtttggaatggaatattcctggtgtggagatagaactgtgcagccggggtggttgttcagaatggttgggcctatacaacaggatgccgcgttacaagcctgagtacctgtttggtgttgagggttttgtccaggagttgcgttcgatgtcctttgtcattggatttgggactgcccctttttatgcccagattcctcatgatcgtcatgaagagaagtgccgagtcaaagtcaccttgaacagtaatagtgaagatatccccttagtgatgtttgaagctggaggaagaaactacatccatgcatgtcaggaggtggcaaggatcgccataggagagctccgtgatcgctacagtgatcaattggccgacactgagtatcgctaccatcctcgtcaaccccagggaagtgaccgtggcagctatcttgagactgaaggaattgagaatgatgctaccacgaagcatttggttgagatgttgtgggctatggatgaaagtcgtgcggagactgtgttagccgctcaagatcgtgaagaccggaatcgtggtaagatttgtaagttagaagacaaggtggatcgtttggagaaggaattagccgcattgaagggagaagcaccgccgcagaaggccaggattcgtcttaccgcaaggaagagagctctatttgtccctcgctatcaactggcgccaaagatggtgaacactcgcagcaacgggaatggtcccaacaaccccaataacaacaatggagagaatcccattctggcccaagttcttgctcaacagacacagcttatgaacatgatgatgcagcaatttcagaatcaggaaaaccaaggaaataaccatgcacctccccagaacaagttagcagaatttcttcgtgtgaggccacctgttttctctagtaccactaatcctgttgaagctagtgattggctgcatgccatagagaagaagttggatttacttcagtgcactgatcaggagaaggtctcatttgcatcacatcagttgcatggccctgcctctgaatggtgggatcacttccgccttaacaggactactgctgaacctatcatttggcttgaattcaccgctgctttccggaagacgcatataccatcaggagtagtgtctctcaagaagaaggagttcaggtcgcttacccagggatctcgctctgttacggagtatctgcacgagttcaatcgtcttgctcgttatgctccggaagatgtgcgcaatgatgaagagcgccaggagaagtttttgggaggacttaatgatgagctttcttacccactcatggttggagattatcctgatttccagaaattagtggataaggctattcgtcaggaggacaagtacaatcgcatggagcagaagaaacgtcggattgctcaattcaagacacaacagggaaataatcagaagccgcatcttactttaggaccccagcccatgccacagggaggttcttcgtctgttgttcgtccgcagcgtcagttcttcaacaacaatgctggcaacaacatccgtaatcaaggtccacgtcctgttgcagctccagcacagcaacaacctgtcaagagggagcaaggcagcaagcccgtggtgtgtttcaactgtggagatccaggacattatgctgacaagtgtccgaagccccgacgcgtgaaggttgtccctgcccagaataactctgctgtaccagcatccaaggctcgtgtaaatcatgtcgctgctgcagaagctcaagatgctccagatgtgattttgggtacgttccttgttaactcagttcctgcaacagtacttttcgattctggtgctacacattcattcttatctatgagttttgtgggaaatcatgggatggaagtagaagatcttagacgtcctttgatggttagtaccccaagtaatcaagcactctctttgcaacgtagcccctctgtcagaatagaaattcaaggagtaccatttctggccaatcttatcttgttagaatccaaagaccttgatgtcatcctagggatggactggttagccagacataaaggtgtgatagactgtgccaacaaaaaagtaactctcaccagctatgatggtcgagttgtaactgttcatgcattgtcatctgagtctttaaggtcaagactgaaccagataactttggaagagatttctatagtccgggagtatcctgatgtgttcccagatgatttacctggtatgccgcctaaaagggatatagagttcagaatagatttggtacctggaacaactccgatccataagagaccttatcgaatggcagccaatgagttggcagaagttaagaggcaagtagatgatttgctacagaaaggatacatcagaccgagttcatcaccatggggagctccagttatttttgtggaaaagaaagaccatactcagagaatgtgtgtggactatcgtgcactaaacgatgtgactatcaagaataagtatccactacccaggattgatgatttgtttgatcagcttaaaggtgccactgttttctccaagatagatcttcgatcagggtatcatcagttgagaatcaaagaggaagatatacctaagacagcttttaccactaggtatgggttgttcgaatgtactgttatgtcttttggatttaccaatgcccctgctttcttcatgaacttgatgaataaggtgtttatggaatacctagacaagttcgtggtggtctttattgatgatattcttatctactctcgaaccaaagaagagcatgaggaacatcttcgtcttgcattggagaagctacgagaacatcaactgtatgctaagtttagcaagtgtgaattttggttgtctgaagtgaaattccttggtcacgtcatctcagccggaggagttaccgtcgatcctagtaacgtggaatccgtaaccaattggaagcaaccaaagacagtttcagagattcgcagtttcctaggcctcgcaggatattatcggaggtttatagagaatttttccaagattgctaagcccatgacacgactgcttcagaaagatgtgaagtacaagtggtcggaagaatgtgagcagagttttcaagagttgaaaagtcgcttaatatcagctcctattttgattttgcctgatccaaagaagggttttcaagtgtattgcgatgcatccaaacttgggttaggttgtgttctgatgcaagatgggaatgtggttgcctatgcctctcgacagttacgtccgcatgagaagaactaccctactcatgatattgagttagctgcagtcgttcatgcattgaagatttggcgtcattatcttttcggtactcgtacagaagtgtacaccgatcacaagagtttaaagtatatctttactcagccggatctgaacatgagacaacggagatggttggaattaattaaggattatgacatgggaattcatgatcatccgggaaaggctaatgttgtagcagacgctcttagcagaaaaggctattgcaatgctacagaaggacgacagttgccattggaattatgcaaggaatttgaaagattaaatttgggaattgtcggtagaggtttcattgcagccttagaagcgaagcccactctaattgatcaagttagagaagcccaaattaatgatcctgatattcaagagatcaagaagaatatgagaagaggaaaagctattggtttcttggaggatgagcaaggaactgtatggttgggtgagagaatctgtgtccccgacaacaaagatctaaaagatgcagttttgaaagaagctcatgatactttatactccattcaccctggtagtactaagatgtaccaggatctcaaggaaagattttggtgggcaagtatgaagcgtgaaatcgcggaatatgtagcagtatgtgatgtttgtcagcgagtcaaggcagaacatcagaaacccgccggtttgttgcagcctttgaagattcctgaatggaaatgggaagaaataggtatggattttattactggtttacccagaacgtcatcaggccatgactctatttgggtgatagtcgacagacttaccaaagtggctcattttattccggtaaagacaacctattccggaagtcgcttggcggaattgtatatggcaaggattgtgtgtttgcatggcgtccctaagaagatagtgtctgatcgaggcagtcagtttacttcaaatttttggaagaaacttcaggaagagatgggttctaagctgaactttagtactgcttatcatccacagacagacggacaaaccgaaagggtgaatcagattttggaagacatgttgagagcttgtgctttagatttcggtggaagttgggataagaatctaccttatgcagaattttcatacaacaacagttatcaagctagtctacagatggcttcttacgaagcactgtatggtcggaagtgtcgcactccgcttttgtgggatcaaacgggagaacgtcaggttttcgggactgatattctaagagaagcagaagaaaaggtaaaaattattcaagaaagattgcgagtggctcaatctcgtcataagagttatgccgacaatcgccgtagagatttgagttttgaagaaggagactatgtgtatcttcgtgtcacgcctcttcgaggagttcatcgttttcacaccaaaggaaaattggcaccgcgttttgtgggaccttataagattgtcagtagaagaggagaggttgcttatcagttagaattacctcaatctttggcaggagtccataatgtgttccatgtgtcacaattgaaaaaaatgtttaagtgtacctaccgaagaagctaa

SEQ ID NO: 23479 - DNA, 2010 bp, Oryza sativa
  Clone ID: PAT_MRT4530_28555C.1
aactaatctcccattctgatgatcaggctagcgattcaggactggcttcttacgtcgccgggcaaatcgatcgcaccctgagctggaaggtagcatcacgccattgccagtcctgtttatctgcttctctgatcgaatttactgacatgaagatgacaatagctgcttgattacttgttcatcactgtgatcaactgatgaatcatatatcaaatgttaaacaatgatgtgaattatattttgtggaggtgcaggagaggatgaggaagcagtgtaggagagccatcctctctgcacacctccaatagctcatccaaacaacagctatctcactctccctccatgtctctacactctagcaattcaacaattattttccttttttgtcttcatctacaaatgcttggtcatcaccctcatctcttatattactctcacttccaccacaccctccatttcttgcgtccacctgtcttgcttggctcttcactctccccctgttcctgcaggggtcaggcactgcctgctacaagagtggtgtaggtgattcggctagctcagcgcgaagatgggggagatcaccaatgtcacggagtaccaggccatcgcgaagcagaagcttccgaagatgatctacgactactatgcatctggggccgaggacgagtggactctccaggagaacagggaggccttcgccaggatcctgtttcgcccacgcatactgatcgacgtatccaagattgacatggccacaacagtcctggggttcaagatttcaatgcccattatgattgctccctctgccatgcagaagatggctcacccagatggagagtatgcaactgcgcgtgctgcatcagcagcgggcactataatgacattgtcatcatgggctagtttacaaagacaggagggtggtggagcagcttgttaggagagctgaaagggctggattcaaggcgattgcgcttacggtggatactccgcgacttggccgtagggaggctgacatcaagaacaggtttgttctgccaccatttttgacactgaagaactttgaaggcctggagctggggaaaatggaccaggctagcgattcaggactggcttcttacgtcgccgggcaaatcgatcgcaccctgagctggaaggatgtgaagtggctgcagaccatcaccacgctgccgatcctggtgaagggagtgatcactgcagaagacacgaggctcgccgtggagaacggcgcggccggcatcatcgtgtccaaccacggcgcccgccagctggactacgtcccggccaccatcagcgccctcgaggaggttgtgaaggcggctcgcgggcagctccccgtcttcctcgacggcggcgtccgccgcggcaccgacgtcttcaaggcgctcgccctcggcgccgccggcgtcttcatcgggaggccggtggtgttctcgctggcggcggcgggggaggccggagtccggaacgtgctgcagatgctccgcgacgagttcgagctcaccatggcgctcagcggctgcacctccctcgccgacatcacccgcaaccacgtcatcaccgaggccgacaagctcggcgtcatgccgtctcgcttgtaaacaacaacgacggcgaacttgtcgccgtcgatcgatcaccggccggccgccgcgacacgctttgccggccgacggatgatcggccgggaatgaagaagaaggtagtagctgccgaagaaaagattggaagatgcaaagttctataattttggatgatgctgcgtcatgtacttttgttaattgtcgagtgattgatcacctgtacctaattaaatggtttattggattattggcggtttatactaaacgaacaaattaataccatacggtctcttcgtgattgcacagtaaagccattgcctcatctctacattacatgctccgatcattaactcgaatgcaaagccactgacagtgtgatcgaattgcagcgaggctcgccgtggagaac

SEQ ID NO: 23480 - DNA, 2046 bp, Oryza sativa
  Clone ID: PAT_MRT4530_28556C.1
ttggtttccccccctatctttgtcttcatgtgcagaggctcaaagatctctctccctcacctatattacctgcaccaacaccactgaccactccctcctcctgttcttgctccttcctcccagtgtctctcaagagcggtgcagggttcacaaggcaggagaaaatgggggagatcaccaatgtcatggagtaccaggccatcgcgaagcagaagcttccgaagatgatctacgactactacgcctctggagctgaggatgagtggactctcaaggagaacagggaggcattctccaggatcttgtttcgtccccgcatcctgatcgatgtctcaaagatcgacatgtccgcaactgttcttgggttcaagatatcaatgcccataatgattgctcccagtgccatgcagaagatggctcaccctgacggagagtatgcaacagccagggcagcttcagcagcaggaactataatggtgtacaaggacaggaatgtggttgagcagcttgtcagaagagccgagagagctgggttcaaggcgatcgcactgaccgtggacactccgcgactgggacgcagggaagctgacatcaagaacaggttcgttctgccaccatacttgacactgaagaatttcgaaggcctggacctcgcagagatggacaagcaatttgaaccatttcgttggcatttgcagagcaacgattccgggctggcctcctacgtcgccgggcagatcgatcgcacgctcagctggaaggatgtgaagtggctgcagagcatcacgtcgctgccgatcctcgtcaagggcgtcatcaccgcggaggatgcgaggctggccgtgcactccggcgcggcggggatcatcgtgtcgaaccacggcgcgcggcagctggactacgtcccggcgaccatcagcgccctggaggaggtggtcacggcggcggcggggcgcatcccggtgtacctcgacggcggcgtccgccgcggcaccgacgtcttcaaggcgctcgccctcggcgccgccggcgtcttcatcgggaggccggtggtgttcgcgctggcggcggagggggaggccggggtgaggaacgtgctgcggatgatgcgggaggagttcgagctcaccatggcgctcagcggatgcacctcgctcgccgacatcacccgcgcccacatctacaccgacgccgaccgcctcgcccgccccttccccaggttgtgaggaccttcgccgccgccgccgccggcgaactctagccaaacaataaacaatatcgacgacgccagagagcacgccgattaattaattaggtaatttttgcaaaagaatctcgtcgatccacacgcgcgcaagcaacacacgtactccgtgcacccctcgtaactgggtcgttcatgctcttaatcccaacgattaattatactggtataatctttgtaatttcgagtactgtacacctatttggcatctgtatatctcgccttaagatatttacggaaccggtttatatactcctttaacttttaaattaacgcaggcacccacatacataatcaggaacctcgacaagctcggcgtcatgccgtctcgcttgtaaacaacaacgacggcgaacttgtcgccgtcgatcgatcaccggccggccgccgcgacacgctttgccggccgacggatgatcggccgggaatgaagaagaaggtagtagctgccgaagaaaagattggaagatgcaaagttctataattttggatgatgctgcgtcatgtacttttgttaattgtcgagtgattgatcacctgtacctaattaaatggtttattggattattggcggtttatactaaacgaacaaattaataccagaacaacctatttggatctgtatatctcgccttaagatatttacggaaccggtttatatactcctttaatttttaattaacggagttcaacatatatataagttacttcatgaaaaaaaaaaaaaaaaaaaagacgcgatagtgctactctctcactttactatgctttggatcgagttt

SEQ ID NO: 23481 - DNA, 424 bp, Oryza sativa
  Clone ID: PAT_MRT4530_28557C.1
agagatcagctagctaggcagccgtggtgatctactggccggtgagcgcgcggggaagtgaagtgaaggagtgttgaccatggctgacgagaccatcactctacaacaatatgtgaatgcagcacgacaaacctttttgacagtggctcttctccctgatcaaaaccattccctagagatcacacctgaagggtgcctatgtctgttaacttggaccaagtgcttcacggaagccttctcgaaaggcaagagttggaatggggatttcacattggcagattttaaggtttgccgtggtcatgttcaaaaacataaaaagccaaaaaatttggtgatgagggaatgaaaaatgatatggaaaaatttgttgaagaaatagagcttgtctttagaagccgggatagtcgactgcgtttcacatatc

SEQ ID NO: 23482 - DNA, 3927 bp, Oryza sativa
  Clone ID: PAT_MRT4530_28558C.1
ctatcgtttccatgtaaaatctgccccccagttcgccacttgcggtttgccgatgtgaaacgaacagaaagccatcacgctctcacgctgtcgccgtctcgcgccacttccgctccagttcccgacatcttccccagcctttccttcgctgctcctaaaaaatactatagaacaatcatgctgtggtaactgtttactgccatctgtatctgcaacagctaaagagaaaaatttatctctcctataattgtataagtaaaggtcatcgcctccaagaattacttcgatattcttttgtttccttattgctcccaaatggctatgatatttatcttgattccattcttttatctcacgacaaagataatttggattaaaattccgcatctctcttattgctgctggtctatctactacttttgaaccaattttcatcctatcaagagaatcacccacttttctttggaaaattgtccctaggataacagatggtgaaagatgcaggaagttcatggtatactttagaaatgccaagccatctcctttaagcaaagcacatgcaaatacctgcaaccgattggtgccatcctgtataggtaaactatgcaatggaagctgccaattatgccgagaaaagatggggctaacataacagtagacttggtccttttgaggttcgtaataaggttttggatcttccaatggtgcagagaatgtacaaagagaactagcatatttcaaaatccatcctggctttacactggttacaccatgcatatatgatctctttgtatgaagtagttccgagtaaactacaaattctggtgcaattcgtgcaacagaagatgatcggtgtagatatattgtatcattgaaagcacaagattgataatgaacagcccgaacctttttatcatcttttgatggtccaggaaaggcacgaatcctctttgcaaccctatcagcccacccagcacatattccttgtcctagaagctcctcttcatttaattgcattggttttttatcagactcatgcctccaggcctcttctacatcttcagaaaccccaaatttccaagaaaattcttcacaaaatttgctatggtgaaatattaatcgaagaagttgcttcctcaattttgacatctcttccattgttttgagatgaagtgagttgactctgcaaaattccactgggttttctgacaactcaaacaacatcgccttgagcttcttctgtctcttcctttcctgcctatccttatcttctgaatcagggttatcttgttttgattcaccactaaattcattctgcgtgagaaaaggattcgtaaagctcaatgctgatgcagcagctgctgcatatcccaatatgaagttaggtctggaaaagcaccgctgactgttcaaaattttaactattgtcagaagaagtcgagaatgtcgggggctcatggggtattgtgccatagccttccccatcaatgtaggttcacccttgctatcaagcgcttccaatacttttaagcaacgctcagcttcaaccaaactttccttgtcaggaggtgtagggaaaggaaagttttcaaccttattaatattcataaacttgagcataagcacaacaccatcgactggaatattcttgatctcaggctcagagaactcagggaataattcatctttaccatatgctgcagccgagtagagatggtaacagtgcccaggccccgttcttccagctctcccagaacgctgggatgcagatgccttgcttatccactggatttcataacttgccatcccagtagcatggttgtagttcttaactttttgtttcccagtatcaactacatactttatgccaggaattgttaaagaggtttctgcaacatttgttgcaacaacaactaatctttcaccgtcaggaatatcctgaaacactcgaagctgctgtgaagcatgcgaaacagacctaggttctgtgcatttactggtacaaggaacatgacttgactcttctaaaattgtagcattgcttggtacatcagtgctttccggttctcctgacactcttgatatagccttaaatgatgccttcaatccagatgaaccctcagcacctttcaaaaatgctaatactggtccatcctcttctgtggtttcataaacagaatcatcatcctcactgtcggtatccatctcaggttccatttcaatgtctgaagaatctacacctgggccagcattactctcatcctcatcatattgggaaaacatgtcatcttggtgctcagactcatctctatcaatatcatatgcttcactgatttccctctcgaccacttcttggctcgagccattctcatcaccctcaactttttcagtcttcttgtcagtttgctgctttgatgctctttgcagtttcttacataagtaatcgacttctcgttgtccagtaacaaagacaaggattccaccttgtggaagtttcttgtggatggacataacctttttataagcttgccccaaataatcgtcatgtgtactctttgagaagtgaactgttactgggaattgtcgtacaggtacctttatagctggtgggatcacatcaaacaatcttctgtttgaaatgaagtccttcaattgcaaggtagcactcattagcaccactttcaactgactaatcttatcttctggattaatgctcagaccacaacgtattttttcctgttgctctatgtacaatgacttgcgaatctttataattctagatagcatcccgataagtatatctgtgttcaagctcctttcgtgcgcctcatccaagatgattacagaatagcgtttcagcagaaagtcactctggacctctcgaagcaaaatgccgtctgtcataaactttattgagcatttacttcctaccattttatcatgcctaacttgaaaaccgacctcctttcctagcttaagacctagctcataggacaccctcctagctgtggcaagtacggcaacacgtcgtggttgagtgataccaattattccttttctgtcagaccggttacttgtgccaaagccagcttcatacaagaactgtggaacttgagtagttttaccacagcctgtttctccacatagaattaccacagaattttcataaatagcttccattatttcctgctccatcattattattggaagatccctccttgttttctcaacctcatgtggccttgacacaggtacaacaattggaggattgaaacactcttgtacagtacgttcttcttgtcctggctctttatcctgtaatatctcttcaccagaacaactaggaacacatgattgaattgcctgatttgctgaaatattcggaacaccatcactaccttcagtttttggttcttgatcgctcagtccaacatctataaccagtttgcattccacaggtttcattgcaacattatctatgtgattgttacattttctttgaggatcctcgttttttgctgaatcgacaatcttgtccaggtaatcttcctctgcagcctcgctgttttcagaagctttctgatcgccgtctttctttaatagtgagagttcttcagggacgttcaaaccagccttggagaagtgcacagcacgcctacgtttttctttcaaggtctcagcttgaccgatagtcccagaagcatggagcagagaatacgcatcatctgaaatcttgtgcttccgcaaaatctcaatactttgagcttgcagtaacttcttttgcttttcctcctccaaattctgcagctttttcagcttactcttgctcatcttcgggtcttccttgattttcttaccatccttgtctttcccttgtcctttgttcttcctcttgcacggcagaatcagcgtgttgctgtcctccat

SEQ ID NO: 23483 - DNA, 167 bp, Oryza sativa
  unsure (1)..(167): unsure at all n locations
  Clone ID: PAT_MRT4530_28559C.1
ctcgaagaaagcttcgtatttaactatttnagatgtgtnattggagtggacacaagtttagttacggatagtgttgtaaaattgggataaatattaatgtagtggttaaggnaataatatttttttngagtgntttattggggggggggggggggtttntatttttt

SEQ ID NO: 23484 - DNA, 693 bp, Oryza sativa
  Clone ID: PAT_MRT4530_2855C.1
atctttctgtcgtgtatccgtcttcccctctgcgtcgaaggaaatctcccgtctcgtcgtcgctccttgcgccgatctccatcccgcgagtcgcgagcagagagcaggggaggggaggggaggggcgcagtcacccgtcctgctgcatcctgactatgctctttctaatagaggtaacatagttggatggatgatgtttatggaaggatagaggtcttcccccagcacttcttaccatcacaacaatccatggagacccctgctgatggtctctccacaagtaagactaacctggattctccaccaagttcacgtagacgttcctggactccgaaacgagtaatgggagctgcatcacttttgcatttattgtctcttcctcgcataagatggtcttccagcactgaggatgatgacaagattgagttaaccagagctgaagtagaatcattaagaaccgagattgctgatgctgaagagagggaatctcagttaaaagctcggttggaaaatattgatgaagttttgagatatgcacggctctctgggtatctctatattagaagtagatggactcaacttcctggagagccacctattctagatgatgctgatgtcgatgattggcttcctcggtttgttgttctgcaagggcaatgtgtatactattatcttaaatctacagcccattag

SEQ ID NO: 23485 - DNA, 1303 bp, Oryza sativa
  Clone ID: PAT_MRT4530_28560C.1
gtcgcaatcagacattctctcttgttggttaactaaatagcttaattaatttgaggagtttagtctctgaaacatggcgatggcgacagcagcatgcagaaggcctgcagtgatgctcatggcgttcgccatggcggctgcggtgacgatgagctccgtgccgccggcgtcggggacgacgacgctgcagtacgacttctactcgtcgtcgtgcccgaaagccgaggagacggtgaggaacgtcgtcgagccgatgatcttcaacgaccccaccatgggcgccgccttcatccgcctcttcttccacgactgcttcgtcaggggttgtgacgcgtccatcctgctggacccgacgagcagaaacacgcagccggagaagacggcgatcccgctgcgcggctacgacgccgtgaacaagatcaaggccgccgtcgaggccgtctgccccggcaaggtctcctgcgccgacatcctcgccttcgccgcgcgcgactccgccgtcgtcaacggcaacttcgccttcgccatgccctccggccgccgcgacggcaccgcctcctccgcctccgacgtcgcccggttcatcccgtccccggcgttccacctccaggacctcgtcgacagcttcgccgccaagggcctcaccgccgacgacctcgtcatcctctccggcgcccactccttcggcctcacccactgcgccttcgtcaccggcaggctctaccccaccgtcgaccccaccatgaacgccacgttcgccgcggcgctcaagaagctgtgcccgccgccggcgagcggcggcggcgggagggcggtgagcaacaaccaggtgaccgaccccaacgtgctgagcaaccagtacttcaagaacgtggccgccggggaggtgatgttcacgtcggaccagacgctgacgagccgcgacgacaccaaggcgatggtcgacgacaacgccgccaacccggtggcgtggatggcgaggttcgcggcggcgatggtgaagatgggcggcgtcgaggtgctcaccgggaacgccggcgaggtcaggaaggtctgcttcgccaccaacacggcgagctgataattaagctacaagttctctttctccagcgatcggctggatcattaccacataatatatatattccttgttattttgatctcttaatttgtactccgtagttacctgcatcgattcttgctgttgtaaaactgaattgtaattcactatctttgaatattcagtgatcagttacagtggttaaaaaaaaaaaaaaaaaaaaaaaaaaaaaaaaaaaaaaaa

SEQ ID NO: 23486 - DNA, 1827 bp, Oryza sativa
  Clone ID: PAT_MRT4530_28561C.1
atggaggcgccgccaagcctcccctaccgccacctgccgcagcatctcgccggcctcctcaagacccggccgctccacgacctactctccgacgcgtccacctcccgcgccgcacgccacctgttcgacgctgtgccgcgcccgacccccgccctctgcggcacgctcatctccgctctctcaaggctctgctcgcaccaggagcttctcgacgccttctcatcgcttcaccgcaggggctccgacgtcccgcccggctgtgtgcccctcgttgtgaagtcgtgcgcgatcttggccgcgtcacgtcagggaaagcaggtgcactgtcacgccattgtccgtggtctccttggggatatctttgtgcagactgctctggtggatttctatgcaaagaacggggacatggattgtgctgtgaaggtgtttgacgagatgccggtgaaggacccgataccgatgaactgcttgatcactgggtattccaagtccggtgatgtggtgaaggcgaggaggctatttgatggcatggtaagaaggacatctgcatcctggaattcaatgatcgcctgttatgcgcatggtggggaataccaggaagctttgaggttgttccgtaggatgttgagtgagggtgcaaggccaaatgcgatcactattgcgacgatgttttccatttgtgccaagactggtgatcttgaaacaggaaagtgggcaaggtctttgatcgcagagcaggatttgcagaacatgatagtgcacactgccttgatggaaatgtatgtcaagtgtcgggctattgacgaggcacgccgtgagtttgatcggatgcagcagagagatgtcgtggcatggagcactatgatcgctggttatgcacagaatgggaggccacatgaatctctagagctgtttgagaggatgaaggcaaccagttgcaagccaaatgaggtgactcttgttggtgtactatctgcctgtgctcagctgggctctgatgaattaggaggacagattggtagccatgtcgagagccagaacctaccactcaccagctacctcggatccgcactaattgacatgtacacaaagtgtgggcacgttggcagagctcgcagtgtcttcaaccggatggaacacaaggttgtcataacctggaactccatgatgagaggcctagcactgaatggctttgcgcaagatgcaatcaccttgtacaaagagatgacagaggaggacgtccagccaaacgagattactttcgttgcgctgttaacggcgtgcacccatgctggattggtagaccaaggtatgtcctttttcaaagagatgaagacaattcaccatgtttcccctcaagtggagcactgcgcgtgcatagtggacctcctctgcaaatctggaaggctgcgggaagcgtacaagttcatctgcgacatggaggtcgaaccaaacgcggtgatctggagcacgctgctgagcgcctgcagggctcacgccgacgtcgagctggccaagctcgccgcgagcaagctcctggttcttgagccggacaactcctccatctatgtcctgctgtccaacatctacgcggatgccggcctctggggcgacgtgagggagatcagggacctgatgaggagcaagaacgtgcagaagctgtctgcttatagttggatagagctggacggtgaagtgcacaagttcctggtgcaggatacgtaccacccgaaatcagctgagattttcaacgtcgtcgacggcatggggttgcatctggacgacgttgattctgaccccgatttatttgttctagagcactattga

SEQ ID NO: 23487 - DNA, 1967 bp, Oryza sativa
  Clone ID: PAT_MRT4530_28562C.1
ggagagagggagaacccagccacactcattttttttttttttgaaaataaattcgtcttctttttcattctgctacttatgtgtccactcataagtcacaagcgtatgcaaaaatatcaatcgaaagaatcttcatactgcacaaagattaatcaaatcaggcgctttgcaaggactttttcgatttctcgtcctggaacatctaaggcattccactaagggatcgaggaggtacataaatgaccaaaagtctatacatcaatggctccttcattcttttagaagggcttaccatcatccacaattttcgacttcggctcgaatcagcctctctaactgccacacaatctcaagggtaccatgtcctctaggaataactcgagctgatgctacttaaacacagggcgcgatgccacatttgacactgacacagtgatcgcagaaaatgccattgacgctctttgtacttcatcttgccggtgtcggactatgctcatgaccacagtgactatcaaaggctcataagggtcggcaccagcaacaaaccatgctgctccctttatgagaggaaaaataggcgaaatggagattccatgtctaagtcgccgtgtaaggaaataagcacaagaagactcgtcgagaaggcggatgtgagatatgagagaatggtgggtgaaggcagcatacagattggttgagttcatgacagcaccatccccacagcaaagcacgaggctgcccatggaggtgagctgtttcaggccttcagtctcgacttcgaggtagccgttgaggtcggattcccggaaagcattgagggcatctttgcctccaagaacatcctccagcagctcttcactgcagaggtagcggtatatgatggaattggcaaggagctttgcaatgttgcgcttggcagtacagtcggttccgacgatgtagatgggtgttttcctgaaatcgccaacggcctccgcagttttcctcacactctgaatctcctcctcaacagtcagaaccttaagtccagacacattgcaactgacagcatagacagcaactgttcccttcatgaaaagaaaaatcggcggctcgcaaatttctcctctagggcggtgtggtaggaagaacacacagttgtcctcatcaaccattgcatccgctccatgtgcttgcaccacataaacttctctcttgaactcggttgccaggcactcgatagcaatatcatcaccaaaagctgcagcatggccatcccggttctcatcgatggtcagtaagccttcctctgtgtactgcagagtgattatgttgtgctcgtcctctgcggaaccagagacagacatgtacttggcccaactatctccattgtttacagctatgcatctctccctgtatatggtttcagctgccatttccctttggatgccgaggtcgacgaggtcgttgatggcagcgtcgaggtggtggcgcagggtcttgggcgcgagcaacttgagctcctgcacgacgtggacgccccagccggccttgagatccggcgcgtagaggtggcgcacggccgcatcgatggcgtctctgtcgggggcttgggcggcggcgtagaggtgggagaagcggcggacgatgcggtgcctgaggtcgcgcgcgtcgggcttggcggaggcggccttgcgggcggcggtgaagaggcagttgccgtcggcgtcgacctccccggcgtggtcaaggcggaagacgaggggcgggagcgggagcgtggcggggggcttccaggcgacgccgcgctcccagatccggtggaggcggcggcgctgctggtcctcgagcgcggcgacggcggtccagctggtcggggggtcggggtcgggggtgggccaggtgaggagcgggggcgcaggggcaggggaaggtgcctcggcgacggcgacggcggcggaggaggagtcgcagaggagcttgcccat

SEQ ID NO: 23488 - DNA, 381 bp, Oryza sativa
  Clone ID: PAT_MRT4530_28563C.1
gccaccctcctcctcttccccccaccgcacgcctcactcaacaccggcgaactcgggagcgcgcggcccgagtgtgtcggcggcatgaaacgcaaggcaacaactgcagcctcagccgaccccgcacaggtgaaagacctagttcttcattgctcctcatataaagccggccccctcggcgtccgcctcggctgccgcgacgccattggacctggggcatggccgtgcaggttcaccatggcccatgccgactacatgcataggaatcggctgctagctaggtggcagtcacggtggcagcctggacggggacgccagggccacgcggggtggtggcggccggcgatggggctcgagccgcgaggcattagccggcgatga

SEQ ID NO: 23489 - DNA, 310 bp, Oryza sativa
  Clone ID: PAT_MRT4530_28564C.1
ggaaacaaaacacccgcatgggatcatacacttattcagggttctacaaggaaaagaaccccccatgtttggggaccgcaggggtccaaagggcgaggaaagctaacaaacgatggggcgaacgaacgaaatcaagctgtccaaagaccgggccattccttggggtttatgccccgggaaagaagtttccggtcttaaggtcccttttcagggggatgaacataccgccatcgggcagacaggggaagagaaaccgggaacctttaaatcctccccccaggctgggggcccacggggggaccgggaacaa

SEQ ID NO: 23490 - DNA, 246 bp, Oryza sativa
  Clone ID: PAT_MRT4530_28565C.1
atgccccctcgccggcgcgagcactcgcctgagggtgagtgcgccgccgtcaagtggccttgccccagcgcccctcccccgtcgtctccccgcggcggcatcggctacggccggcggcggcggtggactcccgcgcagtcgtcggcggcacctctccgccctcgcttcctctccctcgtcatggggccacaggagggctcgacggtggcgggcatcgttctcccctttgctggatccaggaggtga

SEQ ID NO: 23491 - DNA, 375 bp, Oryza sativa
  unsure (1)..(375): unsure at all n locations
  Clone ID: PAT_MRT4530_28566C.1
aaggttgaaaattcaaattttagctgataagtataagcgaaaagatgggctcaggccagcatattcttaggctcttaaccatgaatcagaactacaatctagtgactactgagcaaattttgctggtctgtttaattccttcatgggaattaaaatggtcatttcaaacatccaccattgatggagatgcattaacgggatgaagcaggttatctcttctaacaaaaatttaaggaattaacgggatgaagcaggttatctcttctaacaaaaatttaaggaataacagaaaagataaggaatttacataggcaatgtcggccaattcaccttgacccaaggagggngcgagctccagtatttacctgggtgggt

SEQ ID NO: 23492 - DNA, 156 bp, Oryza sativa
  Clone ID: PAT_MRT4530_28567C.1
atggccggtgcgaacacggcgcgtggccgtgccgaggcctggcaagaccgggacaccagctgggcgtgggcgtgggcgtgggcgtgggcgcaggggttctacgcagttgccgccttgccgggccttctgctggtaaccagctgcgcgtcacgatga

SEQ ID NO: 23493 - DNA, 715 bp, Oryza sativa
  Clone ID: PAT_MRT4530_28568C.1
tatcacttacttcgactgcagcctgatcaacatcatcctcaatatcttcttcatccagagcttgttcaatggatggatccaatgcaggcagcattttgatcttgagtactttgttgtcgtttgtagagatgttgatgtcgaggatgtccagcagcgcgggcagtctgagttgccggtggtcgttccgttacttgcgttcgagccacatgtgccggagggcgatgatcgtcgcatccagtactggaggacgaagtttgaggtcgcggaactcgacaggaatatgctggaagtgagaaaggaccaggctgtagagacacttcggggtcgtgaggtgtggttcaactcgtatctgaagagttgctgcacatccatgtcgagagtctgtagagagctccgagtaccccgtggggatcccgaggaatcggcggccggatacatctcgtggctgaatggggcctgcgcccagctcgaaggcatcggtcaacgtatcgacgaggccttgaagcaggagtgtcgttgctcaagccgatatgccggggggcacgtgttggcctgcatacgagatcatcgcccgcagctgcacctcgagttcctccgtgaagggttttctcgttctcggagaactcctacggagatagatggcctggcgaaattgatggcgttgctggcggagaaggtcttccagtcgatggactggcgttggccttcctggtag

SEQ ID NO: 23494 - DNA, 348 bp, Oryza sativa
  Clone ID: PAT_MRT4530_28569C.1
gggacgggttatattcttacaaagcaaaaaaggagactcaggtccatataatcagcactcgctacaacttacaagtcggtagattggaaaacaaaatgcacctcattttcccaactaggattaacagagggggtgggtcctgattaacaccgaccacgttttattgtccgactagacaaagcataccgggttttacggcttgggcgccatggaataccatggcacggaaaagggttctactgggtcttggccatgtgggggatcagggcggtgacacggttgctggaaccccactccttgtgggaccaaggcgaaagcttgacaaagtttttcgtaaaagcaatttca

SEQ ID NO: 23495 - DNA, 606 bp, Oryza sativa
  Clone ID: PAT_MRT4530_2856C.1
gtacaatagtatatcttacgtatagaaataatctagaagtcataaacataaagcaattacaaaaatccataaaaacaatctgaaaccgactccaggctagagtcagtcgatcgaattgtcggaccggtctatcggaccgcaactttaccttcgctccaaccggcgtcaccaggccagtccgaccgtcacatcatccagcgacaaaaacactgtgcttgctgatgggcgataccgagctaaccatacgcgcgtcgttgtgcatgcactcccggagaggttgtcgccaccagctcccagtctcctgcacgagctcactgtcactcagacagtcagacccgtctaatagcggcgtcaggctgtcatggatgcttgccagttatcatgttgaaattgtgtaccatggaaaaaaagggaatcagatgttggactggttttacttttctatgttcaacacacagcctccggaacttctggttggagacaggccatgaaggcttcgttaggattgcccaagcaaagcaagtccacatgagtgacaaaggggcagcaaaacttggtgaaacaagacgagggcacgaggcaagtccacatgagtgcgaagcgtgg

SEQ ID NO: 23496 - DNA, 510 bp, Oryza sativa
  Clone ID: PAT_MRT4530_28570C.1
ttagtcatgctttgtaaaactcttattggttccaactgcctttgtatgtgcggtcatcaccttagctttctttagcattgtgatcttgagtactttgttgctgtttgtagagatgttgatgtcgaggatgtccagcagcgtgggcagcctgagttgccagtgatcgttccggcacttgcgttcgagccacatgtgccgggggcgatgtggatcaaagttcgcctcgagagtgtgcttgctgactaggatcgtcgcatccagtattggaggacaaagtttaaggtcgcggaactcgagaggactatgctggaagtgaagaaggactaggccgtagtgacactccggggtcgtgaggtgtggttcaacttgtatccgaagagttgctgcacgtccatgtccagaatctgtagagagctccgagtaccccgtggggatcccgaggaatcggcggctggatacatctcgtggctgaatggggcctgcgcccagctcgaaggcatcggtcaacat

SEQ ID NO: 23497 - DNA, 403 bp, Oryza sativa
  Clone ID: PAT_MRT4530_28571C.1
atttcgcccttttttttccacccctgtgaaacatcctaaaccacatggggtttttacaaatgaaattgagagacatatttaattttttcttgcccaaaggactgaagggaaccaaagcaaagctccttcctgatggacgccgaacgaccaattagaagaagggaagagcttttcttagtcactaacgaaagagcatgcacctactgtgctggccaaatggtaagaacctggatgacctccaaaccttgagcctttgttggccggaggggattaaggccctccaagtgtggccttctccatgtgttgtctgctaagggcatagctgaatttcccttgtacgttacttgtcaagattcccagggcccttttaaaagaccctgatgtggaggctaggaaccttaag

SEQ ID NO: 23498 - DNA, 576 bp, Oryza sativa
  Clone ID: PAT_MRT4530_28572C.1
atgccttcgagctgggcgcaggccccattcagccacgagatgtatccggccgccgattcctcgggatccccacggggtactcggagctctctacagactatcgacatggatgtgcagcaactcttcagatacgagttgaaccacacctcacgacccccagagtgtctctacggcctggtcctttctcacttccagcatagtcctctcgagttccgcgacctcaaacttcgtcctccaatactggacacgacgatcctggtcagcaagcgcactctcgagatctgctcagcatggaaacgactaagtcaagctgctcttctctcccgagaacacaacaaatcaagtcgatccagaaggaagggcaaaggaaatgataacaaagacaaccaacctaagggagtcgtcgccatgctcgtttccacgggcgaacttcgatctacattgccctccggcacatgtggctcagacgcaagtaacggaacgaccattggcaactcaggctgcccgcgctgctggacatcctcgacatcaacatctctacaaatggcaacaaagtactcaagatcaaaatgctaa

SEQ ID NO: 23499 - DNA, 819 bp, Oryza sativa
  Clone ID: PAT_MRT4530_28573C.1
atggtgttatccaaactgaggaggagactcagatcagtcacacccggggagcggaccccgaccgccacggccgatgacagggatgccagagcacagcggagcggcggcggcgacgacgaggacgccacggccgcgccgccgccgccgacgagcagccagctccaccatatgatatcggagcggcggcggcgcgagcggctcaacgagagcttcgagcacttgagaggtttgcttcctccaggatcaaagaaagacaaggccacagttcttgccaagacactagagtacatgaacttgctgatagctcaaatctcggagctcgaagccaagaaccgagcactccaaacccaaatccaccaacgcgccaatggatcatcatcatcgagatcatcaatgatccgaacagtcaacgaggttcaccatcaccataatcaccaatggctagccgtcgccgccgccgccggcggctcgccggagagggtgcaggtccatgtgatcggcggcggtgatcacgacggcggcgcatcggcatcgtcgtcgtcgtcggcgccagaggtgaccgtgagggtggcggtgcgggcgccggagcgcggcggcgccgacgtgtcggagctcgtgctccgggtgctcgcactgctcaaggcgatgggcggcttcacggtggtggccgtcgacgcgaggcagccgggcggcggcggcggcaatggcgtcgctcaggccagcctaacactacgagcaacggtacggatgcttaccctgttgaaacgtatgtttcgtgcaaaaaatcattcttcctctgaccaaattataagattataa

SEQ ID NO: 23500 - DNA, 133 bp, Oryza sativa
  unsure (1)..(133): unsure at all n locations
  Clone ID: PAT_MRT4530_28574C.1
gactaaaaaccaaacgaattctaaggtattaaagagcggatgacaacacgcaagaatgctaatagccacaacaagatctgaacatgggatcatatgcacgatagacaacacatantttggagcgaaagaacat

SEQ ID NO: 23501 - DNA, 410 bp, Oryza sativa
  Clone ID: PAT_MRT4530_28575C.1
ggaattagatagggagatcctttgtctctagtgctcatgtccttggagcagaattgctacaggccataatcaacaaggcaaatcttcttggacttctgtctaaacctatccctattgaaagtgacccaaattttcagttgtttaacatgccgatgacatccttctgtatgtcaaagcttgtggaagataattgtggaagagaattgttcaccttggaggctctactttagacttttgcacaagggacacgtctcacggtaaattatcataaatgtctgacactaataaatgttgatgaagagaaagcacaaatgttggcaggtgtctttggttgttagattggtacactacctttcacataccttagcttaccccttggaactactaagactagagtggttgattttgct

SEQ ID NO: 23502 - DNA, 450 bp, Oryza sativa
  Clone ID: PAT_MRT4530_28576C.1
atgggaggcacgctgcactacctgtctgatctgctgctgggtggcagcagcggcaagactagccacaagaagaagaggcagttcaacacggtggagctgaaggtgaggatggactgcgacggctgcgagctcaaggtcaggaacacccttgccaacatgaaaggggtgcagtcggtggagataaacaggaagcagcagaaggtgacggtgcaggggatggtggacacgcagcgggtgctgcggcgggcgcagtcgacggggaagcgcaccgagctgtggccgtacgtcccctacaccaacccgtacgtggcgccgccggcggcgtacgacaagaaggcgccgaacgggcacatccgccgggtggacgccgtgctgccggtcacccccagccaggaggagcgcctcgccaccctcttcagcgacgacaaccccaacgcctgcgccgtcatg

SEQ ID NO: 23503 - DNA, 427 bp, Oryza sativa
  Clone ID: PAT_MRT4530_28577C.1
ggacaacaccagttttttatttcctttttagaccggatagttacacgctcacacctgttttattccagctaatgaaacacaagcccacggggcgggcattattcgtttttaattagaaaaaacacaatagggggctgtagctagggttgaaccccgctaaaaaaagctagggcccggccgttcgccgaacgtacaatatgcgtatgtaatctttggggggcgtacgtttttatcacacgcacgtacttaattagccatatgcatatataattaaggggcattatgacggccggccggccggcatgaacagtcattattaattcatcacgggggggggatctgtttgttctgcggggggggaagcgggggaaacgggggccccggcgggttttgacggtacggaaaaggtcccggaaaggggtaggga

SEQ ID NO: 23504 - DNA, 880 bp, Oryza sativa
  Clone ID: PAT_MRT4530_28578C.1
cggacgcgtgggttccctcctctctctctctctcccccatctccatgccgccataagtatcagcagcatcgcacccggaatcggaatccccaaacccaaccccatcaccccccaacaacaagagatcatcgaagccccaacaagtcgcatgacatccatggcgacgccgccgcccaagaccctcctcctgctcgtcctcgcgctatccgtcatcctcgtctcggccaccgcgttccaccaccaccaccaccacgacggaggagccgaagctggaggaggaggaggagggggaggcgggttcttcgaggtgccgtggttcggcccgccggggggaggcgggggcgccggaggacacgagatggcgcggccgtcgacggtgtgcatggagaagggcgcctgctccgatgagcgcggcgccggccccgtccagcgagacgcgtccctcagcgccggggaaaggcacggcggccgccgccgcggcggcggcgggggccgcctcgatcgcagcgagctgctacaagaagcggctcacctgcccggaaaaaccttcagcttcaacgacaagcacggcggccgcggcggcggcggcggcgggtgaggagggtatggcgcgttgtattcatggtcagcgatgagtgttttgtgagttcgccacttactgatcggtatgtagtgtattggaatttatcttcgtgcgctgcgagagtctgtatgtttacaggtgtgtgtgtggtgttcttgaggataatgatgaataaatcgaggggagttcatcgagataataaaaaaaaaatgattgagtggtactcgtcgatactaagaaaaaaaaaacgagaggaattcatcgattctttgaccgtaaaaaaaaaaaaaaaaaaaa

SEQ ID NO: 23505 - DNA, 342 bp, Oryza sativa
  Clone ID: PAT_MRT4530_28579C.1
tttttcttctcctccggctcttgttattatgtaatcttgtaattctcctggggcgcaccacacaccaccgcaacattggggggcaacgggccgatcaacaaggaggacccgctcaactggggcgcggccggggccgagatagcctgctcccacctccacgaggagaaacacatggtgggccaattgctctaggctgtgcacaaggacccagaagggccacactccgagttgccacatggcgcccgcgaccaagaccacgacgacttcgccgtctgcggctggctctgcgcagacggccgcccccgcgtcaacggcagcagcgactggatcctcacctgcatc

SEQ ID NO: 23506 - DNA, 315 bp, Oryza sativa
  unsure (1)..(315): unsure at all n locations
  Clone ID: PAT_MRT4530_2857C.1
aacagggagganacaagggancacaagcaggggacnaanaggggcccaaaanncaanaggaaggaaaaaaccaannaccanccaacaggaacnagccccccccccccccggggggcaaaaaaaaaaaacccnnaggaggaaaacggggcccaggaagcacaccanaaaaaaaacaaagagggcaaagccncagaaaaaacaggcccacgcaanccaaggggccangagccaagggcggagaggccncaccgggccnnnccaaacccaggagcccccnnaanngggccgagnnccagaagcccggggccaggggga

SEQ ID NO: 23507 - DNA, 1028 bp, Oryza sativa
  Clone ID: PAT_MRT4530_28580C.1
accaactcctcccctcccagaacggcaaaacccccagaaacgccaaaccctctcgccacgaaaccctagggagagccgcggcggcggcggccatggcgaccggcgacgacaagcccccctccctcgacgccgacatcgacatggccgacctcgccacgctcgacgcacccgcgtcctccgacgccgccgccgccgcccgcttccgccccagggccaagggcaagccgaagccgaagccgaagcccgagcccaaggcggaggattcgaagctcaaggcggatgattcgattcccatgtccaagcccgaggagcccaagcctgaggctgccgcgccgatggaggactcgatggaggtggatggggtgggtccgagcgccagcgccagcgcggaaggggtgggagctgaggaggtggaggatgaggaggactacgtgctgcgggagattgacgtctactttacgcccaagcccttcgacgaggacaccatgctttacgtaatgcaatatccactgaggccgtgttggcgcccatatgagctaaatgaaatatgtaaggaggttcgtgtaaagccattgagttcaaaagttgaagtagacttggatatcaatacagagtgtgaaaattatgacccagaggttcctctgccttctagactaactgaacagacactatcatcatccaaagcagctgatgtggctgattatgcagttggagttcttagaggcaacttggttcatttgaatcatattgatgcagtgatgcaactgcgaccatcaatgttacatgtaaattctggtcgatcaaatgctaggcaggcacatggaggagcgagtagtgatgctagcggctcaactatgccatcagttaagcgaaatgagcactcagaagattcgaaagactacactgaagaatctgagccatggatttctctcacttaccaacaggcagggagtaacgttgcaagaaaataccatgctgagatggtatcagatgatggtgggcctatagatttcacaatgagcacgtaa

SEQ ID NO: 23508 - DNA, 534 bp, Oryza sativa
  Clone ID: PAT_MRT4530_28581C.1
atgaagaaagacaaaaacaagggagatgagctcttctttgaccaagccaaacacctctgtggttgcctcacaagaagcctcctatctcaggcagaagcaggcggcgacttaacttggcaccgcgcacggaaggagccacggcggcggggcgcggctgacgcggcggcggcggaggcggaggaggagattgggagtgaagacgacgacgagaatggaaggaaaggaggaggagatggttggggtggtgggatttcaaaaccgggggctgacaggtggggcccacgcggccagcgcgcggcaattccaaaaattttcgtcggggtgtgcgccacgtcggcgtacgctcacaactcacaagctcctggagcgtgcgcggatggcctgcgagctcctcccccatacgccgtcactgccgccgccgccccgcctccagtgatggaaaacaacctctgggccaccctgcaccggagtgaaccaggcaggaacgatcctctgcagccgtcggatggctcaaacatgcatcctagccgttaa

SEQ ID NO: 23509 - DNA, 930 bp, Oryza sativa
  Clone ID: PAT_MRT4530_28582C.1
atggggttcaagggatttgtggagggtggcatcgcgtccatcgtcgctgggtgctcgacgcacccgctcgatttgattaaggtgaggatgcagctgcagggggaggcgtcggcggcggcggcggcggtcgcgccggcgcaggcggcgctgcggccggcgctggcgttccacgcggggcaggccgtggcgatcccgcatgacgtgattgcgccgccgaggaagcccgggccgatagccgtcggcgcgcagatcctgcgggcggagggcgcggcggggctcttctccggcgtgtcggccaccatgctgcgccagacgctctactccaccacccggatggggctctacgacatactgaagaagaagtggacccaggagaacggcggcgtgctgccgctccaccgcaagatcgccgctgggctcatcgccggcggggtcggcgccgccgtggggaacccggccgacgtcgccatgcgtcgggggacgcccatcggccggatggcgcgcgacgagggcgtccgcagcctgtggcgcgggtcgtcgcgaccggtgaaccgcgccatgatcgtcacggcgtcgcagctggccacctacgaccaggccaaggaggccatcctggcgcgccgcggccccggcgccgacgggctgggcacgcacgtcgtggccagcttcgccgcggggctcgtcgccgccgcggcgtccaaccccgtggacgtggtgaagacgagggtgatgaacatgaaggtggcgcccggcgcgccgccgccctactccggcgccatcgactgcgcgctcaagacggtgcggtcggagggcgtcatggcgctgtacaaggggttcatccccaccgtgtcgcgccagggccccttcaccgtcgtgctcttcgtcacgctcgagcaggtgcgcaaggtcttcaacggcgtcgagttctaa

SEQ ID NO: 23510 - DNA, 1650 bp, Oryza sativa
  Clone ID: PAT_MRT4530_28583C.1
tttttttttttttttttttttttttttttttttttaaaaatgcggattccattgaagtttttgatcaaatccatccaaattcgttcgaatgcaggaacagaaggaacatatgccatggggaggcaggctaaggtacaatctctcaaccaggctgtagtagtaattattcatagcagcagcatcagcagcagaggtagtactagcagaagtaatactagaggtggattgttcgtcgtcatcatcgtggcggtggcctttagaactcgacgccgttgaagaccttgcgcacctgctcgagcgtgacgaagagcacgacggtgaaggggccctggcgcgacacggtggggatgaaccccttgtacagcgccatgacgccctccgaccgcaccgtcttgagcgcgcagtcgatggcgccggagtagggcggcggcgcgccgggcgccaccttcatgttcatcaccctcgtcttcaccacgtccacggggttggacgccgcggcggcgacgagccccgcggcgaagctggccacgacgtgcgtgcccagcccgtcggcgccggggccgcggcgcgccaggatggcctccttggcctggtcgtaggtggccagctgcgacgccgtgacgatcatggcgcggttcaccgtcagcgacgacccgcgccacaggctgcggacgccctcgtcgcgcgccatccggccgatggcgtccccgacgctgcggtagttccggcgctcggcgagcgggagccgcccgtcggcctgcatccgcaccatggcgacgtcggccgggttccccacggcggcgccgaccccgccggcgatgagcccagcggcgatcttgcggtggagcggcagcacgccgccgttctcctgggtccacttcttcttcagtatgtcgtagagccccatccgggtggtggagtagagcgtctggcgcagcatggtggccgacacgccggagaagagccccgccgcgccctccgcccgcaggatctgcgcgccgacggctatcggcccgggcttcctcggcggcgcaatcacgtcatgcgggatcgccacggcctgccccgcgtggaacgccagcgccggccgcagcgcagcctgcgccggcgcgaccgccgccgccgccgccgacgcctctccctgcagctgcatcctcaccttaatcaaatcgagcgggtgcgtcgagcacccagcgacgatggacgcgatgccaccctccacaaatcccttgaaccccattgctcctcctcttcacaaatcggacggaaagaaaccaaatcaaaaggaaagaagaccaaaattgcaagaaagctcaaaagaaaggagcaatcttttctattcctattgctgccaataggagctggggcacatctcactggagacgaggagatgggaatggagggcgaaggctatggaggaggagtgtgggacgctggccctctgtgacatatgctgctcgtgcgttcctctttcctggggcttggcttccgatgtgctgtttgttccccggggcgtgcccctccaggcggcccacaagccgctatttatagttcgcctcgcacgctggagggagcttggagacggcacgaggaggaggaggagaaggaaagaaggaggcctcgtgccgattcctgcagcccggggatcca

SEQ ID NO: 23511 - DNA, 315 bp, Oryza sativa
  Clone ID: PAT_MRT4530_28584C.1
atggaggaggagtgtgggacgctggccctctgtgacatatgctgctcgtgcgttcctctttcctggggcttggcttccgatgtgctgtttgtttgctgcgtcttggcagaggaagaggctcccaagccgctatttatagttcgcctcgcaagctggagggagcttggagacggcacgaggaggaggaggaagaaggaaagaaagaggggtcgcggtggttctggggaaggcagattcggaggtgggtggtggccgcgggatggggaggacctggccgccccgcgagagagatctctggtggtcgcttggacttga

SEQ ID NO: 23512 - DNA, 744 bp, Oryza sativa
  Clone ID: PAT_MRT4530_28585C.1
atgatgatgagtagccgcagcagcgtcagcctcggcgtgctgctcctgctggccgtgatcctctccgccggcgccgccgacccggacatcctcaccgacttcgtcgtgcccagcgacaccgacccatccgggatcgacggcgccttcttcacctacaagaacctcgtcaccggcaactccggcgacccggccaagctcaccgtcaccaaggccactcacgccgagttcccggcgctgcttggccagtccgtgtcctacgccgccctcgtcttcggcgccggcaccgtcaacccgccgcacatccaccccagggcgtcggagctgctggtggtcgtgcagggcccgctgctggtggggctcgtcgacgccgcccgcaacggcaccgtgtacacgcagacgctgcagaccggcgacatgttcgtgttccccaagggcatggtgcacttccagttcaacaatggcaccgacgtcgtcgcccgcgccttctccgccttcggcagcgccacccccggcaccatctccctccccgccgcgctcttcggcagcggcatcgacgacaccatcctcgacaagtccatgcacaccgaccaggccaccgtcgaccagctcaagcaagaccaggcgccgccttcgccgaggccctcgccggggtcctcctcctccgccgccgcggctttgctgccgtcgcgctgggccatcaccctgctgctttgcttcgcagcctcctactacttttacttctag

SEQ ID NO: 23513 - DNA, 582 bp, Oryza sativa
  Clone ID: PAT_MRT4530_28586C.1
atgaagccagatggtgaaactcagcttcgtcctacagctgctggacatccagatcctggtttgggcacatcatctgcagaatacgtggcctctctaggaccagctacagctccagtatcttatccatatatcagtacctattatggaggcacttatggtgcttatagtggacaacctctggttaacgctgctttaatggcaatgcctccgcattctgtgcccttggtgaccgatgctgttgtagagcccatatatgtcaatgcaaggcagtatcatggtatattaaggcggcgccaatctcgtgcaaaagctgaatcagaaaataaggccaacaaaatccgcaagccttacctacatgagtcccgccatctgcatgctttgaaaagggcaagggggtccggtggtcgatttctcaactctaaggctgtggaggggaagcaagacactaaatctgtagataaaaaggatggagctgtgccatctgaggagaagagagacaagaagttggcaaatagcattatcaaattggagaactcgagcccaacaacacaaccaggtgcagatgcgtccgatgttgtatga

SEQ ID NO: 23514 - DNA, 227 bp, Oryza sativa
  Clone ID: PAT_MRT4530_28587C.1
ctaagatggaggaacacgtatcgtgctggtgcaaggctagattctaagtagtgtaaagaaaggaaaaagtacgaattacccccccgaactattgcggtcgtccgaattacccccctgaaccacaaaaccggacattcttcacccccaactatgcaaaccggacgaattacccccctcgacccaatcagtggtggttttggtctacatggcgtacgcgtggcagtcca

SEQ ID NO: 23515 - DNA, 3285 bp, Oryza sativa
  Clone ID: PAT_MRT4530_28588C.1
cgcccctgattcgagcatggctcagaccagccgtgtctccccaagctcctcttctctaatcccttctctcttttcttctgtgatgtgatctaattggtgttctcttgttattgaagatgttcctgtagtgcgagattatcctgatgtttttcccgcagaattgccacggatgccacctgagcgtgatgtagagttccgtattgatcttgttcttggtacacaacctatctccagagccccgtaccagttagctcgtcctttccaagaagagttgaagaaacaattagatgatctattatccaagaagttaatccgacggagtgtgtcgccatggggcgcacctgttatttttactgagaagaaggatggaagttggcgtatgtgtgtggactatcgggccttaaatgctgcgacaatcaagaacaagtacccattgcctcgtattgaggatttgtttgatcagttaaagggagcgaaggtgttttctaaaattgacttgcaatctggttataaccaaattcgagtgcgagaagaggatattgagaagaccgcattttccacgaggtatgggcattatgagtatagagtaatgtcttttgggctgaccaatgctccggcctattttatagaggcgatgaatagcatgttgcatagctttctagataattttgtggtggtgtttattgatgatattctgatttactccaaagatgtagaggagcatgagcgtcatctgaggatggtactagggaccctacgagaaaacaagttctaatgtaaactgaagaagtgtgagttctggcttcctgaagtggctttcctagggcatgtaattaatcagcgatgtgaggagttttttgggtatggcggggtactaccgacgctttgtgaaggatttctcgattatcgctaaacctatgacgatgctcacacataaggatgtgaagtttcagtggacggaccaatgcgagcgtagtttccaacaattgaagcagaggctggtaactgctccggtgcttactttgccccaacctggcaaatgtttcactgtctattccgatgcttcatgagtaggccttggttgtgttcttatgcaagacggcaatgttatagcttatgcgtctaggcagttaaagaagcatgagcagaattaccccactcatgatcttgagcttgcaacagtggtctttgctctcaaaatatgaaggcactacctgtatggagaatcttgtgatattttcactgatcataagagtctgaagtacatcttcactcagaaggatttgaactttaggcagaggaggtggctagaattaataaaagattatgatctcaacattcagtatacccctgaagtcaaggaagagattttgcgagaagcacactgaacaccatatactgtgcatcctggggagaacaagatgtatcatgatctgaagaagatctattggtggaagaggatgaaagtggatgtggccaagtacgtggcatcatgtggggtagtgaggttacatggtgtgcctcgctcgattgtttctgatagggatgctaagttttcttctaagttttgggaatctgtgcaagaggcatttgatactcaattgaaattcagtacggcttttcaccctcagactgatggtcaatctgagcggaccattcaaactctagaggatatgttgagatcatgtataatttcatggaaaggcagttgggaggatcatttgccgctcgtagaatttgcttacaacaatagttaccatgctagcattcgaatggcaccatatgaggcactgtatgggagaaaatgtcgatccccattgtgttgggattccataggggagagagctattttaggacccgattgggttcaacagaccacagaacggatagcagagatacggcaacacatgcttgcggctcaaagtagacagaagagctacgccgatgtcagaagacgggaattagagtttgaagtgggtgatcaggtacttctaaaggtatctcctaccaaaggtgttgtgagatttggaacgaaagacaaactcagccccaggtatattggtccattcttgatagtggaaagagttggaatcctagcgtatcgccttgagttaccagagtccatgaaaggtgtacatgatgtgttccatatttccatgctgagaaaatatttaagagaccctgaacatcatattaccgtagagtcggtgacaattgggcaagacttgacatttgagtctcgtcctgtaagaatattggaggaatctgagagggtgctcaggcatagaactatcaagtatgtcaaggttctctggacgcaccagaccgagcgagaagccacatgggaacttgagtcacagatgcgggagaagtatccagagttattcacgtctggtgagttatataagtcctaccgggcagggcaggaagagcagagaagtcaaggaattgggaggaagagaggcaaggttggggattttttgaatatagtggtttatgcgtagttttgctccacaagtgtggagggttccaacgttggaggagttgagtcggagtatcgaaggagttaaggcaaatacaaaacggacttatgtaatggacaaactgagttgttttgtttggcttaacttgcataattattattcaattgcttgaaattacttattgtatgactctgacgttatgctacttattcgtgtttcgacccatattcaaattcatgacgttattcatgtttcattattccggatgttctgtttacattattcaagaaccatgcgtagacatgggagtgcaatttgggtctttattcatgatccttgagcagcgctgatcacgccttgctcggcttaccggtaatgctaagaggatattcacacctgcccgagagggaactactattttttgtctcctttgttttaaattaatggaaagcaaatgcttcatattggtttcttattgcactaaacctgcgtatgttttactagttcaatattgtacttactgagtattctttactcactcttgtgtttaatttggtttttaggtacctaatgacattgatcggcatggggcgggagtagcacccttggactacacattattattgcacactattggaatttagttttagattatgtttctgcttagcataagttttgcgtagaacttgtaacggtcatttaaagttccggtccttattttcacgtggaatttgaggagctaggatggtttggattgtgtggattatatcgttattgagccctcttatatctgacaaacaaa

SEQ ID NO: 23516 - DNA, 285 bp, Oryza sativa
  Clone ID: PAT_MRT4530_28589C.1
atgggagtgcaatttggatctttattcatgttcctgtggaaagaattatcttcgctggtggccgacctaaggctaccgcaagcggagatacttctttgctggcggctgcgttatgtccgccaccagcaaggacatgtcttcggtggcttcgctagcggccgtcctaaggctaccgccagcgaagagatctctttgctggcgggcgttcctttctcggccgccagcgaagatgcattttggctggcggctgagtccggctaccgttgtgagcctagccgagtctag

SEQ ID NO: 23517 - DNA, 697 bp, Oryza sativa
  Clone ID: PAT_MRT4530_2858C.1
ttatttaggtattaatattaactactttactaactagttgaaagcaaatttggcccacctactctcacgacaaccaatgaaaaaatgaatggggacgtgaaatacacttcttgatagtgggtcccgcgggcaaccaacgagggatggtcacaataaagtatacaaatcactttcagatgtaattgaaggtaaagaggggaggtttcgcgaaactctgcttgggaaacgggtcgattactcggggcgttctgtcattgttgtgggtccttcactttcattacatcaatgtgggttacctctagagatagcaataaagctttttcagctatttgtaattcgcgatttaatcacgaaacgtgctacttctaatgttaggattgctaaaaggaaaatttgggaaaaggaacccattgtatgggaaatacttcaagaagttatgaggggacatcctgtactgttgaatagagcacctaccctgcatagattaggcatacaggctttccaacccactttagtagaggggcgtactatttgtttacacccattagtgtgtaaaggtttcaatgcagactttgatggggatcaaatggctgttcatctacctttatccttggaagctcaggcggaagctcgtttacttatgttttctcatatgaatctggctgaaggtgccattgggaccccaattgctttaatt

SEQ ID NO: 23518 - DNA, 176 bp, Oryza sativa
  Clone ID: PAT_MRT4530_28590C.1
tgtcgggcccgccagcctaccttaccggcgcggttagtcaacgcgcttgacaccgacatcttgtggaccatcagatattcgatgtttcgccgaaccaaccgctacttcgtggcctatgttgtggaccctcagatatttgacgtttcgcagaaacaactgctgtttcgtggcctatg

SEQ ID NO: 23519 - DNA, 1854 bp, Oryza sativa
  Clone ID: PAT_MRT4530_28591C.1
ccgtcctttgggtgtgtctctacctctctctcctcccttctcccacccaccccttctctctctacctctctctcctcccccttgtgggtgtgtgctgtggtggagaggagaaagggaggaagaagaggagagcaagaaccaaaaaccaagagctgctgccaaccctgcacagcctgggcttgtgatcattgattgcccaactattactaccttcctgtttttttcttctcatatagaagaatcccatctatctatcccttatacatatctcttcttctctttggttcttggaaatctcccatctcttctagatttcctttgtggcttcaagggcctccacaccatatcttgattagtagttggttgctcttcttcttgttcttggttttcttgattgcttagggggttggaattttgcggttcttggtttcttggtctttccccccaatctttgcaagtcttgtagagagtatttgagttgttccttccgcttgttggggagccatggatgataggattccgccaccctcgcccttgcagtactcgccgtctcccgtccattcttctcctcaccccctcagttctttgaggtattcttcctctgaaagagagagatatctggctgagttgcttgccgagaggcagaaattagctccatttgtacaagttcttcccttctgcaccaggctcttgaaccaagagattctgcgggcgtcttctttgccacctaaccataattttgttgatcctgagagaatcgagcatggtagcccattgaggttacctggcctcccagtgaatggtcagccaatggatctggagggatggtcagggatgcaaacagagaatatgagggttctgcaagcatcatctatgggctggaatggtcctccagcaattactggcacccctgttgtcaagaaagttgtgaggctagatgttcctgtcgacaagtatcctaattacaactttgttggtcggttgttggggccacgaggtaactccctcaaaagagttgaagcttcaacccagtgtagggtttatattcggggacgtggttcagtgaaagattctgttaaggaggacaagctgagagataaacctgggtatgagcacctgaatgaaccgctgcatgtgcttgtggaagcagagttcccggcagatattattgatacccgtctaaaccaagctgtgactatcctagaggatcttctcaaaccaattgatgagtcaatggactactacaagaagcaacaactgagggaattggccattctaaatggcaccctgagagaggaaagcccaagtcctcacctgagccccagtgtatcccccttcaactccaccgggatgaagcgcgcgaaaacagggcggtgatctcggttccgaaagcattattattctccaaatctggtcatggtttctatgtctgatcacatgctgctgtgctttgctggagatgattggtgatgcatatgctgggatcatcagtgctgctggcctatgcctgtcatgatctgccttgttttatcatccttgggggtgaatgatcctctctgtgggcttgatgtttgacggtattattatttattctttgtgcatctgacttctgaatattaacattattggtttgggtaagttaacaacaaggcccggtttggccaatctagaaagaattgggatcccaagtgtcggacaataatcaggttttgtcggtgtacctgaaagaaatagtagtaatttgtcaaaggggctggtgctcttgtgtgctagtgcttagtacaagacagccaagcaatgaagcaagtatagctgaagagacaaccctccattaatgattatttgcattcatac

SEQ ID NO: 23520 - DNA, 451 bp, Oryza sativa
  unsure (1)..(451): unsure at all n locations
  Clone ID: PAT_MRT4530_28592C.1
acactatagcaaagctatgacgtgccctgctcgcgtacgttagcttctattaagagcgaccgcccttcctttttttttttttttttttttttttttttttttttttnaacccttcaaatacaccacaattttgtggggggtgtgcatttttttttgcatataggggtggccctaactgaacaaatttaggggcctgtaaaaagtaaaaaagctcttttgaattttggggggggatccttcttagtggccctctgagctgcatcaagaggtattttattatcatgtttgtcggctgaaattttttttttttctccgcatgatttatgatggtggggcatattataaagagatgatattcccttctttgttgaccaccaatacacccctcataaatattttctgcttgttagctattggcatatttccaactgcaggaggagaggcgggtgtg

SEQ ID NO: 23521 - DNA, 457 bp, Oryza sativa
  unsure (1)..(457): unsure at all n locations
  Clone ID: PAT_MRT4530_28593C.1
cccccccaaagaatcccccccnccaagggtcttcccgangaacctgggattttcccggccacggnttcctccctcggccccccattcggtcgggccacccttccgaggtacgccaaatgttactnccaaagggagccaggaagaagcttatccccnccagaatacttaaaatgtgaaagcatgncagaagaattgcccnccaaccttttttggaaattttttatgattcttaaaaattatcccaagaaatgaatataaccattttttgggttcaggttaatagttgtcccatgntacttgttttcccatcggttcccatgcatctcccaggtatggtatgactttgcaaaacttattttttcgggcttgnctacatatggtggcatttcccctgtcactgaaagcaattgttttaaataaaagcaaaattaactgttaaaaaaaaaaaaaaaaaaaa

SEQ ID NO: 23522 - DNA, 192 bp, Oryza sativa
  Clone ID: PAT_MRT4530_28594C.1
atggccgccttgccctcctcctttctttcttctttgccttcactcaccttcatcatctccctctcctccggcgtgctccctgtcaatgaagaggagcggggtgaaggagacggctggagctcgcgggccagggggtttatcagcgtggcaatcctcactggagcccaagcacaaggcaaggagcgagaatga

SEQ ID NO: 23523 - DNA, 1614 bp, Oryza sativa
  Clone ID: PAT_MRT4530_28595C.1
tgggtacgggcccccctcgagtttttttttttttttttttgaaagattaattaaaaacctatcaataatgatatgtgattcaaaacaagaacaccacgtacatacacaacacagtacatatgtaggagtaattaaacacactagctgatgagcaatcgatctgaccggatgatgatcgagctaagctcaaatatggtttatgtggacgctatatatctagcaaaaactaaaactaatcacggacgtacgtagagtacgtacgtcgaacacttgaaaaatccaaatggacagcacgggcagatgacagtaaattacggagagagatcaatccatcgatctgacgatcattctgattgattgcaataatgcatgcaggttgtaatcatggtggcgagatattgatcagttgcggagttgagcttgttggtcgagcttgaggatggtgctgaggttcatgggggtgatgtagtcgagcgagccgtgcatgaactgctgtacgatgaggcggttggcgcgctcggtggggtggaaggcgtcccagaagacgtacgagtcgcggtcggcgcagaggttggagacgagggtgcagaggcccatgccgttgaacctgccctgcccgcagcacgcctccgtggaggtctcgaacccgtgcgccctggggtcctcgatgaagtcgtcgtgggcgcgcttggtgttcacgccgacgaacacgtcgccgccgacctccgcgttgagctccgccagcatcgccaccagctgcgggttgtacgcgtccgccgcgcgctgcagctcggcgtcgcacccgccgtcgaggctgtgcagcgcgagctccgccggcacgcacccgatcggcccgacgccggtgaccagcacccgccgcgcccccagcgcgtggatgtgccggagcacctgcttgtactccgagaggatgtaccggatgtagtccggcagcgagaactcccgcgaccgcggcgagtacgggatgaggtagtagttgttcacgaagtcgttgccgcccagcgtgatgagcaccagcgacccggcgaccaccttcttcgcctgctcgtcgccgaccaccgcgcgcagccggtcctggtactgctcgaagtacctgatctgcttctcgatgtggatgatgttcgcgaactgcacgccggtgtcgttcaggatgccgatgccggccgacgcgaagttcgcgccgacgagcagcctgtcgccgtccagctccgggctcaggtacggcaacaccggctcagctcccaggtgctcactgataatgtcaggcatgttcttgccattggagaacctcccggtggcgcggtggtcgggggtgtcaatgccgtacggcggcgagtcggcgcgggccgacgtgatgaggtagttgttgttgccgttgtcgacgagggagtcgccgaagacgaagaaggcgcgggcggcgtgcgacgccgggagcgcgccgatgcagagcgcggctgagagcagcacgagccatgacgacgacgacgacgccatgaatgctactactgctatcactatacactacgtaagtacgtgagactcaataaacgcctgttgctccctcgtgccgaattcctgcagccgggggaggcagtg

SEQ ID NO: 23524 - DNA, 613 bp, Oryza sativa
  Clone ID: PAT_MRT4530_28596C.1
tcccccgggcgcaggaattcggcacgaggaagcaagaagctctctctagtttatttactttgttctagtgctagtggagtagaattagaatagtttcttagttcttcaaggcttctggagatttcgtgtatagctctagtagctcttctttctcttgcaagactttacgcaaaaataaaatattcttctttatatagttttggtcttttgcttcatttatatatgtaggtcatacttgtctcgtaataattatgtagctaccttactggagatatgtaatggtattggtttggtgttcatttatatgattgctttatgtcatatgtagagatgtagagtagtatttagtagtgtaagcgcgatgcttagattattagataccattaaattgtgttatatgtcacgaatctatagaggtaggccgctaatggtgacagctcagtacggatattcctccacgtacgtatatagggctaagagactttcctactgttccttcgtatctattaccggttggatgggcatgacggattgtcctaaagaactcagtaatcaggggtggtttctcgatataccaggagggcaaaattagggggtattggctgcataatca

SEQ ID NO: 23525 - DNA, 283 bp, Oryza sativa
  Clone ID: PAT_MRT4530_28597C.1
tccaagcgtacgattgaaccggaatctggctcaagcgcaggcactggtggcttttaacttgctgtctacatatgagaatataccctaggtactatagtgcaccgggaagtatgaccacccttggcggggtcttggactgaattttcacaatattgtagttcggaagtgataatataagctcaatgttcattgtttgtgaaatgtaaaacttaatgtgatataattagaaaaaaaaattatctttcaaataaaaagggtggcctttaaaaaaggccaaattttt

SEQ ID NO: 23526 - DNA, 138 bp, Oryza sativa
  Clone ID: PAT_MRT4530_28598C.1
atggagctcctcctcttcttcgttcaatgcatttgcgtcaaggaccccaccgccatcagagacctgcgctcttgtaatcctgtccctcttgggtctccaacccgctcacctatctccgccaccacgctccagtactga

SEQ ID NO: 23527 - DNA, 956 bp, Oryza sativa
  Clone ID: PAT_MRT4530_28599C.1
gcacgaggctctctctctctctctctctctctctctctctctctcgctggctggcacggacacccagacagagagggaaccacccccgccgggagcgaaagcgaacgcgcgggcgcccgccagcgaaccggtcacgtccatagacacgcacaaacagagcgcgagggacatacaaaccacacgcaccacacgcaagcaggacgcgcacgcacggctccccctgacgaggggggagaaacacggagaaacaacacaaaataccatcgggggaacaacaagccggagcacacggtatatatgaacgacgaacgcacgcaccgcaagggaaacagtcgggaaacccaacgcaagtagacagccggaaatagttcggggaacgaacatcccgcacaacacgcagggcggagacccccgcaccaacttacggcatacaggacctcagacccaaagggccgaaataaccggccgtagcaagcgcgcgccacaccgaccgcgagaagttaaaacgcatagacccctgcgcgaaacaagactacggacacgaaggagtggggcaaaaagaacgcgcaaaatccgacgggaaatacaaacgtgagagcaactccaatgcgtgcaagcaagacaacgaacaaaagcggatagtgacgaacggatacaggaaacgcagatccaaacaaaggcggaggaagatacacttgcctacaaaccgcccacggaggaagaaaaaaacaacgatgaaacgtaaagtcgccagcaaacaacggcgagccgacagaacaaagaggggaacaagacaacaatgcccccacagaataccaccgggcaaaaacagcaaacgggaacgccaacacagcaccgcgcgcgacgcaaacaacggcgagggtacagtttgccggggcgacaacagtaaaaacgacgctgcaacacagaacatcgtatgagtgaacgtgcagacg

SEQ ID NO: 23528 - DNA, 201 bp, Oryza sativa
  Clone ID: PAT_MRT4530_2859C.1
atgatgaagaaactaagagtagctaaaaatgaaggtgcaaggaagcatacctacaaggagcctccacttggagatttgaggagccaaaaaggggtacgatatcttccggcaatgcagacaaacgccaaccggcaaaacgccaaggaacgccaaggaaagaagagaagacggcagcgccaggctgggggcgccgtagatctg

SEQ ID NO: 23529 - DNA, 456 bp, Oryza sativa
  Clone ID: PAT_MRT4530_285C.1
gtggatcccgggctgaggaattcggcacgaggttgacatggcacgtttgatctttaaaaaaataaaatgagcaaaattgaaaactaacaaagttgaaacaaaacatacagggcccatatgctcctttaatttttctttttagatcaaactgacacgtaagcgtcacctcaatgccacgtgtgataaagaactagttaaaagagacacatgggcgccatatcagctaaaaccagggacaatggtgtcaatggaccttatttgcattggttttataagttggggatgcgttgtatccggttatgagcgttctaggaagactcagcgacaaaaattgggatctaaagtgaacttattcgttacttgcataacaaaatgttatgggcttcatcttgtcttgttgttgctagtactttctagagcactcggcgtggagggatggcagcggcagctcgcttg

SEQ ID NO: 23530 - DNA, 337 bp, Oryza sativa
  unsure (1)..(337): unsure at all n locations
  Clone ID: PAT_MRT4530_28600C.1
aaaacgcggcctttttctcctcttcttcctccgcctcggccggcgactcctcgccgccgacgtaaccgcgtcctctctctctctctctctctctctntntctctctctctctctctctctctctcctccgagcccagaaacttctggaagcttctagtagcccaacccagcgcggcgcggcgcacgatgtgcgggatcttcgcgtacctcaactacaatgtgtcgcgggaggccggtacatnctcgaggtcctcttcaatggcctccgncgcctcgagtaccgcggctacgactcctccggtatcgccgtcganggcgacgtttccctcctgcgctt

SEQ ID NO: 23531 - DNA, 432 bp, Oryza sativa
  Clone ID: PAT_MRT4530_28601C.1
atgcaggatttacctcaagtcctcaacgtcgtcttcgtcggagcggcgcgacgcctcgtggaggagtctggagctactggaggagagtgcagaggagggggcacggagaaggctgtaggcggcggcgcggcgcggtgccggtcgctggcgaatttcaatcacttggtactaccggccactactcccagccaaggctccgagcatcactactcgccaagagcttcagccacctgcccagcactgcgcagcccagatatcatcatcaaagtcaaacaatcactggagaagtacaacccgacgagcatcgtgcacgccaagtcgggcgaaacgccatccgcggccgtagcgtccagcacggcgagcagtgcgcccgggcgagaagcgtggaaggcgcagtccgcgctcgcgccgttccccgacttgttgtcatag

SEQ ID NO: 23532 - DNA, 1486 bp, Oryza sativa
  Clone ID: PAT_MRT4530_28602C.1
cggaagcatagctcgcttccacgcaagattaaaagctgcccctcttgctgctgcagactgcagtcctgcaagatcagcgcctgaagcaagaagcgaagaatcaaacgagagcctagcagcgtagcagatcgatcgatcgatcgatattatggaggcgcgaggaagcagaggaatgcggctgtggctcctgtccgtggcggtgatggccatggcgatggcgacgaggtcgcaggcgcagctgcaggtcgggtactacgacacgctgtgcccggcggcggagatcatcgtgcaggaggaggtcagcaaggcggtgtccgggaaccccggcatggccgccggcctcgtccgtctccacttccacgactgcttcgtcagggggtgcgacgcgtcggtgctgctggactcgacgcaggggaacagggcggagaaggacgcgcccccgaacacgagcctccgcggcttcgaggtcatcgacagcgccaagtcccgcctcgagacggcctgcttcggcgtcgtctcctgcgccgacgtcctcgccttcgccgcccgggacgccctcgcgctggtgggagggaacgcgtaccaggtgccgggggggaggagagacggcaacgtgtcggtggcgcaggagacgaacgggaacctgccgccgccgtcggcgaacgtggcgcagctgaaccagatgttcggcgccaaggggctcacccaggcggaaatggtggcactgtcgggcgcgcacaccatcggcgtgtcgcactgcagctccttcagcaaccgcctctactcgtcgggccccaacgccgggcaggaccccagcatggaccccagctacgtcgccgcgctgacgacgcagtgcccgcagcagcaggggcagcccgcggcggggatggtgcccatggacgccgtcacgcccaacgcctttgacaccaactactacgccgccattgtcgctaaccggggattgctcagctccgaccaggcgctcctcgccgaccagaccaccgccgcgcaggtcgtcggctacaccaacaacccggactcgttccagaccgacttcgccgccgccatggtcaagatgggctccatcggcgtgctcaccggcaacgccggcaccatcaggacaaactgcagggtggccagctgatcgatcgacctaagcatgatgtatagctcgtggcaggcttgtgtgagttgggattgtgatgagattaaattgaaaattgtacgtacgacgacgtagctagctagatagagtgttgtaaacttatttgtttgatcattcatttggtctctctgtattacgtgctagctagctcaattagcttgctcgtgcgtcccttctcccctcttcccgtagattattttactctgcactctgtacttctctgtgacattatagtgacaatatagttttattgttccatcttttaaaaaaaaaaaacacatgctgcgaatagaaagccagaataagaaaccttttttagtt

SEQ ID NO: 23533 - DNA, 809 bp, Oryza sativa
  Clone ID: PAT_MRT4530_28603C.1
ttcaaatccctctcccccagagatcttctcagttctatgtaccagtccccctctaaacacatttgagagacagtcttctctttatccgcacacattctgtaaatgttgggatactgaaaaattccaacattggcttcatggtgtccaaccacggctttgaggcaaatcctggcaaaatagccgtcatccactcaatggagccgcttgccgacttgaagaagctgcacaagctgactgggtgcatggtgtcacttaaccgcttcacgtcccaactaggcgaacgtggcatgccattcttcatgctcctcaaaaagtctgatgacttcacctggactccagaagcccaagcagccttcaacgactttaagcggtacctaacaagtccacccatcctcacaacactcccaaaagagccgattctgttatagattaccgccacctcaagcgttgtcagcacagtcctaggtgtcgaagagaagaagatggatcgatcaagaagatacaacgatcagtctacttcattagtgaagtccttagtgagtcgaagacgcgatacacgcagattcagaaactacgccacgcaatattcatcacggtccgcaaactcagccactgttttcaagctcatccggtgtcagtcgtcacctctcaccccctccgctatgtcatgtttaacaaagaggccaccggacgcatcgccaagtgggcacagctgatggcgtttgacatctccttccaacttcgggtagccatcaagtctcaagtgctctctgacttcatcactgaatggacggaagaacaacaaccgg

SEQ ID NO: 23534 - DNA, 1488 bp, Oryza sativa
  Clone ID: PAT_MRT4530_28604C.1
gttactggcacaggttcgtcgcagccgccaccattacatgacgatttgctgcccaaccttcccctctccagctgccacttgctaactgttgtgcttctatttggacgtatggatgttcttatgctgtcttctctcggaggacaagagacattgaagtcgccccaacagagtaatgacgccttcctttttaccgttagatcaatgacttcattaccccacagggacctcgatcgatcagatctgactcaaaagaaggaaatattagaatggtttcaaacactcaaattccctgatgggtatggatcaaacctaaggagaggagtgaacttcaaaaagatgcgaatcaatgggtcaaaaagccatgactaccacataatgatggaatgccttttaccagtcatgttccgtggctactttcaaccttatttgtgggaagtgatagcagagttgagcttcttttatcgtaaattgtgtgcaaaagaggtagatccaattgatcttgaaagcatggaacttcaagtgcctgttttgcttttgtacacagttcacaatccagtcgctcggtacaatgttattgttgagtcgagagaatgctcacttagcctcttctctattaagggtgattctattagccgaggagtcactagacacttaactgaagtggagtgggaggctgccatgttgtacgtcctcacaaatctgcctgaagtggatgactacattggaaaattcttacatgaggagtggagtagacgaggcaagccaacaagacagcaaaaggagaacctcctacggaatggtgctaggaatggtcgtcctaatttcgtaacctggttctaccaacaaagtcttatagacatgaacattaatgatgatctgaagcaagtagctaaaggatgccatactagagtgaagacatatagtatttatgatgtgaatggctatcgattccgtacagataaatatgagaaggagaggccaaatgcaaccactataaatagtggcttggtgacaataggacaaggagaaaatagtgatatcactgattattatggctacatcaaagaaataattgaacttagttttcatgtgtatgagccatttgctgtagctcatcaagccacacaagtttattacataccatacccatgcaaatctgtaccagccctgattgattggtgggtagtttacaaggttcagccaactggaaaaatagcagcacctgtggataaggactatgactttcttcccaacaatgatactgtccattatttccaagaagatggtctccaaggcacttttgtagttgatcttatggaaggactccataatgtttctgaagccaccagtagagatgccgaaggcattgtcaatgacaaggacttgcagcttctaaatggatccaatgtgctacaacaagatgaatctgatagttctgactctgatgaagatgaggaggagggccccatcattgatgaatattactaa

SEQ ID NO: 23535 - DNA, 125 bp, Oryza sativa
  Clone ID: PAT_MRT4530_28605C.1
gcatgcaagctagacaatttgctttggaaagtctttccattcaccaccttgacgaagcagaagtcgcttagagttatcggcgggatgcttatgcaatttagaggtgttgccggcatcagcgcaac

SEQ ID NO: 23536 - DNA, 5872 bp, Oryza sativa
  Clone ID: PAT_MRT4530_28606C.1
atgatagagaggccacaaaataatagagaggctctaggagataaaaactggatagctgcaatgcaagctgagtatgatgctttgataaaaaataatacatggcacctagttccgtatgagaaaggacaaaatattattgggtgtaaatgggtatataagattaaaagaaaggcagatggaacacttgacagatacaaagctagacttgtagcaaagggctttaaacaaagatatggtattgactatgaggatacctttagttctgttgttaaagctgctactattagaatcatcctgtctattgctatttctagaggttggagtcttagacagctagatgttcaaaatgtctttcttcatggattcttacaagaagaagtctatatgcaacaacctcctggttttgagtcatcctctaaacctaattatgtatgtaaattggataaagcattgtatggtttaaaacaagcaacaagggcatggtattccaggctgagtaagaaacttgttgaacttggttttgaagcttcaaaggccgatacttcattattctttcttaacaaaggagggataattatgtttgtattggtttatgttgatgatataattgtagctagttctacagagaaggcaactacagcacttctgaaggatttaaacaaggagtttgcacttaaggatttgggtgacctgcattacttccttggaattgaggtaactaaagtttccaatggtattattttgactcaagagaagtatgctaatgatttattaaaaagagttaatatgtcaaactgcaagccagttagtactcctctctctgtcagtgaaaaattaactttatatgaaggatcacccttgggacctaatgatgcaacacaatatagaagtatagttggtgctttacaatacttgaccttgactagacctgacatagcttattcagtaaataaagtttgtcagtttcttcatgctcctactacccgtcattggacaggagtaaaaagaattctcagatacttgaatcagtgcacaagtctaggacttaatatacataagagtgcgtctactcttgttcatggatattctaatgcagactgggcaggtagtatagatgacagaaaatcaacaggaggatttgctatatttgtggggtctaatcttgtgtcctggagtgctaggaaacaatccactgtgtcaaggtcgagcactgaggcagaatataaggctgtggcgaatactacagctgagttaatgtgggtacaaaccttgttaagagaattgggaattgagtctcctaaagctgtcaagatttggaggatgcgacgattaagctcgggctctagaggggcctccagttctgcagatggttcagctagtgctgccatctcatctaggaataggacaaggtcatcttcctctcagcaacctactgatcctgttcaagaagaggagcaggaagatgatgagttctggttttgtggccctacaagggtgccaccacgacctacacgagaggaggataaacctgtgcttaggccaataggggatatgcaatgggaggtacaagattatggtcagagtactagagtccccaatggtatcctgactacattgataaaagaaaatttccctggtgtggtgaaattcaagggtagagatgagcctgcatggtctccggaacattacttgcttaaacctgataatgcaaaagctaatcaagcacgcttgccaagcctcctccatcgcgttgaggaagaattctgggggttctataggtgggcagaggggacagaagtggaggctagaagagttgtgcacaactgcgtcaagaaactctttgttgatatattctatgaggctcgtatcctagctgtgattacttatcacaagaagattctgaaaacagatatagatcggccaactgcttgcaggacttatctcacaaaggcggagtatatgaaagctaagccatggtggttcctaaatgctggtcgtgcgtgggcattattgtcagatttgaggtggtgcaatccagaatggcaggcttactcccgtgcttgtagcgaacgcagggcaaagatgaaaacgccagcccatcgccaaggcagtgctaaccttcatcgttaccacaagaatttggagaagaaaatgggcacaccagtgcatgtattgaaggcttatgctcatgccaatagggtagacccagacgagggctactgtgatgaagattcatctcagaatatgttgctcgaggcctatgctcgcgcttttactgagaggcacggagaagacagtaattggcggactgaacccattgatggtgtggctgtgcacatggctggtggtggcaagaaacatggacgcttcttcctgcttaatggactccttaagacaccagatgttcttgctgatgttgggagaagcaggtgctcacttgatgatccacggcctagcagacggctgaggccaaaccctgatgatagtgcccggattgaggagcttgagcgtcaacttcagtgtgagcgtgaggagagggagcaggagagggagcgggcacgcgaggagagggagcaggagagggagcgggcacgtgaggagagggagcgggcacttgaggaaatggagcggacacgcaaggagatggagcaggagagagagcaggcacgtgtggagcgggtacgtgagcacgagttgttccaggagaaaacaagctattttacatgtgctttggaggtactgcaaagaaagctcaacataaactttctgcctccttgcacacctacgttgactcatccgcaaaaaaggatggaagaggatcgcagttggatgtacaatggacgtagaaagcgtaatcaggggtttgatgcattgttgaatgtgtttggtgctctccttccacaaggccacaagctacctctcaatttatatgaggctaagaaatttctaagtgcactgaccatgccatatgagaaaatagatgtatgcccaaaatattgcatgctctttagagaggaaaattcagagaagacccattgtgacaagtgtggtgagagtagatatgtggaggtgcagaacagctatggtgaaaagaagcaactaaatattccaatgaaagtccttcgttatataccattcatcccaagacttcaacggttatacatgtctgaaccacaagccaagcaaatgacttggcacaagtatggccataggtaccatcctaacaagatagtacacaccgctgatgctgaagcatggaagcaatttgatcgcgacttttcggaatttgcatcagacgctcggaatgttaggattgcaatagcaacagatgggtttaatccatttggtatgggtgctgcctcctacacctgctggcctgtgtttgtcatccctctcaaccttccacctggtgtttgcatgcagaaacacaacatgttccttagtttgattatccctggacctgattatcccggcaagaaaattagtatgtacatggagcctctagttgatgacctactccatgcctgggagcatggtgtgcagacatatgatcgggccactaaacagaattttaacatgcgggtgtcatatttattctcgttccatgatcttccagcctatgggatattttgtgggtggtgtgtacatggtaagatgccatgtccagtctgtatggaggtgcttaaaggaagacggctgaagtttggtggaaagtactccttctttgattgccatagacaattccttcctcatggtcacatttttagaaatgacccaaactcttttcttgcaaatactactgttacgactgaaccacctcatcggttcaaaactgaagaggttcatgttcgcttgcaacgtctgcaacctgctgccaatggagaggggtttgaaggttacggtgaggatcacaattggacacacattccaggcttgtggaggctcccatacttccataaattagtacttcctcataacattgatgtcatgcacaatgaaaaaaatgttgctgaggcaatatttaacacttgtttcgatataccagagaaaacgaaggataatgtgaaggctcgacttgatcaagcaatactctgtaaccgacctgatcttaacatgatccggaggcaaacatctgggcagtggttgaagccaagagctgatttttgtttgaataggactcaaaagaaggaaatattagaatggtttcaaacactcaaattccctgatgggtatggatcaaacctaaggagaggagtgaacttcaaaaagatgcgaatcaatgggttaaaaagccatgactaccacataatgatggaacgccttttaccagtcatgttccgtggctactttcaaccttatttgtgggaagtgatagcggagttgagcttcttttatcgtaaattgtgtgcaaaagaggtagatccaattgagcttgaaagcatggaacttcaagtgcctgttttgctttgtaagttagaaatgatctttccatccggattttttaatccaatgcagcatctaattcttcacctaccatacgaagcaaggatgggagggccagtacagtaccgatggatgtatccaggtgaaagagaccaaaaggatcttaagagcaaagtaaaaaaccgagctcgtgttgaagcatctatagcagaagcatatatactagatgaaatcgcaaacttcacaaccatatactttgctgatcaagtgtacacagttcacaatccagtccctcggtacaatgttactgttgagtcgagagaatgctcacttagcctcttctctattaagggtgattctactagccgaggagtcactagacacttaactgaagtggagtgggaggctgccatgttgtacgtcctcacaaacctgcctgaagtggatgactacgttgggaaattcttacatgaggagtggagtagacgaggcgagccaacaagacagcaaaaggagaacctcttacggaatggtgctaggaatggttgtcctaatttcgtaacctggttctaccaacaatggtttgaccctgcccaaacaaggtacaccccacagtatggtttagtggaagttgcccattcatcaacacttgcagtgtatgagccatttgttgtagctcatcaagccacacaagtttattacataccatacccatgcaaatctgtaccagccctgatcgattggtgggtagtttacaaggttcagccaactggaaaaatagcagcccctgtggataaggactacgactttcttcccaacaatgataatgtccattatttccaagaagatggtctccaaggcacttttgtagttgatcttatggaaggactccataatgtttctgaagccaccactagagatgccgaaggcattgtcaatgacaaggacttgcagcttctaaatggatccaatgtgctacaacaagatgaatctgatagttctgagtttgatgaagatgaggaggagggccccatcattgatgaatatttctaaaaccgatgaagatgacaacgacgaggaccacttctgtgctgacttgctaagttatgaagcaatataagtagcatcattagagctgatcagaaaaggtgtattctcaagtttcaactgcatgttctaggaccaatgaactaaataatctggtgctagctattgtctcaaagatttgagtatttgctttaagtgacatggaccatgatcagcttgtatgcttattcattacaaccaatttttaccaaaatatatgcctatgtctgggatttggcatctcttctatgcttggtgaattgtattgtgatgaaaatttgtcttgatgaatctcaaatgatagggatgcaatgcagtgaattgtattgtgatggaatgtgtc

SEQ ID NO: 23537 - DNA, 1068 bp, Oryza sativa
  Clone ID: PAT_MRT4530_28607C.1
atggtcaccttcttcctcgacaccggcaaggagagtggagaggatggattcatggtgtatggatttgcacttccacaggtgttgcagtcatcagttggtgagacaaatatactcattggttgtcgggtttggcttcacgaagtagatgcaaccagcctcgatggtgggcaagttatcggcttccacagcgaaactcctgatctagctgataaagagggagcggttgtcaaggcttctgaccaggacaaacaccttgtccatggtgttcaccttgtgtaccaggtgcatggatttgcacttccagaggtggtgcagagttggaatggttgtagccatcatgatgatgtccacatagcagggctattgaacagcctggtcgcattcttcctcgacacaaatgaggataatggagaggatggatccatggttggtgagatgcacctcatcgaagataggtgccagattcacaaagttgccgggaaagaggtgaacaccatcaatggtgagttcgtcgtggccacctccctgacctcctccgcatggatgagctccctagaatgggcgaccttacgcatgaaaggggttgagcatgctggtcttatggggtggcgtcatctccaagatcatgacaaggccaatggccatgttggcgatgaagaggttctgtttcatgaagtagatgcagccagcctcgacagtaggcaagttgtcagcttcgacagagaaactcctgatctagctgataaagagggagcggttgtcaaggcttctgaccgggacaaacaccttgtcacggaaatccaacaagctaggagtgaaatactgagaaagccaactgatgttatcaaagtattcaggtggagctgggcggtgcagcggcgtggtgaagggcggcgctggggcgtggtgaagggcgacgcaggcgaggctgtgcggcgctgcgcaggcacgacgcttgcacggcgacgcggcacaagcacagcggctaggcacacgcaactgcgaggcaagaagagctcctcaaaagtgaagaaaaggatgtgtttactgattgaaaatgttcactga

SEQ ID NO: 23538 - DNA, 294 bp, Oryza sativa
  Clone ID: PAT_MRT4530_28608C.1
atgtcagctatggtcggcggcaaggtcaccgccgccgtggtgcacgacgtcatcgacgtcctacagctggtcctgccccatgcgctccgcagccgcgcagtcccgctccagccgatagccgcagccgcaaccgctgccaccaccacctcctcctcctcctccctcacgtccggtgcgacatcaactccgggcatgagcaacatcgtggacaccgccgccgacttggcctacagtcgcgccggccgccaccaccgccagatccgggcgggggtcaactgccgccgccggatctag

SEQ ID NO: 23539 - DNA, 393 bp, Oryza sativa
  Clone ID: PAT_MRT4530_28609C.1
atggggcgtctttggaaaagcacagatgacgtggagttactagggttggcaacgaggcggggcagggacagggttgacaagaacggccccgcccccgctcccttgcgggttcacccggccctagaccgaagggaggaactgggcaaaatcaatccccagccccgcactcttcccgggttcccacagcccagtggaataaagggaagaatggtatgggaaacctgcagccagagcgagagaagagcgaccggagagggaggagagcaatacggggtgccggcggttggagagggaggcaacggcaagggatgcctgaggctggcaggatcaggggagacgacatccgcgggaacgacggtgcgcgcaacatcacatggaggagaggagcgctga

SEQ ID NO: 23540 - DNA, 1505 bp, Oryza sativa
  Clone ID: PAT_MRT4530_2860C.1
atgattgaccaatataaacatcaacaacttcaaattggactcgtttcccctcaacaaataaaggcttgggctaacaaaacactacctaatggagaagtcgttggcgaagtcacaaggcactccacttttcattataaaaccgataaaccagaaaaagatggattattttgcgaaagaatctttggacccataaaaagcagaatttgtgcttgtggaaattctcgagcgagcggagctgaaaacgaagacgaaagattttaccaaaaatgcggagtagaatttgttgattctcggatacaaagatatcaaatgggatacatcaaactcgcatgtcccatgactcatcatgtgtggtatttaaaaggtcttcctagttatatcgtgaatcttttagataaaccccttaagaaattggagggcctagtatatggcgatttctcttttgctaggcccagtgctaaaaaaccaactttcttacgattacgaggtttattcgaggatgaaatttcatcctgtaaccatagcatttccccctttttttctaccccaggctttacaacatttcgaaatcgggaaattgcgacaggagcaggtgctattagagaacaattagcagatttggatttgcgaattattttagagaattcctcggtcgaatggaaggaattagaagatgaggggtatagtggagatgaatgggaagatagaaaaagacgaataagaaaagttttttttgattagacgcatgcaattggcgaaacattttattcaaacaaatgtagaaccagaatggatggttttgtgcttattaccagttcttcctcccgaattaagacccattgtttataggtctggggataaagtagtgacttcggatattaatgaactttataagagagttatccgtcggaacaacaatcttgcctatctattaaaaagaagtgaattagcgccagcagatttagtaatgtgccaggaaagattggtacaagaagccgtggatacacttcttgatagtgggtcccgcgggcaaccaacgagggatggtcacaataaagtatacagatcactttcagatgtaattgaaggtaaagaggggaggtttcgcgaaactctgcttgggaaacgggtcgattactcggggcgttctgtcattgttgtgggtccttcactttcattacatcaatgtgggttacctctagagatagcaataaagctttttcagctatttgtaattcgcgatttaatcacgaaacgtgctacttctaatgttaggattgctaaaaggaaaatttgggaaaaggaacccattgtatgggaaatacttcaagaagttatgaggggacatcctgtactgttgaatagagcacctaccctgcatagattaggcatacaggctttccaacccactttagtagaggggcgtactatttgtttacacccattagtgtgtaaaggtttcaatgcagatttcgactctgactcccccactccagtcgttgctt

SEQ ID NO: 23541 - DNA, 675 bp, Oryza sativa
  Clone ID: PAT_MRT4530_28610C.1
atggagagcgagggcttccataagataatggcctactttcccgacaatttggtgaatctgccgcctgtccctgatgagccccactgtgtgggcaccatcacaacggccgccaccattctagcgctaccactgatggtggagcttgacgcctatgtccactacatcatggagtctgtcggggagctactcctcatcaggagtttctctgtcgaagctgacaacttgcctactgtcgaggctggctgcatctacttcatgaaacagaacctggcaaacaacaacttcctcaagaagctggccattctcgagctcaacggcaatagatacggggacgcctccattgccacattcttcaaacttgacaccggcagcttcgtacgcaaatgtgtcctagtgctacgtgactacctcttcatcgccaacatggccattggccttgtcatgatcttggagatgacgccaccccataagaccagcatgctcaacccctttcatgcgtgcgtgaggtgggatgatcaggagagcgagggcttccataaggtaatggcctactttcccggcaactttgtgaatctggcacctatcttcgatgaggtgcatctcaccaaccatggatccatcctctccattatcctcatttgtgtcgaggaagaatgcgaccaggctgttcaatag

SEQ ID NO: 23542 - DNA, 1405 bp, Oryza sativa
  Clone ID: PAT_MRT4530_28611C.1
tgtcatgacacgtcaaaggtggataatttggtgtggctttttccctttgttgaagtgctggaagaggctcctacaatatatttgtgctaatcgtccaacagattatttggtagaaatagtttatgccttgacactaggtgctattgccctcagccagtctggtcaaaatcttgaaggtaccagcgatattgaggcgtctatttgggcacccctctgttcctagttcatcagaggcctctgatgaggttacttttttattgaagacttttcaagagaagatatgccaggggtttgacaattggtcgccttacgttgggaaacctcttttacatcaggtacggagctctgtcagatggctatgctctattattgagaattctggaccattcacggattcggtacggatggttcttgaagagagcacaataccagttggggtgttccacaatattgtcatgacttctcatctaatgccttcccgggccgctgggtctcggcacgaggatcctgctcttttatttaccaatgcttggaaggcttttggtgattttgcagaaccttttggatgccaagtgtctgactttagcaagaggatggtgtgggagttgcctgattgttctattgataaacagctaatcccgagccaatctgccaggagaaaactggcactaggagatagcgcaagtagacgtgtaagggacaatcaaacacatgaacctagtggacagttctctcgagggggggccccacctagtgcctctataggtcatacgcgtagagacactttccgccagcggaaaccgaacacaagtagaccaccttcaatgcatgttgatgactatgtcgcaagagagagaaacatagaaggtgcaagcagtgcatcaaatatggtaagttctactccacgtggagcacttagtggaaggcctccatccattcatgtagatgaatttatggcaagacaaagggaacgtcaaaatcctgttctagcgccatctggggatgcaactcaggtaagaagtaagtcaactttggatgacaatgtctctaccaagccagagaaaccgagacaaccaaaggctgatcttgatgatgatcaagaaatcaacataatctttgatgaggagtcaggatcagatgataaacttccttttcctcaaccagatgacagtctgcaatcaccacctgtcattattggggagaactctccaggtcccgttgttgatgagacagaaaatcagcagaacggaataaatctgttttctggtacagttgtatctgagagtgatgaagcttgtgaaactgtcatatcttcacagacagcaatccgtcaagaatctaacatcccttctgagcgaaaattttcagtttctagcccagagaaggtcatgttccccgatcatgc

SEQ ID NO: 23543 - DNA, 423 bp, Oryza sativa
  Clone ID: PAT_MRT4530_28612C.1
atggctaagaagaaggacagcgacgacgtcgccgcggtgtacaccgccgtcatggaccacgtcgtcggcgaggtccacggcgacctcgtcgcccagggcgtcggcgacggcgttgagctggccggcgtcctcgcggcggcccgcgctcgctgggaggccaagctggcgcggcggcgcggcggcgccgccctggatggcgacggcgacggcgaccgcgcgccgccggagtacaagccggcggccggcggcggctactgttgcgatgcgcctagcagtggcccgcatcatcacgatgcagtcgttaaggaagaggaggaggtagccgcagccgtcgacgacgacggcgctttcttccccggcggcggcggcggcgccggagacgtcgaacgacggcgccgcttctcgggcggtggtcaggcgtga

SEQ ID NO: 23544 - DNA, 648 bp, Oryza sativa
  Clone ID: PAT_MRT4530_28613C.1
atggcgcgcaacatcctcgcccccgtggccggcacgctgcgcggccacccgtcggagctccaccgccgctgcatcctcgtccgccgcctcccctcctgcaccgtcccaggtgaagtgtgcgacatgttcgcctccatcgaggccatcgccgtctccggcggcctgggcatggccgtcgtcgtcttcggggtcgccgtcgcggactgcatgagcgcggcagtgctccgcacaggggcggggttcttcgagcccgtccctcccctccacctcggcccgccgctcgtcctcgccgccgcaatggacatcaagttggcgctgcatccgaggagggctccgccgcgcgagagcggcgccggcgaggaggcgatgcgcgtgtcgtggttcagcatgctggagggcgacaggagagggcggccggtggaggccacgacggcgctcgtcgcgtccctggcgtcgcggagggaagggccgacgccgggaggagcggacggcggcgagccgcggtactacggcaccagctacacctactggaggacggacgacaccgagttcttctgcatggaggacgcgtcccggcgagccgccgatctcggcgatccgcacaagatacctgacaagatatggccttaccaatactggtttgattaa

SEQ ID NO: 23545 - DNA, 163 bp, Oryza sativa
  Clone ID: PAT_MRT4530_28614C.1
gatccccggacagatcctagaccacatgttcaactagccttacagcatgacggtcatctcgctattatgcactgcagaatcgtttcatcaacgacgaaggcatgactaaggaagcaccctgattgcctgagactgggcagccatttagtgtatgcgtcagagc

SEQ ID NO: 23546 - DNA, 210 bp, Oryza sativa
  Clone ID: PAT_MRT4530_28615C.1
atgcccacttttactgaacttgcacagcccatcaaaagtgccagtgcgcgtgatgcgttgatggggaactctagtctaaatctaatcgattatctcttcaggatagaaatttctagtaagctccacgttgcttgcacccgagcgtcacctccttcgcctccctaccacaccgacactggtacccaacgccttcctcgaccacctcaggtc

SEQ ID NO: 23547 - DNA, 234 bp, Oryza sativa
  Clone ID: PAT_MRT4530_28616C.1
aagcttggagcttgggaaccaaagtaacaagttgtaaacaacaacaactataacccttagttaggcaataataatctggccttaggattaaattgataatgttatatatatatatcagcatttacactatttactattataaaatttacttgcaattatttgataattattggatattgatatgataaatgagataatctttacttcattttatgatctaaaaaaaaaaagctt

SEQ ID NO: 23548 - DNA, 488 bp, Oryza sativa
  Clone ID: PAT_MRT4530_28617C.1
ccggtgaagggccatcagctgttggcccgttcgtcactggtgaatatagtttaccccccctggcgcccctattagcgcacgaatccgccttttccaccgcgcgttggccgattcctttgtatgccgctggcaccgaccggtttcccgactggaatagcgggccgtgagcgcaacgccatttatgtgagttagctcactccttaggcccccccggctttacactttatgcttccaggctcgtatgttgtgtggaattgtgagcggattcaccatttcacacaggaaacagctatgaccatgattacgcacacagctctatatacgactcactatagggaaagctggtacgcactgcaggtagccggtccaggaattcccagggtcgacaccacgcgtccggagaaaaccaaatgagtttggaagagatgtccttgcgtgaattcacctacggtcatacttaatttccttaaaaaaaaaaaaaaaaaaaa

SEQ ID NO: 23549 - DNA, 1140 bp, Oryza sativa
  Clone ID: PAT_MRT4530_28618C.1
atgtcttctggaggaggaggaggaggaggaggagatcgccatggcccctaccaccagcacgggcacctcggccgcggcgaaggcgctgattacgtgtacagcagcagcgacatggagagcttcttcttcagccaacccgggggcgtcggcatcggcgggggtggtggtggcgtcgtcggcgccggcggtgccgacgagatcatgccgtactccagcatcacggactacctgcaggggttattggacccctccgggctagctcggcacctcgacgtggcgtgcccgtcgtctcaggacacggtggtcaagcaggagctgtcggtggatgtgacgagccacgacagccagggcaccggcggcgtcgccggagaaggcgtcgcgcaggccacgccgaactcgtcggcgtccttctcgtccagcgacggagaggcggagggcggcaaatcgtcacgccggtgcaagaagggtcaggcgaaggcggaggaggaggacgacaaggatgaggaggatggagagaactccaagaaaccgaacaagcccaagaagaaagctgagaagaggcagcggcagcctcgcgtggcgttcctcaccaagagcgaggttgatcacctcgaggacggctaccggtggcgcaagtacggccagaaggcagtcaagaacagcccatacccgaggagctactaccggtgcacgacgcccaagtgcggtgtgaagaagcgggtggagcggtcgtaccaggacccctccacggtgatcaccacgtacgaagggcagcacacgcaccacagcccggcgagcctccgcggcggcggcggcggcgtcggcatcgtcggagggcaccaccaccaccacctcttcatgcccggcgtgcatggcctgccgccgtcgcacctcatgccggcggggttccaccctgagctgatgggcctcatgcaccaccacccggccatggccgccgccgccgcaaaccctagcatgtacttcccgggcgtagctgcttctgctccgccgcctcctgctgtggctggcggcggtgcaatgccgcccaacgatcatcctcctcttcagcagcatcacttcactgactacgccctgctgcaagaccttttcccttccacaatgcccagcagcaacccatga

SEQ ID NO: 23550 - DNA, 3522 bp, Oryza sativa
  Clone ID: PAT_MRT4530_28619C.1
aatatatagtatatatatttgcatccatgtatacatatatttgatatatatatttttatattggtccatccactgagagcatcagattctgcttaaacaccaagcagtatatgtgaatggtacgtgacccaaacccaaaaaaacaaaaaggcagctacgactctacaaatactagccatatatatcccctagtgcaagagcgaacaacctttgcaacttgcctcttatgattctatctacataattagtattattacatgtaaatataattagtagtaattaatattttccccctaattaattagttggagctagctagctcatgaacaatctctcttcttgcttatgatcactagctactaatccggccggataattacacagtacgtttgcacgcattagctagattaaagatgattattacagctttggctcgccggaggagtccttcttgttggcggcgtccttggcggtccggccggcggcggggccggcctcggcgagcatctgcacgacgtcggccatggtgggggcggaggccgcgggatgctgcaggtgcagcggacggcgacgcggagagcctgcaccatctcctccttgaaggggctccactcgagccgcttgtccagcgcctcgccctcgccgccggcggccaccttgccggagacccactgcacgatgtccctcgtgtcgccgaactccggctcgatcggcttcttccccgtcgccagctccattagcaccaccccgaagctgtacacgtcgcactttgtcgtcgcctttgacgagtaggcgtactctggagcgaggtagccgtaggtgccggcgatggtggtggtggaggcgtcgcgatcgccgcgggcctggaggaccttggcgatgccgaagtcggcgaccttgggctcgaagtcggcgtcgaggaggatgttggaggacttgatgtcgcggtggacgatggggaagaggaggtcgtggtggaggtaggcgaggccctgggcgacgccgagcgcgacgcggtggcgcgtcggccagtccaggaagccgaagccccacccgccgccgccgtggagcgcgtcccataggttgccgttgggcatgtactcgtacaccagcaggttgctgtcggcgccggagtagcagcagtagagcttcacgatgttcttgtgccggatgctgcccagcgtctccacctccgtccgcagctcgcggtcgaggcaccccccgccgccgccatggccgtgctcctgcttggaccgccgcgacacccacagcttcttcacggcgaccagctcgccgttgctcagctcgatcttgtacaccgtgccggagccgccgtggccgacgatgttcttgtcgatcagcgcctccacgatctcgtgctggtcgaagctcagcttgtggaagctcgtcacgtcgtacgacgagctcgacgccggcgacgtcgggagcccgtcgtgctccccgtcctgccgcgcccgcagcacccaccgcctcgccagcgccagcgtcgccaccacgcacaccagcgcgcacaccgccaccacccacacgctcccggcgagcccccgcatccgcagcctcgccggcttggggcacagcggcagcgccgggtcggtgaggttcagccggaacgccacgcacagccccgggttgccggcgacgctctccaggagcccctccctgatcagctgcagcggcaccggcccggacaggttgttgttggagaagtccagcgagttgggcagcagcgtgcacagcgcctccgggatctcgccggcgagcgcattgtacgacaggttcagcacgttcaggctgtggaggtcggcgagcgtcgccgggatggagccgttcagccggttgccctgcagcgacagctggttcagccggctcagccgccccaccgcctccgggatcgccccgccgatctggttgttgctcaggtcgatcttgaccagcgtcgccgcgccggcgatctccggcggcaggacccccgacatgcggttgttcgacgcgaacagcgacgtcaggttggtggcgccggcgatggtggccggcactggcccggtgaggtggttgtaggagaggtcgatgatggaggcgtgcgggagcgcgaagatgcccgcggggacgtcgccgtcgaggtggttgttgctgacgcggaagcggagcagcggccggcacgcggcgtacgacgccgggatggcgccggtgaggaggttgctgagcacgaggatgtactggagctggccgttggcgcaggcgtacggcggcagcgggccggtgagctggttctccgacacctccagcacgttgaagccggagtagcggccgaggtcggcggggagctcgccggtgagctggttgcggtagacggacaggatgcggagctgcgtggagttgccgagcacggccgggatggcgccggtgagcttgttggtgtacatctggagcacgcggaggcgaggcagcgcgcagatggactccgggatgccgccggtgaggttgttctcggagaggtcgatgtcggtgagctgcgtgaggttgccgagctcggcggggacgacgccctcaagcaggttgtagtagagctcgagcagctgcaggtttgggaggcgcgccagcgacagcgggatgtggccggtgaggaggttgccgctgagttccaggtcggtgagcgacgtcatgttcccgagccacgccgggacgccgccgtgcatgcacgtcgtcgacaggatgagcacgcggaggcgccgcagcgccatcagcgactccggcggccaccagatgtcgaacccggggttctcgttgaagttggccacctcgagcgtggtgacgttggcgatcgacgtcgggaacgcgccggagaagtagttgttggacacgtcgagcacccgcagcgccggcatccgcgacaggtccggcacggcgcccgacacgccggagcagctgaggttgagcacctccagcgacgtgcagttcaccagcccgccggggaacccgccgcggatgtcgttgtacccgagccggacctcccggagcgccgggagcgcctcgcacacgccgccggggagcctaccgctcagcctccacgacgtgacgtcgatggccgtcacgttgccggaggcgtcgcacccgacaccctggaacttgcagtagtccacggccggcgccgagaagtcccacctcgccatggccggcccggcgaactcctgcttcatctgggacaggtacgccgcctgagcatccaatgccgcctccgccaccaccgcgccgccatcgccggccacgaagaagacgacaacacaccacaagaagaacaacaagaagattggaggagaagagagattgatcaccatagcatgcacagatcagatggtggcttaatttgctccttctttttgcctcttcttgtgttgttgttcttgagatgtagtatatgtatagtgatcaccaactccaagtgtggtgtggtgtagtgttattatgttagattgagaatatgtgtgtgtttgtgtgtgtgtg

SEQ ID NO: 23551 - DNA, 633 bp, Oryza sativa
  Clone ID: PAT_MRT4530_2861C.1
ccacgcgtccggctaacctttaagaccagtaggacacgctagaggtgtacaaggacgggcacgccgtgcggatccccaaagggttgaccgggctacatgactgcgaggacgtcggcgtcaacatccagagggtctgataccacagttcgactatgcatagcacgaaaactgcgcgatagtgcctcgtgcgaggcacaaaagcagtacaatgacgaagacttctgctccatgccctgcagctgccagggatgaagattaagacaaacacgccaatatcaaataaagccagggagtggtgtgataggaggttgctggagatgaagtatacaatgcactgcccaatgatggactcagggagggcagatgtgatctgcagatatcattatatggcatttggggctgaccgagtggaggctcagtgatatcaacccagctcgaagagtacaagaagtgtgggcccagtgtggaagacagtgatgacgcgtctgatccagagatcaatgtgaagaacattggataccgaagcggtctgatgctaagagctgtgaatatgatgccgcactagcaatgcataaccaagcaaaacgtatacacacgacgacctgcaaaccatctgcgagagggaaatgaaag

SEQ ID NO: 23552 - DNA, 415 bp, Oryza sativa
  Clone ID: PAT_MRT4530_28620C.1
caagccgacgagccggggaggaggaaggggcggccgaaagaacgccggcgacgaagaggatggagaggccggcgcggcgacggcgttccggcgaaaccgaggagcagccggggtggaggacgatgctgcgacgtcaacggaggagacggcgacgtcggtcggcgcacgggaaacgcgacagtggcggccggaggtggaacagtggcggcaacgccactgttttgccggcgaggacgcgtctccggtgcttcccccgcgaaacggagggctgaccgagggggaggaggtggctgcgaggccgagggagaagacggcgcggccggacggcgctcgggcgaggagggggaggcggctggaggcggccggcgcggaggaaagagaggggcgacggcgggaatgtcacgaccggaaataa

SEQ ID NO: 23553 - DNA, 556 bp, Oryza sativa
  Clone ID: PAT_MRT4530_28621C.1
ccgaaagcgtgcgcggagggaatgtgcggtgggagcggcggcggaagcaaagggggaggtgcggcgaccccttcgacgcggtggtgcccgacgccggagcagctgatgatcctggaggagatgtacaggagcggcgtgcgaacgcccaacgcggcagagatccagcaaatcacggcgcacctcgcctactacggccgcatcgagggcaagaacgtcttctactggttccagaaccacaaggcccgcgagcgccagcgcctccgccgccgcctctgcgcgcggcaccagcagcaaccctcaccgccctcctccacggtgcctccggctcccactgctgctgctgccggtgccgtcgtgcaggtgcaccccgcggtgatgcagctacaccaccaccaccaccaccatcacccatacgctgcggccgccgctgcccaaagtcatcacctgcagcagcagcagcagcagcaagctgagtggccggcggcggtggactactgcagcactgcatcggcgtcagcgtcggcaactgctgctgacatggcgatcccgccgtgct

SEQ ID NO: 23554 - DNA, 2976 bp, Oryza sativa
  Clone ID: PAT_MRT4530_28622C.1
atgatgatgacggaggcggcgccgcgagacgacgagccgggcgaccgacgggacgtcgatcggcgaggacgaacggtgacgaggaaacgacgatggcagccagcagcggctgcgcggaggaaggggacggcgtggaacacgccgctgcgatgttggagaaggtggtggtgcagcggggcgacgagccgacgaggaggaatgggtggccgaaaggacgccggcgacgaagaggatggagaggccggcgcggcgacggcgttccggcgaaaccgaggagcagccggggtggagggcggcgtcgcggagccgagggaggtggtggcgacgtcggccggcgcacgggaaccgcgacagtggcagccggaggtggaacagtggcggcaacgccactgttttgccggcgaggacgcgtctccggtgctttccccgcgaaacggagggctgaccgagggagaggaggtggctgcgaggccgagggagaagacggcgcggccggacggtgctccggcgaggagggagaggcggctggaggcggccggcgcggaggaaagagaagggcgacggttgggtccggtacaccaagagcattttcaggatgaagatgaaggcagaaattcacagtggtgcccttctggtatttttactaaaaatcagaagagaagggtccagaggattagaaatagggagcgttttcaggaggtacaacaagagatcaaccatcggctgaagaagacaaagaccaagcaggagtggcgcgttaagagcaaagtgctgtcagccgatgagattgaggccgacaaagcaaagaggctagccagaggaaaagctattgcatcttcatcgccgatgtccaagatgatggttgatggtggggccgctgtaaatttgatgccatatactacattcaggaagttggatcctcgtaccaacggaccccaatacccaccatatccggtctacgggtatcccccgtcgacagtggcgctccgggtagggggatttgatgctcaaggttctactactatgacttcaagctccctcgacgacaacgtctaccccggcatcaaccaaggaacttcagcttcaacgatgatggtgtggactcaagtcggcgaaatcgtcttcccggtctacaccacgatgccgatctcgactggcccagtaatcaccagcagcaagaacgatatggttacgactctggacgacctcatgtcgaaagatcctcctgcaggagcggagaacggaacatcgacaacttccgcgcccgagaaggatcctagtgcggccagctcttgtccttccgacgggaagcacgagccgacaagaacaactcctgaggcgacgaggaccggacatccacggcgagtgtatgatcgccgacaacccaccgcccctggcggcgggtgcgtggctttcactcgtactgtacgagatgtccggtggcctaagaagtttctaccgggagcaatagagaaatacgatggaagcaccgaccctgaagaatttcttcaggtctattccacaatactctatgctgccggagcagacaacaacgcattggcaaattacttgccagctgcgttgaaaggatctgcgcgttcatggctggttcacctcccgccctactcaatttcttcgtgggcagatctgtggcaacagtttgtcgcaaacttccaaggaacatataagcgccacacgatcgaggacgacctaaacgcgttgacgcagaattcggtccggcgtccgagatcgctacacaacccaggaattggcgacaagacggatcacaactgctcgcaagctgttcgaaattgtgccaaggacacacctgagtcaagcaagaaaaagagtcgcaagaatgggaaacggaaagctcaagcggagatcctcgcagcaaagtacattgacccgcccaagcatccagacccacaaggcgacgatacgaggaaaacatggtgccctatacacaagtcggacaagcactctttagagacttgtctcgtcttcaaaaaggcactcgcaaggcaactagcgttggacaagtgcaagcgagtacgtgtagtcgagaaggccgccgaagcggctactcaggactcagatttagcataccctgactccgacctccatgtctcacacatcttcggaggttccacgctgtactcttctaaacgggaatacaagaaagtggagcgcgaagtttgttcgacatggcagggggctgcatccaagatgaagtggtctgaacagaagattgagttctctgaagcagaccaccccaagactgccattactccaggacgatatccgatcatggtcgagcccactattcggaatatcaaggtagcacgggttctcatcgacggtggcagctcaatcaacttactcttcgccagcacattggacgcgatggggattccacgaagcgagttgacgcccactgatcaacctttccacggaatcactcctgaatcgtcgtccaagctattgggcaagattatgctaccagtgaccttcggtcaggcaaacaacttccgaacagagcagatcacctttgatgtagctgagttcgacgcaacgtataacgccatcatcgggaggactgcactcgcgaagttcatggccgaagggaacaatcactattcagggcaacgcgaagctagcagtacagtgcgacaagcgtgcctcgacatggtcgagcaaactcccaacccgcccgccacagctgagccgcccaagaaacgcacggttcagggggcgctcaatgaccagcttggacacaatgtcaaggcctatgtcaacggcattgttgtcaagactaagaaaaacaactcattgatcgatgatctccgggaaacgtttgacaacctccaacgatatcgcctcatgctcaacccagagaagtgcacgttcagagtaccgtcaggcaagctccttggattccttgtctccggaagagggatcgaagcaaatccctag

SEQ ID NO: 23555 - DNA, 1533 bp, Oryza sativa
  Clone ID: PAT_MRT4530_28623C.1
atggacaagaccatcgttctgtacccgggcctctacgtcagccacttcgtccccatgatgcagctcgccgacgccctcctggagcacggctacgccgtcgccgtcgcgctcatccacgtcaccatggacgaagacgccaccttcgccgccgccgtcgcccgcgtcgccgccgccgccaagccgtcggtcaccttccacaagctccctcgcatccatgaccctcccgccattacgacgatcgtcgggtacctggagatggtgcgacgctacaacgagcgcctccgtgagttcctccgctccggcgtgcgaggccgaagcggcggcatcgccgcggtggtcgtggacgcgccgtcgatcgaggcgctcgacgtcgccagggagctcgggatcccggcgtacagcttcttcgcgtcgactgcctccgcgctcgccgtgttcctccacctcccgtggttccgcgcgcgcgcggcgagcttcgaggagctcggggacgcccctctcatcgtccccggcgtcccgcccatgccggcgtcgcacctcatgcccgagttgctcgaggacccggagagcgagacgtacagggcgacggtgagcatgctccgcgcgacgctggacgccgacggcatactggtgaacacgttcgcttcgctcgagcctcgggcggttggtgctctcggtgacccgctgtttctccccgccaccggcggcggcgagcccaggaggagggtgcctccggtgtactgcgtcgggccattggtcgtgggacacgacgacgacgacgagagaaaagaaaacactaggcacgagtgcttggcgtggctcgacgagcagccagatcgcagcgtggtgttcctctgcttcggcggcaccggggcggtcacccactcggcggagcagatgagggagatcgccgccgggctggagaactccggccaccggttcatgtgggtggtacgagcccctcgcggcggcggcgacgacctggacgcgctcctgccggacgggttcttggagcggaccaggaccagcggccacggcctcgtcgtcgagcggtgggcgccgcaggcggacgtgctccgccacaggtccacgggcgcgttcgtgacgcactgcgggtggaactcggcgtcggaggggatcacggcgcgcgtgccgatgctctgctggccgctctacgccgagcagaggatgaacaaggtgttcatggtggaggagatgggggtcggcgtcgaggtggccggatggcattggcagcgcggggagctggtcatggcggaggagatcgaggggaagatcaggctggtgatggagtccgaggaaggggagcggctcaggtcgtcggtggcggctcacggcgaggccgccgccgtggcctggaggaaggacggcggcgccggcgccggctcgtcgcgcgcggcgctgcggcgattcttgtcggacgtgggcggccgcgagcttcgatccgttgagactttactactttgggccttccacgagattgtcgtggcacgcattgggctaccactggactaa

SEQ ID NO: 23556 - DNA, 244 bp, Oryza sativa
  unsure (1)..(244): unsure at all n locations
  Clone ID: PAT_MRT4530_28624C.1
ggagacaaaaacaccttcacaattcgcgaaantcagctgcttctncttcttcttcttctttcggattcgagaagaggatgtccatctcgctncgcctnggggtcccgacggcggcgccccgtgctgccgcgctgcnatncntgncggtncgggcngcgggctcccccgccngctncnttgcgagctggngcgcgctcaggggatgcgcctngctgccgctgaagccgcagccgctgctgggggc

SEQ ID NO: 23557 - DNA, 243 bp, Oryza sativa
  Clone ID: PAT_MRT4530_28625C.1
atggcgtggtggcggaagaaggtcgtcttcccggcgcgccgcgcgtgggccgccgtctccacccgcgtccgcgcccgcaagccagggtttcaggaatttgttccaaaaattccagcttttgcacagccaccaaaactaaatgctcttctgaaagtcaacctccccggcgggtacaacgcgacagtgaaatggcagcgacctaccagggattatcagcagtgcacacttccctgcaagtgttag

SEQ ID NO: 23558 - DNA, 1254 bp, Oryza sativa
  Clone ID: PAT_MRT4530_28626C.1
atgcaccacctgctccgcctccgccgctcgatcctatccgccgccgccgccgccggccgcaccctctccacggccgcgccgccctcgcgcccgcggtgggcgatgatcttccacgtggaagcggccaggagctccctggcggcgctgcgcgcgtcgttccagctcgccgagcccccgcgcgcctcgcacgtccacgtccccgcgcacctcctcgacctccggcccctcaccgaccccaggagccagatgcgcctcctcgggggctgcgtgcgcggcgcgagcggcgacggcctcctcctcctcgacttcaccgacggcctctccacgggccccgtcgtcggcgtccaccccaacggcctggcgcgccagatgaccggcttcgacaggcggttcgacgtcacgcgcttcgtctgcaaccctgtcaccggccagctgttccgcatgccggacatcgacggcaccaaggacacctcgtggtgccagttcaccggaatcctcacccaatctgaccgccccgacgggccgccggacaggtacgccgtcgcgtggctcagcgtggacggggaagacaaccggcgcatcgccatgcgccggtttctctcgcagaaaggggaatgggacaagctggtgggtttgccgtccccgctcccactcgccaggcagatggacgtctcccacgaggtggtggccttcgccggccggctgtggtgggtcgacgtgagctggggcgtcgtctccgtcgacccgttcagcgaccgaccggagctgcaattcgtccagctgccgaggggcagtgtgacggagcccgtggaggggatacggaagctaggcaggttccgcctcgtcggcgtcagcgaggggaggctgcgctacgccgaggtgtcccagaaggagccattcgtgctcagctcctttgcccttgatgacaatggcagcagctggacgctggaacaccgggtagcgctcagccggctcggggtggatggatgccacccagacccggaggaggatgacacgccacggattggtgtcattgacccactcaatgcgagcacaatgtacctcacaattggtgactcttgtgttgccgtggacatggagcggggtgaggtgctcggacgttcgcagataggttgcagcactggcccattttcgcctttcaccggtttcctcacaccatgtattctcccaccgtggcttgaggaattccagatcccttctgcaggttctcttctttctcatgctttattttga

SEQ ID NO: 23559 - DNA, 2956 bp, Oryza sativa
  Clone ID: PAT_MRT4530_28627C.1
atgcggcgttgcagttgctggcagctattgtggctggtgcttgtgtgctcatggcggatcgctgcagctcaggctcaggcggcaccaagaaccgatccaaccgaagcggcagctctgaacacaatcctgggaagatggggcaagaaagcatcatcagagtggaacatcagtggcgagctttgtagtggcctggcttccgacaagaccaactgggatgactaccccaacatcaacccatttatcaagtgtgactgctcctacaataacaactctgtctgtcacattatcaaattgagggtatataagttaaatgttgttggtcaattaccttcagagcttcagaatttcacctatatggaggacctgaacttggctttcaatccattatccgggcaacttccgaaggaaattgggaatctcacaaatcttctcatgttgggagttagctttaacaattttacgggtgaacttcctgaagaactgggaaatttggtgaaacttgagcagttgagggcacaagataatgatttcacaggcaaaatacctgataattttggcagcatgagtagtttggaagatatgcgaattggtgatatcgtaaatgggagctcttcactggcttttataagcaatctcacctctttgagcaacatgatattaaggaactgtagaatatctggtaatcttggactagtagatttctcgaagtttgcaaatctaacatatctagatttttcctacaaccagctcagtggaagatttccttcttgggtcaaccagaacaatttgcaattgaatttggtggcaaacaactttgttcttgtgggcactaacagcagtattctaccttcaggtctaggctgcctccaacaagacactccttgtttccgaggatctccagaatattactccttcgcagttgactgcggcagtaatagttctacgagtgcctcagataatactatttttgaagcagatcccacgagccttggcactgcagcatattatgtcaccagtcagacaagatggggtgtcagtagtgttgggaacttcttccagggcacaaatggaatggatagaatatatagctcctccaagcattttcagaatactgttgattcaaaactgtttgagactgctaggatgtcaccttcatcactgaggtactatggtcttggacttgagaacggaaactacacagttctgcttcaatttgcagagttctcttttacggaaacaccgacttggcaaagcttaggaaggagagtttttgacatatatgttcagggtgcactgaaagaaaagaatttcgatataaggaagacagcaggtggaaaatcttttactgcagttaacaggagctacacagcaactgtgtcgaaaaacttcattgagatccatctcttttgggctggcaaaggcacttgttgtgtacctactcaaggtcactacggaccgacgatctcagcattaagcatcactccaaattttactcccactgtacggaatggggtaccaaaaaagagaagtaaagcaggtgcaattgttggaatagtgattggtgcatcagttttaggattggcagccttatttggaatatttttcttagtaaagaagcgaagaacaatggcacaacaaagaaaagaactgtatgacctggttggacggcctgatgtctttagtagcgccgaactcaagctagctacaaataatttcagttcacaaaacattcttggagaaggcggatatgggccagtgtataagggtaagctacctgatggaaaagttgttgctgtcaaacaactttcagaatcatctcatcaagggaaaagccagtttgtgacagaggttgctacaatttctgctgtgcaacatcgtaatcttgtgaaattgcacggctgctgcattgatagtaaatcacccttgctggtttatgagtaccttgaaaatggaagcctagatcaagcacttttcagagacacaggcttaaaactagactggacaaaacgctttgagataattttaggcattgcaagaggcctaacttatcttcacgaggagtcgagtgtgcgcattgtgcatagggacatcaaagccagcaatgtactactcgacactgatctcaccccaaagatatcggactttggactcgccaagctatatgatgagaagaagactcatatcagcacagcgattgccggcacatttggctatctggcacccgagtatgcaatgagaggtcgtttgactgaaaaggctgatgtttttgcattcggggtggtcgcgctcgagactgttgctggtcggtcaaacatcgacaactcccttgaggaaagcaaggttaatctctttggatgggcatggagcctgtatgaaaaggagcaagctctagaaatcgttgacccaagaatcaaagagttcagcagggatgaagccttgagagtcatccatgttgcactcatgtgcacccagggctcaccgcaccagcgacccccgatgtcaaaggtcgtggccatgctcaccggagacgttgaggtggctgaggtgatcatgaagccgagctacatcacggagtggctgcacagggaaggggacagcagctacttcacaaactacgcaggatctgccacccccgagttcagtgggcacaaagagagtgaactttcgtttatcagttagtaacttgtatattcaaagttaataatagaattacttattattctgaaattgtatcatcgaaataaaaataacaactcctgccgtggtatcggggggttccaatgtttgaaaagtttagtttgggagcattcgcaggtgtttgtgtgaagaggacttttacggtacattctactgctagaatatactagtagcatatttgatccaacggtgtatattcatctgattttcctcctaattatcgtgcagtataaattgaataggacaaatttgtcttttt

SEQ ID NO: 23560 - DNA, 611 bp, Oryza sativa
  Clone ID: PAT_MRT4530_28628C.1
ggaaaaagaaaaaacccggggtaaaaaaattaaaaaacggaccccccccccaaaaaaaaatggatacccctttgttttttaaaagccccgggtggctttgaaacaacaggggccaaataaaaacccaaggggggaaaagctttacccaacaaaacccaacaaaaaaaggcggggagggacccccaagcgggggcccaaaattaccccccccccaccccaaaaatatcccttaaatggggggaaaaaaaacaaaaaaattttgggggacaaaaaaaggggccccataaaaaaacccaaacaaaggggtaatttttcccaaggcaagattttgggcccaggggagcttaaaccccaaaccttaactgggaaatttggaaggaccccaaaccccgggggggacccccttttgaaaaaaaacccggccttcccaaaaacaaaccaaaaaaaaaccccttttaaaccccaacacccccccttggggggggcttttaaagcccaaaaccccctcccctaaaaaaaataagctttaaaaaaaatttaacccagggggccggaaccccccttataaaaaaggaaaaggcctgaaagcggccccttaggaaaaatcccca

SEQ ID NO: 23561 - DNA, 655 bp, Oryza sativa
  unsure (1)..(655): unsure at all n locations
  Clone ID: PAT_MRT4530_28629C.1
aagaggcatacccttgtcctgcggaagagggatattatgcgcaagaaggcagaggaagacaagaagaaagagatcagtagacttctagctcttgaggggcttgagctagatacagatgaagacgacaacataaatttcctaaagtaactacgcaaatgttctttcacaaattccatccacctctcccagcatatactagaaggtttcgccaaagttccatttagtgaatatatattgacgcaagaaaaaatgagctcaagggaaacattggatcataactgttggaaatccagaattctcccatggagcagaaagatgtggccaacggcgaaatccatctgggccaactgctgcaacctgcagcccagtgattcaatcaaagttctttatgcagatcctctattcattgtttccagcagatggactgtattgcaagggatatgactatcagatatgtatacttgttacatgcgaaattgtaattatgctagggtaattttgtaaccttcttgtttgtccgagcaaaacaaagtgcattctctgtgtggtgcctctagctctgacactttgtaaatactacagaaaacatccaaagctattgtttactgggcatgaataatgttgtttccnaatccaaaaaaaaaaaaaaaaaaaa

SEQ ID NO: 23562 - DNA, 280 bp, Oryza sativa
  Clone ID: PAT_MRT4530_2862C.1
gagagggaggatgacatgtgggtcccattttggaatccagttcgacctccggagacagcattgacttcaaatggacctagtgtcttcatgccaactccgattcgggtgatgttagacttgatggaaagcttatctcgtcacctttcaaacgcatccggtttcatatacaaattcattccgagtaaacggaaattgtcaaaacaagacaatgttgttgctgaaaccgaacttggtacttggaccttgtaatacactaggcccacctccacgaattagcact

SEQ ID NO: 23563 - DNA, 453 bp, Oryza sativa
  Clone ID: PAT_MRT4530_28630C.1
cggggtgtcccagggaaatttctcccacaggggtcaagaaccacacaaacgcgttctcaggcaaacatagctttacaaagcgtgcaaccacacaatttaggtggtgggtcattacgtgtgtgacgttcaagactctaagcgtcaaagaccaccaaacagtctgtggtgtgacccgtgtcaaaacgttgcccaagtcacatatgtggtgggtagtcttaccacgtagacgtacgtagtaggtgccgtcccacggagccacgttgaaccaccagtgtgtggggtgggtgtgtcgtggggtacgtgaagttggtaaccaaatagtaagtaggtgtcggtagtgtgtaaaaaaagtaaaggtcagtaaccagtcagtcagtgggtgacctgtttgaaacttagggtccaagaaaaaaaaaaataaaattaataaataaaaaataaaaataaaaaaaa

SEQ ID NO: 23564 - DNA, 526 bp, Oryza sativa
  Clone ID: PAT_MRT4530_28631C.1
tccggctcgtatgtttgtggaattgtgagcggataacaatttcacacaggaaacagctatgaccatgattacgccaagctctaatacgactcactatagggaaagctggtacgcctgcaggtaccggtccggaattcccgggtcgacccacgcgtccgctcggcctgagcatcgacgaggacgagtctgctgaggctgacgccgacatgccgccgctggaggacgacgccggcgagagcaagatggaggaggtcgactaagcgccatggttgtcattcggcccccatctcctggagccctagttctctatagctttatctgactctgtgctcttcgccatttttgctatgctggatgtatcggtattgccgtatcttagcgcctgaacatttcgtggtatttgctcaaacagttacgttttaaatttaaatatgctagttaattaatccagaatctgtattttcttattctgcattagcccttttatagtaactctttgttctgcattaaaaaaaaaaaaaaaaaa

SEQ ID NO: 23565 - DNA, 575 bp, Oryza sativa
  Clone ID: PAT_MRT4530_28632C.1
tacgccaagctctaatacgactcactatagggaaagctggtacgcctgcaggtaccgtccggaattcccgggtcgacccacgcgtccgaagaacgacaagtctgtgaaggacctggtgatgctgctcttcgagactgccctcctgaccctccggcttcagccttgaggaccccaacaccttcggcaccaggatccaccggatgctcaagctcggcctgagcatcgacgaggacgagtctgctgaggctgacgccgacatgccgccgctggaggacgacgccggcgagagcaagatggaggaggtcgactaagcgccatggttgtcattcggcccccatctcctggagccctagttctctatagctttatctgactctgtgctcttcgccatttttgctatgctggatgtatcggtattgccgtatcttagcgcctgaacatttcgtggtatttgctcaaacagttacgttttaaatttaaatatgctagttaattaatccagaatctgtattttcttattctcattaccccttttatagtaactctttgttctccattatcaaaaaaaaaaaaaa

SEQ ID NO: 23566 - DNA, 423 bp, Oryza sativa
  Clone ID: PAT_MRT4530_28633C.1
atgatgaagcagtatgaggaagactacaagtatcttgtggaggaggggctggatcttgaagagatgaagaaactttaccatgagctggcgaccggcggggagatcaccgagaatctcggcgtgggggcagcgaggtgtccggtgccacatcatctcatctcgagccggtccggcacgggtgcggcggtgcggacgtacacgatgccggtgcgaggcgcggatgttacaatgcccctcctgaaaccggtgacatcggatccgccatcgtgtggcttgctgccgccacaattgtcgtcgctgccggccttggattctgacggtagcggatccgcccctcctgagactggtgctgctggatccgtctaccgtggcttgccaccggcatcagagacggacccaggtgctggagcatctggaccatag

SEQ ID NO: 23567 - DNA, 975 bp, Oryza sativa
  Clone ID: PAT_MRT4530_28634C.1
atggcgcagctgccgcccaagatcccaaccatggcgacagcttggccggagttcgggggcgggcaccatcaccatgctgcccacggccaccatcaccagcgcagcccctccatgggggcgttcctcgcggcgccattgccgcccttcccgctcccgccgccggcgccggcgaacggcggggcgcagcagcagcagcagcagcagcagcatcagccgtcctgggtcgacgagttcctcgacttctcggcgaccaagcgcggcgcgcaccgtcgctctgtgagcgactccgtggccttcctcgaccccgtttccgacgacaatgccggcgtcggggcgcacgacttcgaccgcctcgacgacgaccagctcatgtccatgttctccgacgacctgcagccgcctccaccgcagcaacagcctgccgcgcccgcggcgagcgcgtcgtcgccgtcggaccacaacagcatgaatgacgagaagcaagacaagggcgagacagatgaggcgcagagcgagtgcgacggcgccacgcccgggcagccggcctcccccgccaccgtcgatcccaagcgcgtcaagaggatcttggcgaaccggcagtccgcgcagcggtcgcgcgtgcggaagctgcagtacatctcggagctggagcgcagcgtcacgtcgctccagacggaggtgtcggcgttgtcaccgcgcgtcgcgttcctcgaccaccagcgctcgctgctgacgctgggcaacagccacctcaagcagcgcatcgccgccctcgcgcaggacaagatcttcaaagatgctcatcaggaggcactgaagaaggagatagagaggctgcggcaaatctaccaccagcaaagcctcaagaacgcggaatcccaaccggcggacgcggccccggtccgcggccgcgacaatgccgacctgatcggcagcgagggggccgccgcggccgcgccatgcccgcactcgtga

SEQ ID NO: 23568 - DNA, 4089 bp, Oryza sativa
  Clone ID: PAT_MRT4530_28635C.1
atgtcggacgcgtcgtcggatctcggcggcgcgcggcccggggccgtggagcgcgacatcgagcaggtgagccgcttcccgatcctccgcttagctcggcttgggaatgccgaggaaatcccggctgtcggttgtatgattgagttgggagtggccatcactgctctcaagaaaggagcatacttgctgaagtacgggcgcagagggaagccaaaattttgcccatttaggctttccaatgatgaatctatattgatatggttttccgggaaagaggaaaaacagctgaggttgagtcatgtgtccagaataattcctggacaacgaacgaaaaggagctacatatggcagttacaaattgatctgtcccatcatgttgtttttttttttttacattcgctttctgatggaaaacgattcacaagggagtattcaactatatttaaggcaatttttcagaggtatccacgaccagaaaaggaatgccagtcattttctctcatatctcatgatagatcattggacattatatgcaaggataaagatgaagccgaagtgtggtttgctgggctaaaaaccctcataacacgtagtcatcaaaggaaatggagaacagaatcgagaagtgatatgctttcctctggtacaactagtcccagaacttacacaagacgaagctccccattgagttctcctttcagcagcaatgacagtgtccacaaggatggtgttgaaaattaccgacttcgtagtccatttgggagcccaccaaaggtcggtctggagaaggcattttctgacattgtgtcatatgcagccccacccaagcccttcttcccatcggattctaatgccggttctgtccattccgtgtcttctgggcagtcagataacacaaatttacactcaaggggcatcccaatggatgctttccgtgttagtttatccagtgctgttagttcatcaagtcatggttctggtcatgatgatggtgatgccctaggtgatgttttcatatggggagaggggactggggaggggattcttggtggtggcaattcgagagttgggaactcctcaggtgtaaacatggattgtcttataccaaagccattggaatttgctgtaaaacttgatgtacagaacatttcttgtgggggaaggcatgccacacttgttaccaagcagggagagatctactcttggggtgaggaatcaggcggacgtcttggtcatggtgtagattgtgatgtgccccagccaaagcttattgatgctcttgctaatatgaacattgagctagtagcatgtggtgagtaccacacttgtgcagttacgctctctggggatctgtacacttggggaaatggtacttccaattctgggcttttaggccgcgggaatgaagtcagtcactgggtacccaaaagggtcaatggaccattagagggcatacatgtttcagcaatttcatgtggcccctggcacacggctatagtaacttctgcaggacagctattcacatttggagatggatcttttggagttctaggtcatggagatcgacagagtctttcagtccctagagaagtggaatcccttaaagggctacggactgttcgagcagcttgtggtgtttggcacactgctgctgttgttgaagttatggtcggcaattctagttctagcaactgttcttctggtaagatttttacatggggtgatggtgataaaggccgtttaggacatggtgacaaagatacaagacttgtcccaacatgtgtagctgctttggtcgagcctaacttttgtcaaatagcttgtggtcactgtatgacggtggcgctgactacctctgggcatgtatatacaatgggaagtcctgtctatggccagcttggaaatccacaagcagatggcatgcttcctgtgcgtgttgaagggaagctacataaaaactttgtggaggagatctcatgtggtgcttatcatgtcgctgtcttgacttcaaggactgaggtgtacacatggggtaaaggtgcgaatggtcggttaggacatggagatacggacgataggagttctcctactttggttgaagctctgaaagataagcaagtcagaactgttgtttgcgggattaacttcactgcagcaatatgcattcacaagtgggtttctggagttgatcagtccatgtgttctgggtgtcggttgccatttaatctaaggagaaaacgtcataattgctacaattgtgcacttgtattttgtcatgcctgcagcagtaagaaatctctgaaagcttcattagcaccaaacccaaacaagccttatcgcgtatgtgatagctgctacagcaagctgaataagggtcctgagacagatagatattcttcagcaaagcggggatctgttatacaggggttcaatgattctgttgacgaggagttggagacaaaatcaaatgcccagttgtcgagattgtcatcattggaatccttcaagcacatggatagcagaacttcgaagaaaaacaagaagtttgagttcaatagcagtcgtgtttcccctattccaaatggcagttctcattggagtgggctcaacatctcaaaatcctttggttcatcaaagaaatttttttcagcatcagttcctggatctagaattgtttcaagggcaacatcacctgtttcaagaagagcaagccctcctcgatccacaactccaacacctactttgggtggtctaacctctcctagagtggtggatggtgtgaagccaaatgatagcataagccaagaggttctaagtttgaggtctcaggtggaaaatcttactcgcaagtctcagctactggaagctgatttggagagaacaactaaacagttgaaggaagctatttcaattgcaggggaggaaactgcgaagtgcaaagctgcaaaggaagttatcaaatcattaactgcacagttgaagggcatggcagagaagctacctgaaggagcaggactggtgaagaacagcagactgccaccgctgccaggaatttctattccaactgatatatcagttgcatctgagagtttgggtagcccaagaagttctggagaaccctgttcaaacggttctaatggtttgcttgtttccaatggaccaacttcagttagaaataagttgagtcaccctgaaattcccaagaatggaacaaggctacccgattcagattctaagcatgaatctgaatgggtagagcaagatgaaccaggggtgtatatcactcttactgccctacctggagggactcgagatctcaagagggtccggttcaggaatttgagattatgcccaccatttctggagacagccggaagcgtttcagcgagacacaagcagaacaatggtggcaagagaatcgggcacggattgagatgcaaagtagctttgaaagatttaagctttgttctggctgacttgagtgcctgttttggcgaaaatttcatgccaattactctgctcccccagattgaacgtcatttgtcgaacttacatggtctggatgaggttttcacccagagctccttgctaagggaggaggggtacctcaacagtaccctcaggagagttatcatgctcaaaatagtagtcactgttggcccaaagaaaccttgggctaagatttcgctcggaacccctacaaccctaccgtcgtggtccgtcgcccaatccgaaaccaccatccaaacatcggtggcacatggcctccaacacacccgaccgacgcccctccgccagccggcttccagtcctgccaacgacaagactgccacaacaccagtcaccttggccagcgcgctgacccaggccgctttcaccacgctgcctgccggcttccccgttgaatccgacctatgggagcccgcacaaggaacaacattgcctcggcaatctgagttttccttgttgaccgaccaccgcctccagcctgccaagaagctctccacaaagaaggggaggagttccctagcagggttagcctggccaaccacaaggaagacgacctgccaccactccctagcgcgctga

SEQ ID NO: 23569 - DNA, 973 bp, Oryza sativa
  Clone ID: PAT_MRT4530_28636C.1
gcaacgacgtggacaaagctaccaagggctgcatggatgcggcggcgatggctgcaaaggcaattctccggcaactctacgctatgcaagaagaaggtaccttttcttgtacacgtcatccgtggtgtttgttggttctgctgtgtgtgtgttgtcttaactacaggaacacgcaggaggaggtgaaggaagtccatgtgaagcaaaatgtgcctgcgccatcttcttacttgctcaataaatcattgtcggagtatactttacatcgaaactcaactattgaaatacgttaccgagaaagagtcggacagtgagtattatctatttaaaactgatgttaattttctttatttatacgtgctgtaggtgaatgacattcgataaaaaaaaatcaatgttaatgacagattattgtaccatactgttccattacatctagatcgttaagatgttggaatcattgtaccccaagacgtggtctttcttatattttgcctcctacaatattcagaagctgttgatgcatgttgctggactacatcgtgaagggttgtgctataatggggcttttactagccaaaacattatttttcatcatgatgcatttactgtagtaaacgtctctacagtgtcatttaatgcaggtctgtatgtagggattatacaggtatttacattatattctctacaaggtttggaccggtgtacccattgcatttcgagcatctctttcaaatttttaaggatgtgtccttgggatgaactctagagattagtaaatagttgcctttgttacataccatcctagtgttgaatcatatgttgacagaatgaaacaactaataattttagataatgtgctacatacacactctagacatcatacggctaatgtagttgcgttgggaggatatacattgaaatctaaggggttgtctgcattttgctaataacttttttaaaacatgcaaga

SEQ ID NO: 23570 - DNA, 493 bp, Oryza sativa
  Clone ID: PAT_MRT4530_28637C.1
cggacgcgtgggcgcttaccaaatctttgctatttcaaaacaacgcacaccgtaccaaccccgtattccatctttcgcaagcgctccatcttgtttatttacatcagtggggttctagtgcacggtctgatcacccttcctccatttgatgtacctgtggactggagggcctatccatcgaaaggttttcggtctaactttttggcactgcgtataattaccacctgcgtgttctggaggcctgtgctcttgacgagattcttaggatttgactgcgctaatgactgacctgattcgaccatacaacctactggatgagcaggcaaacctaatgctatgcatcctactatagagagcacactagggctacaatgctgatgtacatggtacagccgcattacataacacttgcccacatggctctgtgggcgtgccctatgttagagaaactgtaaaactgcatggacaggttattatatacacaagccctgat

SEQ ID NO: 23571 - DNA, 342 bp, Oryza sativa
  Clone ID: PAT_MRT4530_28638C.1
atgcccagtcaaaaccgtttctgcgccaacggcgtccgcttgcagcgtgccgtgccgcccggggacacggcagcaggcagacgcagcgcggcgcgccccgacagcgcggccgtacccggcgaaaacaacggcgcgcgcgcgcggccagattctgatcctccacagctcatccccgagccaagacgcgcggcgcgcgagtgggtcgtctcgtcgagcagaaaatcctacctcaaatcttgtaaaatttggatcactggatgtgcttcacgattcgtgctgttcttctccaactccggcgaccacctcttcttctccggcgccggcgaacccaaactccggtag

SEQ ID NO: 23572 - DNA, 1605 bp, Oryza sativa
  Clone ID: PAT_MRT4530_28639C.1
atggcttctcaaagcaagaagaggcgcatcgccggcggcggggacggagaagatcggatcagtgagctccccgacgacctgctcggccacattctctccttcctccccaacaacctggccgcccgcaccgccgtactgtcccgccggtggcgatacatcttcggctacgtccacaccatctccttcgaggaggaggagggcgagagggaggacgattggataaccatgtacttccaagccgaggagaagaagagcatgagctggaagctcctcgaccggatgaacgccgcgctcctctgccgccgccgctgcgccggccgccacgtgccgctgcgcagcttccacttcgcctgcgacagctaccacgtctgggacagggtcatcgtcgacgcgtgggtcacctatgtcgtgtgccatagctcgcaggagctccacctcgacctgcgcttctggatcggcccgatctgcgccggcggcgaaagggacagactctccaccatcgtcgacagcgagccccctgttttccctgggcgccattatgagcttccacggtcgctctactcctgcgtcgccttgcagaccctgtgcctaagctactgcgacctgaacctgctggaatccatcgacctgtcgttgttgaagacaatgcgcttgactggcatccacggctccaggagcagaatccaacggttgatctcgagctgcccgcgcctcgccgacctgacgctcgaagccctccgccagctgaagaccctctccctacttgacaagcgcctccgcagcttcgccctccggtgctgccacaacgtcgacaacgtcgccatcgacgcgtcggagctcacaacaattgcgtacaggggcgccgtgtcggacgatccgtcgtatactctttcgatgcacggctcactggcaataacctcctgcactgtggatttctgcagcgaggaactcatcacctcggaggaggaattcgacagctcgacgcacctccacctcaagtttgatcgtctcggttcgtgcatcgatagtgacctcttcccggccgccggcttccggacgttcacgaacctccgacggctggaactcaccgggcacgtcccagattgcggcgtagccatcgccatgaggaggatcctggagatgaccccaaacctggagtctctcaccctgttcttgaaaccagaaaaatgtaatccgacgaactgtgatagtgagagcgagagcgacggcagcagtgacagtggctacatcagccacagcgacgacgacgacgacgacaccgacggtgatgactacggcagcaacatcggttacaacagccacagcgaagaagatggcgacgacagcgaagaagacagctcccctggtatcgcgagcttctcggcgatccggtgcctgcggcgtcgggtgaaggagatcaacctggtgcactacgagggtgatgacgggcaggcgacagtggccaggctgctgctgaggaacgcactagtgctccaatgcgtgtgcgtcgtgctgacgaggggtagaattgggatgcagatgcgtaagaaaaggaaaattaaaaggtggatgatgagcaggtcagcgaaggccgtgttcttgtaa

SEQ ID NO: 23573 - DNA, 1088 bp, Oryza sativa
  Clone ID: PAT_MRT4530_2863C.1
tacattccaccaagaaaagtccactttacctcattcctaaccccaacccccgcctcgcccgcccgattccccgccgccgccgccgccgccgccgcggagctcgccggagaagcggcactcgcagaggagtggcccgccatggggccgccgcagcaggccaggggcggcggcatcgacatcgaggcgtgcgcgcgcccgatcgccgtcgaccaccgcatcaagctcccctactacttccgcatcgccgggaacctcctccgccaggctaagatatatcgagacgagaataatctcgtcgacctgtatgtcatcctcctgcgttactcgagcttggtttgcgagacgattccaaagcaccgtgactaccatacattccccacgcgtccggtggatttcttcaggcttgctccacataatcaatctaaactaattgaagtgctcagtgagcttgagtcactgaagccagttgtgcagcggcaaatcactgagcataacagagcaagaggaggtgccatcgaatccaatagtataaatggaaccattgctgtaaataatataacaaaacagcatatgacaaatccttatacatatcagccatttgtaggaagcaacaatggatcatttgaaagacctgtccctggtgggaatcatcaaatggcaccattaatgagtgctcaacctgatagaccgacccgcaaacaacttgcaaatctccctttccctaaagaagaaacattagctagacactctatattgggacctaatgggcttcatgggcaatggactgggcctgttactgcaatcaaggttcagtatccaagcgatcttgatataataaaaagcgatgtgtctagtttatttccatctgtcttgaaccaagatggtcagaatggtcccagtacaatatccacagatagcactcaaattgagaatgatgatataaaatctgttctgtcccttgatgatggtcgatggtctaagctggcagaggaatgcgcctctgtaccttctgttagtctggaagaagaatatcccaattgagtatcaaacagccttcacctcctccagtcttggcagattagagcgca

SEQ ID NO: 23574 - DNA, 344 bp, Oryza sativa
  Clone ID: PAT_MRT4530_28640C.1
ccgctggatggcaccgggctgttcttacaccattcccaatgcgaaccatttgcatggtaacatctcggacgaagaacacctaactttggagggatggaaagaggtgctttctcgactcgaaagaccctggggacacatatgcgcactggagctcgatgactacatgatctggtcccgcgtctttaaagtaactggcctgatgggccccaccaatcggttcttgcgtttcccgacgaatcgccgctcataaccatcgcccattctgccatcttgactgacgtcgccgctgccgagggagacgagtatcctcttgtcatcaccgtatctaacggactggctgctgt

SEQ ID NO: 23575 - DNA, 2640 bp, Oryza sativa
  Clone ID: PAT_MRT4530_28641C.1
ccggattcgaaccgagcgccgacctcttcggcgtggtattcttcgccactgtgaactcgaagacggtggtcaccccggccgggacgaagaagactgtattcgggagcgtgaacttcaatgttcgccccgagcgctccgatctctagccggtgaacgcaaccatgtcgaagtgggatcgccattggatggcaaagtggttctaccactccatccccttcgaggctgggtctgatgcggcgaatgccctcaggtggcgacgcggggcgatctcgccgaacaggaagcccaaggtcgtcgtcgatggcgccatggaggcccggttcgttctgctatgccggatctgctctcgcctcagctgccgcgacttggtggaggagttatgcatgcttcacatcttccccctttcccagtcgtggcaagtcgggatcgaccaagacgaggaggtcgacggcttgccgaagctcgtcatgcctgcgggggcgaatgttttgactcttgcacaggccgacactgaagcccgaaagatgatcggcgacgtgtcggtcactgagttcagccagctgctcacgcggcaggcggccggccgggtgaaccgggtttatggtggcgaactgcctccccgggcgacccctcataagcgaagggcccccgactccgacaccgatgacgaggagaccatcgaagatgacgacgaagaggaggagggggatgtgggggagacggaagctgtgggcgaaaaggccgctggcgaagccgccgataatcgcgccgagacgcccggctacactccaaccccgagccccgagcctgtcgagactggggtggagtcgaactgctcccctctccgccaaaaggatgtggagggggcgaaggcgctggtcgcgatcgctgcggccaaggtggcgaaggggggttcaattaaaaagacctccgggaagaggctcgtcgatgtcggtcgcgtctttagtgacgacgagtcctcggacgagacccctacttcgcccgcctgtcgaagcttgggtctttcgaccgctcccggcgttaaggtcgatgcgggcagggttggcgggagtgtcgccggggcttcggcctcaatcgatcaggttgcgaagaccgcggctagggtcttcggcagccctgttcgccagccggttgtttcgccgctcgcccctgggaaggagaagaaaacggcggtcgaaacatccgtttcggattactcccttgccgtgccccattttgcccctggcgatttcgaaacccgggcagaacttatcccgtttgtcgagggggtgagcaaactcgtttctccggctggcagctcgagtctgttcacagagcagaacgagttcgacgagggctgctctgccgtcaagagcttggcggttcggatcctcgcggcccactgttcgaccgagcgaaccatgcgggctcgtcttgatggtttgaagaaccgtctccgagccaaagatgacgaactgggccgcaagagcctggaaatggaaggcctcgcccacgccctcaaagagacgaaggccgagaacaagcggcttcgggctgaactggaggaggggagtgaggcgaaggcggagattgagcgcctcaaggccgagctcaaaaaagagcaggctcattccgccgctctgaccgactactacaactttaccgagccaaagatggaggctcttcgccaagaggtcgtcgaagcggagacgaatgccaagatggaagcgcaacggttcacgctggagatggcgaaagccaccgagtccgcaaagaccgtagccaaactcttcgcctcgccctttctgacatgggggcgagaatgcgcggagtccctggcgaaggtgcttccgccttcgacttctccgagtggactcagcaggccggcggtgcggtctcggactgcgccactacgtatggcgacagctgtgcgcgcgtgtccgcgactttcgccttgggccttctgcagcagttcggctgcgagcacgtcgccgagttccccaactttgcgaaaggggactgggaaattagtccgcaggacgtttcgcccgctctgcgagcttggcgtaagcagttctggcagaaggacggccgctccactgctaaggcgtgcctgctcaagcaactggcaaaggcggaggcggcggatcaaggcgaagagccgacggccggcgggggcagaggcgatgccgaggatcacccagagggtgctcgccggaaactgtgtattcgggccctctttggttattggcgaagtaaaaacgaaaagttcgtagcggtgaagggtttgccgaaggtgtggtgtccgtttcggccagtttaccgtgagatgataatcaacggcaacagctacaaggttttgaaggttgccagctggatgcgggcgcacccgggcgaaccctggaagactacgatagtgtccataccgaacgtcgggaggatatggttcgcttttggcgaaaccatcagaaatccgatcgtcaggaagcaatcgcccagcgtcgttatagtttagtttgtgtttcgcccccttccccccttagggtagtgtatgacattagtagtgacgacgaaccatgttcgccgaaccatttctttgggagtggggattgctttgggggcgaagatgtaatttatttg

SEQ ID NO: 23576 - DNA, 3465 bp, Oryza sativa
  Clone ID: PAT_MRT4530_28642C.1
atggctggacgaacggcgacgacggcggcgctaggctacatggtgctagggctctaccggcgacgagaggcgaaggcgagggtggcggcaggatttttagggtgttacaaagatgatgggcaccaacggcattgtgctcgcaatggcgagcgtgaggacagatttggaaaactcaaggttaccataccaaaattttgtggtaccaatgatcctgaggagtatctcacttgggaatttaaggttgataagatatttcgtatgcgcaactacacagaagaaacaaagctacacatggcatcacttgaatttgatgagtatgctctgatttggtgggagcaaatgctgaaccaaagggaggaacacgatgaacttgctgttgctacatgggtagagatgaagcatgagatgcgtgcacgatttgttcctagtcactacaagcgtgatctttttgaaagattgcagaatatgaggcaaggaacacgctctgtagaagagtactacaaggagatggagaaagccatgattcgagccaaaatatacaacactattgtgcaattggtgcaccaagctacaaaggcagagcatcaagtgcaagaagatgcaaaggtggcacacaacacctcatttactactcgctctttgtccagtgggggtagaccgaccccaaagtttaacttgagcaagaacttcatctccagcaactctccttctctcaatttagcaagtaagaaagaggagagtacacaaagtgcaagcaagaaatttgttgttcctacaggtagcagcacctcttcggtgggttctacaccaaagagtagcaatattcagtgcttcaaatgccttggacgtggtcacatgcagaaggactgcccaaataataagacaatgctgattttggaggatggtgaatatgaatcaacaagtgaagataaggatgatctagctgctgatttgacgcattttgatgatgctcaagaggaggatgaggaaaatggtgttgtgtattatgactttgaagagggaccttcacttgttgttactccaaaagttttgacggttcagcccaagattgatcatgaacaacgatgcaatttatttcagaccaaggcaaaagttgatggcaaggtatgcaaagtaatcattgatggtggtagttgtcatagcctagctagtaaggagatatgcaacaagcttggtttgaatctggtgcgtcatcctcatccgtatcatgtacaatggtttagtgattgtggggaagtgaagatacaattcatggtgcaagtaacatttcagattggggactattgtgacactgtggagtgtgatgtggtgccaatgacggtgtgtcacttgctgcttggtaggccgtggcaatatgatcgtgcggcgcaacatgatggccgtacaaatcagtacaagttgaggtggaaagaaaaggacatagtgctgcgacctatgactccttcacaaattataaatgagaattgccaaaagctagaagttgttgttcagagtgataaaaaaagagagcaaaagattgttatccacaaatcgaaagatggtacatggcgcatgtgtgttgattgtagagcaattaatagcatttctgttagatatcgccatcctattcctaggcttgatgatatgctagatgaacttagtggtgctgtcatattctctaaaattgatttgcgtagtggttaccatcaaattcgaatgaaagaaggggatgaatggaaaattgcctttaaaacaaagtttggattgtatgagtggttagtaatgccttttggtttgactaatgcaccaagtacattcatgcgtctgatgaatcatgttctaagggctttcattgggaaatttgtggtagtgtactttgatgacattttgatatatagtaaaacaatggaggaacatcttgctcacattcggcaagtgctagagatgcttaggtctgaacgcttgtttgctaactttgaaaagtgcactttttgcagagaaaaggaaggtaagcccattgcatattttagtgagaagcttggtagtgcacaattgaattaccctgtttatgataaagaactctatgctcttgtacgtgctttggaaacttggcaacattatctttggccgaaggagtttgttattcattctaatcatgaagctttgaaatatttaagaggccaagctaatctgaaccgtaggcatgctaagtgggttgagtttattgagtcctttccatacattgtgcgatataagaaaggaaaagagaatgtggttgctgatgctttatctcgcaagagtgtgcttttgactcaattagacgtgaaagtttcaagtttagagagtttgaaagaattgtactctaaggatagtgaattttcagatccatattctaagtgtttggatgggaaaggctgggagaagtatcatgtgcatgatgggtttttatttcgtgctgacaagctatgtgttccagaatcgtctttgaggcatgacgttgagaggtatgtgcaaaggtgtgtcactagtcataaagcaaaatcgaaattgaatccccatggtttgtacactccattacctgttcctaatgcaccttgggaggatattagtatggactttgttctaggattgcctaggacaaggagggggagggattcaatatttgtagctgttgatagattttcaaaaatggcacactttattccctgtaacaaaagcgacgacgcgtcgcatgtagctgacttgtttttcagggaggttgtacgcttgcatggagtacctcgcactattgtatcagatcgtgatgtcaagttcatgagttatttttggaagactttgtgggctaagcttgggactaagttgttgttttcaacgacttgtcactcccaaattgacggacaaatggaggtggtgaatcgaacactttctatgttgctgagaatgatgattaagaagaacttgaaagaatgggaagattgtttgccacatgtggagtttgcatataacagggtggtacattctactactcaactcagtccgtttgaggtcgtgtatggcttcaacccaatcacaccacttgatttgctgcccctgccacttcaagaacgtgccaatatggaagcaacaaagcgtgcagattatgtgaagaaaatgcatgagaagacgaaggagaccattgagaggataattcagtcctatgctgcaaaggcaaacaaagacagaaagaagatgctatttcaacccggtgaattagtttgggtgcaccttcgtaaggatcgttttccggagaagcggaagtccaagcttatgccacatggagatgggccattcagggttttggagaaaatcactgacaatgcttacaagatagatcttcccggtgattacacagttagtaacacattcaatgtggttgatttgtcaccattctttggcacggaagaaacagattcgaggacgatttaa

SEQ ID NO: 23577 - DNA, 609 bp, Oryza sativa
  unsure (1)..(609): unsure at all n locations
  Clone ID: PAT_MRT4530_28643C.1
gacaagagaaccaaagacacaatccgtacgcacgcacacatcatgccaatggagaagaagcacaggcacgcgaggtccaggagcttcagcggcggcgccatcgtctccttcctcaagagcacggcggcatccttcacggcgaccaccaccacggcctccgcgccgccgccgccgcacggcaggtcgtcgttcaaccaccgcaacgccttctcggggcccatcgtctccatcgtcccgccggaggccgcggcggcggcggcggcgccgccgggagcaccgctccgggtaccggacgcccgagccgtcgtcgcccaaggtctcctgcatcggccagatcaagaaggccaacgccaagaaggtcaaggcgagctgcaagaacgggcgcgtgcccgcttcccgcccccgccgccggccggcgccgccgccgcgcgtaggcagaagagctcgctcgtcaggaggatgctcttccgccgcagcnggtcgcggaaggcgtcatcgtcgtcgtcgagggacggcggcttcttcaaggggaggacggccgggcgncgcgcgccgccgtggctgcggcgccggnaccggcggggctcgggcagatgaagcggttcacca

SEQ ID NO: 23578 - DNA, 1722 bp, Oryza sativa
  Clone ID: PAT_MRT4530_28644C.1
ctagtactgccgaggatttgtttccgtaccctgctgctccaatgatccaatcatatgccaacctaactgtgccctcctgtagtagtaaatcgggtacttgaagctgccattgccggccttcaatttcctgccagtacgactactatactcagtatccctgaagatactgctaccgagtactgaagcgggataataaaaagtgccattagccgattcagcacgagggttaaagtttgttttgtcagatttgctgaatcttaaccacttccagttcgcataagacactgcctcgtcgtcaaagggagcaacctcgtcgaacgaggagtctaactcagctggttgatgcttctctgaaatttggtcccggtatctttgcgccatctcttcagcctcggagaacaccttctccttgttagagagaaacagtccaggttcgctctcaaggtccttggtactgagagcaattctgcccggggctgttgatttaatcacgatagctttcacttcctcacccacttttagcacatcaccaacggatgttagctgcccccgtgttatatttgagacatgtagcaatccacctctgttagtgtcgccaatcgtaatttgtgcaccgtatggaaacaatttgcggactgtcccttgcaaaagagttccttccctaaggtatgtcattgcccatgcttctttttcactaattatcaattcgttagctttttcatcaatccttgtgatgcagacatggatctgttgaccaacagtattctttagatccgtgaagtttcttggtctagtcatcatttcaggtttagggaggaatgcccgaagcccctcaattcttgtcagcaggcctccggcattccactcaaaaattttaaccttgataggcacatttaactgctttatctgcctcactctgtgccacgcgacgcgccggaacagccggcgcgcggacagcagcggccgcccgccaagtgttcgaccgaggacctcggtgaacaccaccgtgccgacgcccaaagccggcgaacctctccctctcccctttccgttcctcccgcccgtcgcctctccttgcccctccccgccgctgaccacgactcccaccttcccttccgcggcgaactgggctgcatccttcgacgccacgtcgcatgccaggtactcaaactcctccccggtcataggcaccgcctccttggccagcatcagcgccggctcgccaccggcgccgacgtcgatgtcgagcgtcctcccgtcgccgccgaccacgacgccgaccgcgaggtccccgggcagctccggcactcccctccccttgtcctcctcgtcttcctccacatagcctccgccgccgccgccgccgcctcccgccgccgcgtcgtcctcgtcgggctcggtgctcttcccctggaagaacttgaggaacggcgcgagcgcctcctccgtggacagtgccggagcggcctcggtcgactcagactcatcctcatcggcgggggatggggaagggaacggcttctcgaggaggtgcagttcatcacctcctccgccttcgccgccaccggaggaggaggaggaggaggcgtggagcggcgacgcagctcgtgctccgcggacggggaggcggctcgcggtggggggtctccgccgcgccgctcggcggcttcgcggggagacggaggcggcggggaggagggagaggagggacgggggcggcat

SEQ ID NO: 23579 - DNA, 222 bp, Oryza sativa
  Clone ID: PAT_MRT4530_28645C.1
atgggaggcatggcagcgcctgtagtgcacatcaccgtggagaaaaaggatgcacaacatgtcaccccctcagtatccattccacgcacctccctttctaccttccgtggaggtagacagggagatgtgattcatgcaactgtagggaagaatatgatagacaactacaacacaaagatcaaagagagctcaatttttgcatattcagtaaattcaacgtaa

SEQ ID NO: 23580 - DNA, 352 bp, Oryza sativa
  Clone ID: PAT_MRT4530_28646C.1
gtacttagtacattaccacattatattgatttttttttttcggccccccctaggctttgtttaaaggggggaaccccgccaaaatttcttttttgtcgaaaaaaagagattttctgggggggggtaattgttgccaacagcccgcccttggtttaaaaaaaaaaaaactcgggaagaaatatggttgaaaaattttttgggtggtgcaaaaaaaataaccgggggggggatatttggccataaaaacacccttttttaataacttaggggggggaaggtttttttttttttggccaggggtcccttgtcgcaaaaaaaaaatctcccttgcgaaaacaaggggggcgaaaaa

SEQ ID NO: 23581 - DNA, 246 bp, Oryza sativa
  Clone ID: PAT_MRT4530_28647C.1
caaaaaagaccctgtattttcttcagttcgttgccgtgttggtgtgtatagtggatctcgtgttctttgtgttagctgctgctgctcagcttgccagccctggcggccaagcacagcggctttgtgctaagatattgtgccgctgaaactgtattttcggggtggaaagtattggctactgcgattgccatccttaaaagttgtggtaatagaaatgttttgatcctataaaaaaaaaaaaaaaaa

SEQ ID NO: 23582 - DNA, 420 bp, Oryza sativa
  Clone ID: PAT_MRT4530_28648C.1
ggggtcttggtttttcgcttttcacttgtttttgtgttcttgtttttttgtttctttttgccctctttttctctttcctctttgtcttttcttttccaaacaactgataggccgggcgactggggggggattcttaaatccgggaccatttcccgggggggggtgggaaccacacattcccgccttgttctccccttcaaaagcccggcttcgaaccctaaagaagccggaaaacatgggccggccacccaccccttccagaccatgacaaaggggccggggcccccaagtgtcaccacttgccacgttgtgctcaagcagagggatgccaaaaagactaatttcccataccaacccgaaaaaagccggcccccttaaaggtgggagaaccgggccaacgcccccctgggcgcctttgca

SEQ ID NO: 23583 - DNA, 696 bp, Oryza sativa
  Clone ID: PAT_MRT4530_28649C.1
atggcgggtgaagaaccatggtcaagcgaggcctccgacgatgtccccgacacatcgcacatgtcggacgaacaatttcaacagttcatcgaccagtactgggcagagcaaggattcaacatttggagttggattcgtgcttccaggacgtcgtcaagctccacgccggggccaaccaggcggacggcggcgtcatggcaggccgtcactttcgacggggacggcgtcgcgcgcttctccggcaactccgaccgtagcggcggactcgacgaccaagccaccagcggcttcagcatcgtggacctactggacggtatcctacaagcggatgacgacggcaatggcggtggagctacgccggcgtcgagcatggcgatcgtaaacctgccggagattaccgtcggcgacgagaaaggcgaggcgaaggactgcccggtgtgccttcagggcttcgaggagggcgacaagcttaggaagatgccgtgcgctgattcgcactgcttccatgagcagtgcatattcagctggcttctgattaaccgccattgcccgctctgccgcttcccgttgcctgctgagacggaggaggatgaagaggtggtccaggcagagaacgacgacgacgacgatgatgaagagaccatcctatgtctgcatcgactgttcgctgatgcggctgatgagtatacgagttga

SEQ ID NO: 23584 - DNA, 1788 bp, Oryza sativa
  Clone ID: PAT_MRT4530_2864C.1
ttactctgaagatcttggcccgcccttcacctctctgttctcctctacggcgcaaagcttctctctgcggagcccgccactgttcgcctcgaggccgacaaccaccgtggacggcgacgcggcggcgagcggctcggcgcccccgacggccgaggcatcggcggcgatttccgctccattacggtgggatctgcaccggtccgttcccggccgcggcaggatcacggtgttctcacgcccaaccgcagcaggaacggcgatgggcggactgcgagcctcgctgttgtgttgaatgcacccttctcctcgctcatggcggccgcagcggaggtggatgcggaggcgaggagcatcctcgaacgcgcagcggcgtcctccttcccaccgctccacgccatccaccacctcctctccgtcggggtctgtgtgcggtgcatctttcggttctttggagcctttagttatgcagcaccatgcctttctcttacggcatcagttctgcattcgtttcttgaagagcatgacgattccgcaaaaagtgggtcttgttcatgtttgtcaaaagatgaggcgtactgctctatttgctttggagtgttactgcccacctgctatcaagatgatggtgtagaaccactccgtagtgtttctcctatcgataatgttacttcaattatatctgaagcagtccagagagagggtcaccaagtcgatgagttctccctagaaatttcactgcctgcagttatagcagctaatgatcgtgccattaggttatatatgaaagagaaatatggcagtgcaaattggttcgatgaaaaaatattttctcaacagacaatgtcagtgaaggaggccttgagaatattgctagtaccgtcagtagaaaaacaaatgaatgtgaaacatggtaataattcatttcgaattcgcttaacttatactcatgatgaaggttcacaaaagcttctaaggcttctgccaaatgaccgtggtcgtaaaagaaaaacagaatcaagagatggaagcagtaaaaggggctcaacagatgatgataaacaaatattaagtgaatcagatgcattcatcaacaagaaccttgaaggcattcaagatcaagacctccgtagtttatttcaattgccacctgaaaaggtgttagaaccctgccatcttgtgatatcttgccaacggtcacccatatatattggtggaagatacttgaagctttcaaggaatgtcagccagtcatgttggataattgatgatgagagaatgggggaagcatcagttgaggagataattggggagaatgtccgtgccatctgcaaaggtgatggctataagttccatgctgctggaagagaagatattgatgttcggatgcttggatctggtcgtccattcttagttgaagtcttgaatgtgcgatctattccatctgctactgaagttcaacaaatagcagataagattaatgactctgaaaagaaacatgtcagggttagaaatctcaagctggtaggcagtgaaatatggacaatgatgcgggaaggagaagcagagaagcagaagcagtatgctgccctcatatggacgtctcgccctctgacggatgatgacctacataatatttctcttatcaaagatatggctgggacatacataaaggagtttgtgcacggagatcttggacgcacacacccaagtgttggcgtcatgttaagctgcagagctgagatactgcaactcgatgtcactgacgttaagatggacttcctgcagtaa

SEQ ID NO: 23585 - DNA, 249 bp, Oryza sativa
  Clone ID: PAT_MRT4530_28650C.1
atgaacgccgccactgcccgccactcgaagccaggcgacgacacgcagagggagaagccgaggatgaggagagacattgccatgtcgcgccacacgctcgtcgacccgccgccgccgccccaccacccgccccagtgtgctgccgggcgcgccgaccgcccgccgccactcgacgtggtggcgggcggtggtgcatggcagcacgccatgaaggccgtggagggtggcggcaggtggagtggaggatag

SEQ ID NO: 23586 - DNA, 331 bp, Oryza sativa
  Clone ID: PAT_MRT4530_28651C.1
cgcccgcggtaccgaccgggaactgtgaattgctggagccgacgcatgcgttcattcaaatagaacggaaaggctttcgcattggagggcataatcgcgagggcattgcgaagcttctagtacgcgttggcgagctctggtttctaacggacgctgtgcgaccacccgaagctccccaaggggaagactgtagccctcttcgtgcttgactgatggtgcgaggccaaccccgacaagtacaactgcattcatgtcgcccagacgcccttcatggatgccctcaagaatggtgctctcgacaagcggagactagtgaagtctcatggaacag

SEQ ID NO: 23587 - DNA, 279 bp, Oryza sativa
  Clone ID: PAT_MRT4530_28652C.1
atggaggtgagcatgatggagcaggggaagacaacaacactgccgcagaaagtgagtgtcacgcccgagcatgagaggccagaagctttgttggacgccaacttgaagatattgctaatgataatcgttacgggcgtatcgctgggggtattcgtcacttgccttgtgttggcttttgtattggacttaactgtggagggtagggcaatggtagtgtttacggcgctagttggtgttgtctacggagtggcaggctataacatcattcgagcatgctaa

SEQ ID NO: 23588 - DNA, 2011 bp, Oryza sativa
  Clone ID: PAT_MRT4530_28653C.1
atggctgagctgcggcattcgacggtggcggcggccgcggcccgctcctccaactcccccgcgaagcgcgactccgacgcctctgccgcctcctcccccttcgcctccacctcatccgcgcgcggccgcggcggcggcgacgacgacgacggcaaggatgcgcaccgctcctcccctctcctccctcatcaccacaagcgcctcggcttgccctctcccctccgctcgctcctcgccctcgaggaccccaggtccccctccgcgtcctcctcctaccggatcttgttcgccctcctcgcgttcctcctcctcgccgccaccttctccgcgacctccgtttggtcccgcctcgtgagttcctctcctcttccgaatttcggttttcatcagactcgcaacttaccaatgcttcctgtttttgatcctagaatgcgccctacttgtgccagaaggatgggatcacgctgcactgccctgaggtggagtgttcttcatctgcacacgcaaagtttcagtgaatgttggtatgtcccacctgagaatgaaacctctggatatatttttattcatgctgagggtggactgaaccaacagcgtatagctatatgtaacgctgttgcaattgctaagataatgaaggcaacgcttattttgccagttctaaagcaggatcaaatatggaaagaccagacgaagtttgaagatatctttgacgtggatcattttataaactatttgaaggatgatgtgcgcattgtccgagacattcctgactggtttacagaaaaagatgagctctttactagtataaagcgtactgtgaagaacatcccaaagtatgcatctgctcagttttacattgataatgtactcccgaggatcaaagagaaaaagataatgtctattaagccatttgtcgacaggttggggtacgataatgtcccaatggagattaaccggctacgatgcagagttaattatcatgcactaaagttcctgcctgacattgaagaaatggctgataagctggcagcaaggatgaggaaccgaactggcagtgtaaatccgtacatggctcttcatctgagatttgagaaaggaatggtaggcctgtccttttgtgattttgctgggacgcgggaggagaaagagatgatggctgcttataggcagaaagaatggccaaggcgctataagaatgggtctcacctgtggccattagctctgcaaaagagaaaagaaggccgttgccctcttgagcctggcgagatcgctatcatcctccgggcactgggttacacaagaggaacacagatatacgttgcgtcagggcaagtgtatggcggcaaaaacaggatggctcccctccgaaacatgttcccaaatttggtgaccaaggaggagctcgccagcgcggcggagatggcgccgttccggaagcacgtgacgagcctggcggcgctggacttcctggtgtgcctgaggtcggacgcgttcgtcatgacccacggcggcaacttcgccaagctcatcatgggggcccgccgctacgggggccgccaccggctcaagtccatcaagcccgacaagggcctcatgtccaagtccctcggcgacccacacatgggctgggccgccttctccgacgacgtcgtcatcacccaccagaccagggccgggctgcccgagcccactttccccaactacgacctctgggagaatcctctcactccctgcatgtgtcctacagcctgaacccccctgatgaatcttcaggcttgaaagttcaattatacagttaggatcactggcagtatagtgctagaacattttatgttcttgttttttcgttttcgtttttttttttgctcacgtagtcctattactagcaggatttaccacctcgattggtcagcgaaattcgagccccagcgaagcgtactcttttgctaattttgaacaaactttaacatatttcgaatgaattatgacctgagatgaacgttttgac

SEQ ID NO: 23589 - DNA, 1356 bp, Oryza sativa
  Clone ID: PAT_MRT4530_28654C.1
ccacgcacggaggaattctattaaatctctctctcctagaagagcttgaatagaattcccggacgcgtgggcggacgcgtgggcggacgcgtgggtgaagaagtaaccatgtccgggcacgccgcgccggcgccgcacgtcgtcgaggactatcgcggcgtcatccagctcctcagcgacggcaccgtcgtccgctccgatgccggctccggcgccggcgccctgctgccgccggaggacttccccgacgtgccgggcgtccagtggaaggacctcgtgtacgacgctacgcacgggctcaagctacgcgtgtaccggccgcccaccgccggcgacgccgagaggctgccggtgctcgtctgcttccacggcggcggctactgcctcgggacgttcgagaagcccagcttccactgctgctgccaacgcctcgcgtcggagctccgcgccgtcgtgctctccgccgactaccgcctcggccccgagcaccgcctccccgccgccatcgacgacggcgcggctgtcttgtcatggctgcgtgaccaggccatgtccggaccgggcgccgattcctggctcgccgaatcggccgacttcgcccgcgtgttcgtcgccggcgagtcggccggcggcaacatgagccatcacgtcgcggtgctgatcggctcgggccaactcaccgtcgacccgttgcgcgtcgccgggtacatgctcctcacccccttcttcggcggcgtcgagcgcgcgccgtcggaggcagagccaccggccggcgcgttcttcacgcccgacatgtccgacaagctgtggcgtctgtcgctgccggagggggcgacgagggaccacccggtggcgaacccgttcggaccggacagccccagcctagcggcggtggcgttcccgccggtgctcgtcgtggtggccgggcgcgacatcctccatgaccgcaccgtgcactacgcggcgaggctgaaggagatggagaagccggtggagctcgtcaccttcgaggaggagaagcacctgttcttgtcgctgcagccatggagcgagccagccaacgagttaatccgagtcatgaagcgatttatccacaaagatgaaggttctaataacttctaaatccaagtaaattaagttggatcagtagagatgcatggttggtgttctcatgtggtctgaatctgtgttctgtttcatcttttgtgtaagtgtgcaacttcgattctgtaaaacttggcaagtagatgaacgatgtcatttatatgcgtgtagcttgtcaaaatacaaagtagaaacctgtatctgaataagatggcattcatgaaataatattatcgattgaacgaacgaagc

SEQ ID NO: 23590 - DNA, 276 bp, Oryza sativa
  Clone ID: PAT_MRT4530_28655C.1
atgggcacggtggcgatgggcgactgcgggcgcagcgttggcgggcgggtggcgcgacggctccacctctactgtcgagtggcgacggggatctggcgtggatcttgcacgggtgacgaagggtgcggctgtgatgggcaactgtgggcaggacgcaaggcggcggtggatccggccgccactccgcccctacgcgcacggcgcgacctccgcggcggcgagctccacgacggccacctccacgacgcgccgccatcgattcaatatggtccctga

SEQ ID NO: 23591 - DNA, 484 bp, Oryza sativa
  Clone ID: PAT_MRT4530_28656C.1
tgtagtagcaacgcagctcatcagtgtcaagatggctactactaagcatttggctcttgccatccttgtcctccttagcattggtatgaccaccagtgcaagaaccctcctaggttatggccccggaggaggaggtggaggtggtggtggtggtgaaggaggcggtggtggttacggtggatcgggctatggttctggttctgggtatggcggtggaggccaaggtggaggctccggctctggctctggctctggatatggctctggctctggcggaggcaacggacaccactaagctcatttcctctatcagctagctacaatatagcctgttgttataagtgaaccgtgatcagtgatgagtctctctcgctgctttacaaagagcttgtcggattgtatcgatatagcactgtgtactggcttgccgtttcatcacataaagttggcaaagcctagtaaataaaacgaccttttgtactca

SEQ ID NO: 23592 - DNA, 1434 bp, Oryza sativa
  unsure (1)..(1434): unsure at all n locations
  Clone ID: PAT_MRT4530_28657C.1
ccggccgggacactacccagctcactgaagtagcaacgcagctcatcagtgtcaagatggctactactaagcatttggctcttgccatccttgtcctccttagcattggtatgaccaccagtgcaagaaccctcctaggttatggccccggaggaggaggtggaggtggtggtggtggtgaaggaggcggtggtggttacggtggatcgggctatggttctggttctgggtatggtgagggaggtggtagtggaggtgctgccggtggcgggtatgggcgtggtggaggcggcggcggcggtggtggtgagggtggtggctccggctctggctatgggtctgggcaaggctctggctatggtgcaggtgttggtggtgctggcgggtatggtagtggtggcggaggtggtggtggccaaggtggtggtgctggcggctacgggcaagggtctggctatggttccggctatgggtcgggtgctggtggtgctcatggtggtggttatggaagtggtggcggtggcggtggcggtggaggccaaggtggaggctccggctctggctctggctctggatatggctctggctctggcggaggcaacggacaccactaagctcatttcctctatcagctagctacaatatagcctgttgttataagtgaaccgtgatcagtgatgagtctctctcgctgctttacaaagagcttgtcggattgtatcgatatagcactgtgtactggcttgccgtttcatcacataaagttggcaaagcctagtaaataaaacgaccttttgtactcagatcatacttctgttattcacggagctgatgttcactaagattgatatgcaagaacatagatttaacccttgtcctagctagttgtttacatagtaagcatgcagaatggacttgttaactctcggtgatcttgagttgtaaactggacttgttctcagtagggctgctagctagcatttctagattccaacatgttcgcttacacggtgttaaaaaaatattgctgcagattgtaatgaaactacccagataaagtttcaattggtcagcaccattttgaaaaacttggtgattagctatgcatactctggttttggggcgccgggccgccgccggccggcgtcgccgcngcttgtggtgtggggcgnctntgtncnttnnnccngncccctcccccgnttcctggcgntcctctccctgnncnnccttttcttcnnctngcgtctgggctccccntcgnnnccccccgnggnttctcttctctccgtgnnnttgcctcncgnngggncctcnngnntttcctncttgcttttgccggnntctgggttcctctcnntcttggncggntgcttcnccttcttggccttggcctcccntnnctcttgngttgctctccccggntcctcttgc

SEQ ID NO: 23593 - DNA, 540 bp, Oryza sativa
  Clone ID: PAT_MRT4530_28658C.1
tcgatcatgagcaaagccaaaaacattaagcccaaggtcattgaggactctgaagaagactccgacagctcgatccccatcattgctgccaagcccaccaagaaggagaaggttgaggagaagaaggccgtgaagaaggtcgccaagcctgccagctccgacgaggaagacacccccgtcgtggagaagaagcccaccaagcagcaaaagactgagaccgtcgccaagaaggtggtccccgtcgctaagaagcctgccaagcaggaatcatctgaggaggagagtgaggaggaggcccccaagaaggtggtcgccaaggctaaatctcccgtccagaagccagttgtccagaagaagaagccccagcctgaatcctccgaggagtcctctgaggaagaagcccccaagcctcaacccaagggaaaggtggcccaaaaggtcgcatcctctgtccagaaggccgtgtcccctgctgccaaggtgaccaataagcctgcccccgtcgttgagagctctgaatctgaggaggagtctgaggag

SEQ ID NO: 23594 - DNA, 258 bp, Oryza sativa
  Clone ID: PAT_MRT4530_28659C.1
atggagagcgggagcgacacggaggcggcaccgaagccgaagacgaagccaaagccgaagccgagctcgtgccggttccagtgcgtcgcggatcacaagccgccgccgccgccgccggcgacgaccagcaacggcggcggcggcggcggtggtggcgacgggaggagcggagaagaaggcgggaaagagaacacgagtcaacaacgctacccccatctcgtcgtcttccttgtcttcggcaactccctctcctcctaa

SEQ ID NO: 23595 - DNA, 504 bp, Oryza sativa
  Clone ID: PAT_MRT4530_2865C.1
ggggaacaattccctggtttattccagggggggagaattattttacacagggggcccttgcactggcagcccactacattcataaaagagggggggggggacaaatttttttttcagcaaaaaaatttcataggcttacaggacgaaatctccatgcgatcatgccaaattgcctggggtttcaggctttcaaagcccccgggcaaaagggcggcccccgcccgcctcagatttccaattgggtcatcgcatttgcagcaatagccggtctggcttctccacaagggttttccactcattacaaaaccctggaacgggggggccggcaacaacccgggggtcagcccccacaggccccttggtttttgggggagggtaaaccttttcctcatcatcaaagcgaggaagtttttgaaagcggccgagggcaataatggcaacttcaggcaaggtgggaagcggggagccaaacttgcccccaatggggcccatgggggttaaggg

SEQ ID NO: 23596 - DNA, 267 bp, Oryza sativa
  Clone ID: PAT_MRT4530_28660C.1
atgcccgccggcgagaagcaggacagcctcgccgccggcggcgaggcgctcaggaaagtgcacgccgagctcaccgacatgctcgcgcagtacaaggcgaccggcgaggcctacgtcgtgatggacgacgacgacgaccacctgccccgcgtcagcgccgccgacgtccggtcggccctgcagatggtggacgacatgttcgatgtcatcgacagctacagcgcgccgccgccgccgccaccgtccgacgacatgctcgatcaatga

SEQ ID NO: 23597 - DNA, 478 bp, Oryza sativa
  unsure (1)..(478): unsure at all n locations
  Clone ID: PAT_MRT4530_28661C.1
cnaggtgagtgtgggctagagccctatgggcggcacccgttgcttggttgcactgcgacggcaggccgtgtcggcgtgcgtaccggactggctgactgtgctgcctntgctatgctgcgcncggcggatatctgcccggatctggcctagtgtgctaggctagcgactgtgctgctggcgggctaggcttgcgggggttggactatgggaccacgagggctgcgttgtgcggaagatgctgttgtgctgcgagcactgctgtggagtgtgtgtgtgcacaaatgcgggaggattgcaagaatgctgtgaggtgggccgaatggcacncaagtatnccgtgactgttggttgaaaggttgcgcatgcagtgatgtgagcgactgggcctgactgccatgactgaccncngtacaccctntatggctnttnccttaggaangaatctactattagtngctaaaaaaaaaaaaaaaaaaaa

SEQ ID NO: 23598 - DNA, 114 bp, Oryza sativa
  Clone ID: PAT_MRT4530_28662C.1
ttgtttacccacaggaaaatatctgcgctggggaggccatggataggaaccaacagaccttagcttatcctaccttagctcaacccaaagcttgaagcttccattataagaact

SEQ ID NO: 23599 - DNA, 1542 bp, Oryza sativa
  Clone ID: PAT_MRT4530_28663C.1
atggaggctaaggggaagaagcggaagagagaggttgaggtctcacaccccgcattggagagggcggtagttcctacgaactccgctctaccaatccaccgatccgctctggagtccggcgaggactcctccgagtccgtcacgtcggacgcgggcaccgccaagcctccagccaaggacgtcgtgcatgtcgccaatgcactgtgtacggtgtgcaccaagtcccccaaagccgtcatcgagttcgtgcgccgagtgagcccttccaccgtcagccgttcaattgactgggacctcgtcaacgaggacaaatcatcgaagatgtccgaatcgcgtggtcgctggaccgatttcgagctgcatgtgtttcttgagagttgcttggaggagatggcggcattcaacataacatcgaactcccccaaacccaaggcatgggagaacttggtgaagaaaatgaagaacaagtgcaagaagaagatgacgaaggcgcaattggagtatatctgggggcagtgcaagaagcagtaccagctgtgggtgaagaagggtgtgatcgccttcagaaacgatcccctgaagcacattgatcttcatcacgcggtctttagcacgcgcaccgttgtcggcaaccactccgccgtcgctggggctgaccaaggcccaccgcaacaacccgttgaatggcagcccattgacatcgacgagctgacagcagcgtacactcctccaccgcccgcgccgtcgacatatggtcagagcaatggtagtaagggcaaaaggaaggcatccggtgagacctctggaagttctaacaagcggacacgcagtagcgattggggcgatgcgcttgacaggctcagtgtgctgtgcatggcgtccatggagagccacgcaaagcaaatggatgcttggaaggctagcagccctgacggttgcatggagttggaggaaaaagatggcctccggccaggtagtgagatttgttacaggaacgcggagatgagtagcaatgtcggtccctacggctgggctgatggccataccagcagcgaggaggaagatgccatcatcgacttgctggccaatgagatcaggagaaatgaaagagcacctaaccgaattccagttcagaccggatggccaggatcagttcatgatcaaaggattctgaacgaggatgtgcagtactatcccaatgattttccgcagattccgcgaggaaggtatctacttgtggactcaggttttcctagtaggatgggatttcttgcaccgtacccacatgtacagtaccatagggatcgattgggacgaagacaagcggcggcacccgaaggccgagaagagcacttcaaccattgccactcctctttgcgaggtattgtggagagaactttcgggatcgtcaaaaagcagtggaaaatactcaaggtgataccgtttaacccagatgatacagttggaccacggatcatacatgctgcttttgctcttcataactttaagaagaattataatgatgatgtgaactacgtttaa

SEQ ID NO: 23600 - DNA, 511 bp, Oryza sativa
  Clone ID: PAT_MRT4530_28664C.1
cccacgcgtacacgtacgcgtgggcggactcttgcacggtctcgtgagtcctaccaccgacagcttccggagtagcgccaatcccaattgaccgaaagtcaaagccaaagtcaaaagttcatggatgaacatcaaaagatccaccgattcagacaaggagatgtaattgcattgcctgctggtgtagctcattggtgctacaatgatggttaagagccagttgttgccatatatgtcactgttcttaacaacggcgctaataaacttgaccctaggtaaagggatttcttgttagctgtaaatttgagatactgtttatcatacatgtgtgatgttgaggatcggtcacatgaacatatttagtggctttagcactgaactacttatcgaggctctagacgtaagcatccaagtggctttgcattttcaatgttaaaatgaccaatgaggataaattgtccgtgtcgaacactgtctcagtttgctgcagccatatgcattattgtaggag

SEQ ID NO: 23601 - DNA, 186 bp, Oryza sativa
  Clone ID: PAT_MRT4530_28665C.1
atgcggctgtggcgccagcatggggacagcatggcggtgcgggcgccgttcgccatcgtctttgtcgtcgttggagaggagcgcctcttccacaatgttgcctgtgggcatgacacatcaagcggtggcctggtggaggcactgacaatgagtgaggaccgagagtggaaggacggccacgtctag

SEQ ID NO: 23602 - DNA, 7440 bp, Oryza sativa
  Clone ID: PAT_MRT4530_28666C.1
atgaccctgcctccctccgtctccggctccggcggcggcggcgacctcgaggcccacctcgacggcgacgtgggaaacggcaatgccagatcagactccgcggcggcggcggcggcgccggagctccggtaccgggggtggaaggcgatgccgttcgtgatcggcaacgagacgttcgagaagctgggcagcatcggcacggcggcgaacctcatggtgtacctcaccaccgtcttccacatgtccagcctcgacgccgccgtcgcgctcaacgtgttcgctggcaccaccaacctcgccaccgtcgtcggcgccttcgcctccgacctctacctcggccgctacgccaccgtcgccgccggctgcgtctccaccttcatcgggatggtcatcttgacgatgacggccggcgtgccggcgctgcacccgccgccgtgcggcgaggggaggtgtttgggcgcgacgagggggcagctcgcggtgctcgggctggcgttcgcgttcatcgtggccggcgccggcgggatccggccgtgcagcctgccgttcggcgccgaccagttcgacccgcgcacggagtccggccgccgcggcatcaacagcttcttcaactggtactacttcacgctcaccatcgccgtatgcgcctcgtcgacggcgatcgtctacgtgcagagcagcgtgagctggtgggtcgggctcgccatcccggcggcgctcatgctcgcctcctgcgccctcttcttcgccggcgcggggctctacgtccgcgtgcgccccgaggggagccccttcgccggcgtcgcgcgcgtcgccgtcgccgcgttccggaagcggtcggccgccgcgccctccgacgccgacgagtccctcttccggacgcgccacgccagcggcgtcgtgtcgaggctcccctacaccgaccagttcaggttcctcgacaaggccgccgtcgtggtcgacgccaagagcgaggtgggcggcgacgggcaccccaagaatccatggcggctgtgcagcctccagcaggtggaggaggccaagtgcatcctccgcgtcgtccccgtgtggctcacctgcatcgtctactacgtcgcgttcgcgcagacgaacacctacgtcatcctccaggcggcgcagtccgaccgccacctcggcggcggcggcggcgccgggagcttcgaggtgccaccgggctcgttcaccgtcttccccatgctggcgctcgccgtctggatcccgctctacgaccgcctcgtcgtgccatgggcgcgccgcctcacggggcgcgagggcggcatcacgccgctccagcggatgggcgtcggcatggcgctgtccgtcctcgccatgctcgtcgccgccatggccgagaagcggcggcgcgacctcgccgccggctcgccgtcgaacaccggccgggtgtcgcggcagtcggcgttctggctggtgccgcagctcgccgcgctggggctatcggaggcgttcaaccaggtgagccagacggagttctactacagggagttcccggagagcatgcggagcgtcgccgggtcggtgctgttcagcgggctggcgctgtcgagctacctgagcggggtgctggtcgccgccgtggagcgcgccacgaggggcgccagcgccggggacgacggcgggtggctcgccgaggacctgaacaaggggaggctggactggttctacctcctcatcgccgccattggggcggccaacttcttggcgttcgtcgcgtgcgccaagtggtacaggtacaagggctctgatgatgatgacgatgatgaccatgagcatgagcagaggaaattatgttttatggatagtacgccgcccacaggtcgaaaaagaaagcgtgcgtccggaaagcaagctattcttacaacaggtgtgagttcacactctactgggggcacaatacgtgaaaggcagcaacgttggagatccataataaaagcaaagaaaggaaattgttcatctgagttaaaaaaaaacacagtctctaaacagcaagttccagttgccattgcagatgagatttcctactacggacctcctgcccacgtgtgtcgatattgtggtgcccagttttggtatcaggagcgtgtgaagaggtcttattcaagtgaccagggtcatattcgctttcatctgtgttgtaggggtggtaaggtttgcttgccatatttgaaacatcctccaccttttttggctaaattgctagatccaaatggtgacattttatccaaatacttccttaagtctattagatcatacaattctatgttcgctttcacgtcattgggtgctaaaattgactatggtataaacaaaggcccggggccatacgtgttcaaaattaatggccaggttcatcataggattggatctttacttcctgaagaaggtgagtctctagggtatgcacaactttacatcgttgatactgagaatgaggtccataatcgcatatcaatttttgatagagatagggattgtgatgatgataatggagtcgacaaaaagatagttgaaggtttaataagaatgttcgacgaatcaaatgagttggtaagatcatttagggctgctagggatcttctacaagaagggcagagtgaacctttgcgtcttaggctattgcatgaccgctctagaactgcggcacagtatagtgcaccgactggatctgagatagctgctctagtgtatcctattcttttcccatatggtgagcaagggtttaagctaaaaattaaatacaaccgttctggggcattgcgggttggaaagagggacgaggttacaatgcttgaatattatgctttccggttgcagcagcgtagatgtgaggcaataacattgattagtggtggccggctgttccagcaatatatagttgactcttttgcatcagtggaggaaaatagacttaggtttgtcattagaaacaacaagaatttaaggtcagagatttacaaggggatccaagatgccttgcacaagggtgatgtcgatggaaacaatgttggtaagaaagttattttgcctgctagctttacaggaagtaaaagatatatggtacaaaattaccaagatgcaatggcaatttgtaggttttatgggccaccagaccttttcattacttttacttgtaatccaaagtggcaggaaatagctgatgctcttgcatttattttagggcaaaaaccagaagatagacctgatatagtaagtagagttttcaaattgaaggtggacgaacttgtttctgtgttgaagaagggtacttattttgggaaggcacgggcagttctatacaccattgagttccagaagcgtggtctacctcacgtccatattttggtttggcttcaagagatacccaacaggtcgtcagacccagagggttatagacttgtcgatgaatttatggtgcatggtccttgtggggatttaaataaacaatgcaaatgcatgaaagatggtaagtgctcaaaatttttcccaaaaaattaccaggatgacacagtcgtgggtgaggatggttttgtgcagtataggcgtcgtgcggaaataggcaactttgttgagcggtatggggttaaattggataacgcttgggttgtgccatataacttgaaactattaaagcgttttcaagctcatataaatgtcgagtggtgcaataagacacatcttataaaatacttgtttaaatatattactaaaggcccagaccgtgttagagctgtaattgagagctttggcgctcacgaccctacaaggaatttagaagctggagttaatagcaatgactttagtgccgaaaactcgagtgtgaaagaacaaactaacgatgttgatgaggtccgagaatacattgattgccgttatttatcttcgcatgaggctgtttggcgtttgtttgaatttgatatacattatagagtaccagcagttgagaggttagctgtacatcttcccttgatgaatagcattgtgtacccagctaagcgatcattagttgatattgtagatgacccccgttcaagaaagtcaactttgactgagtggttttctgcaaataagatatatccaaatgcccgagagctaacatatatagagtttccaacaaagtgggtttgggataaaaaggagaaacattggcattctcgtaggtcgacagcaaaaaaaattggtcgggctatctacattaatcctagttgtggtgagctttattaccttcgtatgcttctaaatgttgtcaagggggctacatcgtatgaagatctgcgtactgttcatggtgttttatacccgtcatttaaggatgcatgtcaggcacttgttctacttggtgatgacaatgagtggcgtgaggctcttagggaagcatctctgtggggttcagctactcagatgcgacaactatttgttactatagtccttttttgctctgtttgtgatgcactctccctgtttaatgagttttacatttacttcactgatgatatccaccgtaaaattcagtcgataatacaattgcttttatatacagttcctgaacaacatttgaaaaatcatgttttagtggagtttgataatttgtttactaaaaatggtgcttccatgagtaattatggcttgcctaaacctgatctaagtctcttaagtaaagtaaaaaataggttgttagctgaggaaatggcatatgatgttgcaaaacttaaaaatgagcatgacactatgatcaagcaactaaatggggaacaaaagcacatctatgacactgtcattcgggtgtttggtggaaagactatgttgtttggtggagattttaggcaagtattaccggtagtcgagggcgggggtaggttggagacgatagatgcatcaataactaattcatacctatggagtcatgttaatgttttacgtctaaaggtgaacatgcgattgctcgggatgttagatagcggtttaccggctaatcaaataaaagaatttaatgaatgggtgttgagtattggtgatggtactgcaaaaggtagttcacagagtgatgatggagactccgagtggatagagataccaaatgacatcttaattccaagattggactctgctatagatgatattattaaatctacttatccaaacttggaaatatcatattccaatccaatctatttaagggagagggctattattgctccaaaaaatgatactatcgatgaaatcaacagccgtgttctttctttggtccctagccatgaaaaaaattacctgagttcagatactttggttgaatcctcgagaggacatggtaatctagacttgctttaccctgttgagtttttaaattcattacaatttaaaggcattcctccacataatcttgtattaaagattggagcacctgtgatgttgttacgtaacttaaatcaaagtgctggactttgcaatggcacgcggcttataataacacagctaggtgatcgagttttggaggctgaaatcattacaggttcacatataggtcataaagtccttctccctcgaatcgcattgcatgtatcaagcactaaatggccttttgttcttagctgccgacaatttcctgttcgactttgttatgcaatgaccatcaataagagccaaggacaaactttgcagaatgttggtttatatttgccacgcccagtttttactcatggacaactctatgtggctatatcccgtgtcacttctagaaatgggcttagaattctaattgataatgataaggattccacttgtagtattacccagaacattgtttacaaagaggtcagagttgctaggtcatggcatctatctggaacttccaaaagaagagattttactgctttggaacttatcttggtcgatgaagagggggtaggcattacagcttgtgtgggagaaaatgaaatacagaagttttcaacgtctatagtggagggacatgcctacttcttacggaatttccgtgttagtagacagacaaaaaagctcaatgctgtgcctagcacatatgccatcttttttacaccatggactattgttgaagagatccctacagagatatctggcagtcttccactctacatttttaatttcgtggactttgaggatttggatgaaagggcaaggcatccaaatggtttagtagatgttattggacaactcacggttgtgcaccctctagtacaaagcaacggtttgaatgggccatctgttaggcggaatgtggaattacgagaccttagcgatcggctcttggagatcactttatgggctgagcatgcaacttcttttgaagatgagttccttattgaaactattggtaaagatgaaccagtcataattgtttttgctggccttaatatgaaactattctcaggtgctccaagttgccggagcagtgctgccacaaaatggtacattaacattgatattccggagattaatgcctttcgtacaagcctgcaaggaagaggttgcgaggttcttctcgtacctagtgatggtgctgcactaggagcggctaacgaggcagatgctaataggaagtctatatccgagcttttatccttgaatcctcatgacaacaacgatgtacgcttcacttgtgacgcacgtataaaggaaattgatgtctcaagtggttggtggtataaggcttgcagtatttgtagaaagggtgtgaagccaactcttcaaggatttgaatgtgttaactgtgacaacacagagccaataatcacacccagctataagttaaatgttgtgattgaggacaacactgaccgtgcaaaaatattcatgtttggtggtatggcggagcaagttgtgcgacgaacagctgccgatctagttgaagaaagctcagccaatcagctcttactgccgtcacccctccgtgctctcattggccgtaggtttgttttccaaatagttataagtgagcagacctttcggactggacaattgtgctttcaagtaaggaaagtgtttaatccacccccaatcgatgggcaaaacaatggtgttcatgccactcttggaaatagtcttagccatgcaaccttagctagaacgtcaggtgctcaaaagaaatgtgatcctacccctttaatggaggcatcggggagtagctccaacaaagcatccaccttgcagacatatggtgtaactgaactcccaacagatcctaaaggaagcgccactccaccacctccttttgctcatggggctatcacaaaaacatcaccacagaaggggaatgagatttctgaagaacatggatatttatgccgtagaactccggttgggaaacgatctaggtctactcgcaaggaactattctccacgaaaaaagtgaaggcaagtgatgattga

SEQ ID NO: 23603 - DNA, 4389 bp, Oryza sativa
  Clone ID: PAT_MRT4530_28667C.1
ttaataattaatggtgctttgtttacagttgcccttgcagatgagatttcctactacggacctcctgcccacgtgtgtcaatattgtggggcccagttttggtatcagaagagtgtgaagaggccttattcaaattcaagtgaccggggtcatattcgctttcatctgtgttgcaggggtggtaaggtttgcttgccatatttgaaacatcctccaccttttttggctaaattgctagatccaaatggtgacattttatccaaatacatccttaagtctattagatcatacaattctctgttcgctttcacatcattgggtgctaaaattgactatggtataaacaaaggtccggggccatacgtgttcaaaattaatggccaggttcatcataggattggatctttacttcctgaagaaggtgagtctctagggtatgcacaactttacattgttgatattgagaatgaggtccataatcgcatatcaatttttgataaagatagggattgtgatgatgataatggtgtcgacaaaaagatagttgaaggtttaataagaatgttcgacgaatcaaatgagttggtaagatcatttagggctgctagggatcttctaaaaaagggcagagtgaacctttgcatcttaggctattgcatgaccgctctagaactgcaccacaatatagtacaccgacttgaactgagatagctgctctagtggtaggtgatttctcagaaaaaaaaataagagccctgatgtaataattcaggagagaggtggtgtctacgtagaattagtaacctacatgctaattatatggctttgcagtatcctattcttttcccatatggtgagcaagggtttaagctaaaaattaaatacaaccgttctggggtcatgtgggttcgaaagagggacggggttacaatgcttgaatattatggtttccggttgcagcagcgtagatgtgaggcaataacattgattagtggtggccggctgttccagcaatatattgttgacgcttttgcatcaatagaggaaaatagagttaggtttgtcattagaaacaacaagaatttaaggtcagagatttacaaggggatccaagatgccttgcacaagggtgatgttgatggaaactatgttggtaagaaagttattttgcctgctagctttacaggaagtaaaagatatatgatacaaaattatcaagatgcaatggcaatttgtaggttttatgggccaccagaccttttcattacttttacttataatctaaagtggcaggaaatagctgatgctcttgcatttattccagggcaaaaaccagaagatagacctgatatagtaagtagagttttcaaattgaaggtggacgaacttgtttctctcttgaagaagggtacttattttgggaaggcacgggcagttctatacaccattgagttctagaagcgtggtctacctcacgtccatattttggtttggctttaaggtaatactaaagacccacatccctccttcattacttcaataatatgtgcaaagatacccaacaggttgtcagacccagagggttatagacttgtcgatgaatttatggtgcatggtccttgtggggatttaaataaacaatgcaaatgcatgaaagatggtaagtgctcaaattttttcccaaaaaattaccaggatggcacagtcgtgggtgaggatggttttgtgcagtataggcgtcgtgcggaaatgggcaactttgttgagcggtatagggttaaattggacaacgcttgggttgtgccatataacttgaaactattaaagtgttttcaagctcatataaatgtcgagtggtgcattaagagacatcttataaaatacttgtttaaatatattactaaaggcccagaccgtgttagagctgtaattgagagctttggcgctgccgaaaactcgagtgtgaaggaacaaactaacaatgttgttgaggtacaagaatacattgattgccgttatttatcttcgcatgaggctgtttggcgtttgtttgaatttgatatatattatagagtaccagcagttgagaggttagctgtacatcttcccttgatgaatagcattgtgtacccagctaagcgatcattagttgatattgtagatgaccctcgttcaagaaagtcaactttgactgagtagttttctgctaataagatatatccaaatgcccgagagctaacatatatagagtttccaacaaagtggatttgggataaaaaggagaaacattggcattctcataggtcgacatcaaaaaaaaaattggtcgggctatctacattaatcctagttgtggtgagctttattaccttcgtatgcttctaaatgttgtcaagggggctacatcgtatgaagatctgcgaattgttcatggtgttttatacccgtcatttaaggatgcatatcaggcacttggtctacttggtgatgacaatgagtggcgtgaggctcttagggaagcatctctgtggagttcagctactcagatgcgacagctatttgttactatagtcctgttttgctctgcttgtgatgcactctcgctgtttaatgagttttacatttacttcactgatgatatccaccgtaaaattcaatcgataatacaactgcctttatatatatttcctgaacaacatttgaaaaatcatgttttagtggagtttgataatttgtttactaaaaatggtgcttccatgagtgattatggcttgcctaaacctgatctaagtctcttaagtaaagtaaaaaacaggttgttagctgaggaaatggcatatgatgttgcaaaacttaaaaatgagcatgacactatgatcaagcaactaaatggggaacaaaagcacatctatgatactgtcattcggtcggtctatgatagaacaggataatgcttttttgtttatgggtacggtggcactggaaaaacctttctttgaaatactattatttcacgtctatgatccgaaaagcatattgttctcgcagtagcttcttctagggttgcttccctcttgctcctaggaggtcgtactgcacattctcgatttaaaatccctatagtcattgacgaggcatctttgtgtgatatcaagagagggacattccttgctgatttaatagtgcagtgctctttgataatatgggatgaagctccaatgactcaccggtattgttttgaatcactagactgcagcatgtgtgacattcttggtaaaacagatccttcatgtttcaacagggtgtttggtggaaagactatgttgtttggtggagattttaggcaagtattaccggtagtcaagagtggaggtaggttggagacgatagatatgcatcaataactaattcatacctatggagtcatgttaatgttttacgtctaaaggttaacatgcgattgctcgggatgttagatagtggtttaccggctaatcaaataaaagaatttaacgaatgggtgttgagtattggtgatggtactgcaaaaggtagttcacaaagtgatgatggagactccgaatggatagagataccaaatgacatcttaattccaaggttggactctgctatagatgatattattaaatctacttatccaaacttggaaatatcatattccaatccaacctatttaagggagagggctattattgctccaaagaatgatactattgatgaaatcaacagccgtgttctttctttggtccctagccatgaaaaaaattacctgagttcagatactttggttgaatcctcgagaggacatggtaatctagacttgctttacccagttgagtttttaaattcattacaatttaaaggcattcctccacataatcttgtattaaagattggagcacctgtgatgttgttacgtaacttaaatcaaagtgctggactttgcaacggcacgcggcttataataacacaactaggtgatcgagttttggaggctgaaatcattacaggttcacatataggtcataaagtccttctccctcgaatcgcattgcatgtatcaagcactaattggcctttcgttcttagccgccgacaatttcctgtttgactttgttatgcaatgaccatcaataagagccaaggacaaactttgcagaatattggtttatatttgccacgcccagtttttactcatggacaactctatgtggctatatcacatgttacttctagaaatgggcttagaattctaattgataatgataaggaatctagttgtagtattacccagaacattgtttacaaagaggtgttgcagtctcattagtatttcttcttccatgttcaaggttttttttcttcctc

SEQ ID NO: 23604 - DNA, 149 bp, Oryza sativa
  Clone ID: PAT_MRT4530_28668C.1
gtccagcgcctttactcgatcgcagtgcgacccaccctggaggggggagctttaagaaccatggtcgcctcctcgctgtcgacgcctaccgtggccgggctgtggttggcgccgatgtcgctcgtgcggtcgccgtctgtggctttcag

SEQ ID NO: 23605 - DNA, 525 bp, Oryza sativa
  Clone ID: PAT_MRT4530_28669C.1
atggccgcgcgccccgtcagtagcaccacctccacctgccgcccatgctcccggcgcaggtttctgcttccaagccctccacctcctcgtcccctggtggcttttggctcgggcaaagatcgatctgaggttgttggaaattcagttgctttttcattaggactggcaacaaccttagccatccttggtgttgctgcttcttttgctggaaaggcctatgggcaggtaggacaaggacttccagtggctgcttcagggttagcagttatcatgggattgaaccttcttgagatattagctcactgccttaaactgttctctatgctggttatcttgtatttacaggatccgattgttgggggaagtttgttattgacttatacaactggctatgttgcacctcttctcattgcagcttcttttgctggagcactgcagagtttgctttccttcaggagatattctgcatggataaacccaatcagcattcgctacaatttcactgtcttggttcaaagagcttga

SEQ ID NO: 23606 - DNA, 339 bp, Oryza sativa
  Clone ID: PAT_MRT4530_2866C.1
atggaggaggacttgctcagtgaggaggatgcaaccgccagcggcagggtatggaggaggacctgctcaaagaggagggctgccagcgatgacctccgggcatggatggtagaggacctgctccttgtcaactacatcgctgcccatggggaatatgatggagcaggagcagctgctgatcctagagttgcatggccaagaaggggaaatggtggagcaagattgatgggtatcagtctaatccctcaagtatctcgcctggtacctcgcaagtatcatctgatacctcaccggtatcaaaacctaatatcacaagtatcgcttgtacctcgcaagtaa

SEQ ID NO: 23607 - DNA, 1299 bp, Oryza sativa
  unsure (1)..(1299): unsure at all n locations
  Clone ID: PAT_MRT4530_28670C.1
atggccgcgcgccccgttagtagcaccacctccacctgccgcccctgccgcccggcgcaggccgctgcttccaagccctccacctcctcgtcccctggtacgggtgtgctcgtgggtgtgccccgcgagcgcgggagctcggtttccaaggcagcgattcgtggagcgagattggaggccgcggcgaggtgctctctcgtccgccagcgccccatgctgctggcgaccgtggcggtgagtggtgtttcttggtcgcagtggggagtctggttggttgctgctggcgctgcaaatgctacagaaattggtgattctctgttagggtcatctggacttgctttggctgaccttagcattggagattggtttggaaatttgctttattcagcgggtgcttttggctcgggcaaagatcgatctgaggttgttggaaattcagttgctttttcattaggactggcaacaaccttagccatccttggtgttgctgcttcttttgctggaaaggcctatggacaggtaggacaaggacttccagtggctgcttcagggttagcagttatcatgggattgaaccttcttgaggtaattgagctacaacttccctcatttttcagcgattatgaccctcgagctgctgcagctaacctcccttccagtgtacaagcataccttgccggacttacgtttgcattagcagcatcaccttgcagtacacctgttcttgctacccttctgggatatgttgccacttcaagagatccgattgttgggggaagtttgttattgacttatacaactggctatgttgcacctcttctcattgcagcttcttttgctggagcactgcagagtttgctttccttcaggaggtattctgcatggataaacccaatcaggggtttataccctactggacaggctgtttcctgcaacatcaatggtgatgtagaatgcatatcatagtcgaacaagagctgcagtacgaggatcgccattgttgaacatgcgaattatgtcagagttgaaatgtaaagtaggtaatgataaaatgctaacgaactatcatcagctcttcgtagcttacataggtatatatgatatcttagtctcagcaatctgtatagaacgagataagttttaccccccacacccacccacaaatgttatttagcttccgttgcttttaaagaatacgtggaattttgtngacccaaaaaataaatttaagtggtgaacaaaaaatataaacttaaataccttaacattaggtttaaaaaattatcaaagtcaaattcc

SEQ ID NO: 23608 - DNA, 1539 bp, Oryza sativa
  Clone ID: PAT_MRT4530_28671C.1
ttgatctcctgctatcatctgaggaatattttgtggcacaatgtcagcattaatatatgccccaagcaatgacttgtacaggggcaagcttgtcaagttgaacttttgaagaacctttatgaatctatctgcatcctccacactgccttgctcctcgaaatactttgcaatggcctccaacagctcaagtggaggtctccagtggcaagtcttcaacagagataagcccttcttcatggcattgacagctttatccatctgcttactctgaacaaatccctccatcagtatctcccaagtcttgtaattcggatgcgcacctttctctagcatgtggagatgaagcctctcagccttttcgatccatccattcctcacataagcaccaaggagaacatttgaaacccgcacatcgtgcttcttgctttctgcttcccagcttccaaaggtccactcggcccgaccaatgtcgccaacttttatcaagcataccatagcagacatgtagtttgcagcagggattctacctggaacaattttactagcctcccacagcctaataaccccatctctgtcattcagggctgcataacatgtcataatgaaagagtaccctaaacgccctgttgatgacaactttgtttcagccgttctaaggcaagcaagagctttactgctctgtccatacttcttgaagatgttagctaatgtacagtatgtgctccaccaacctcaaccatgtcatcattcagcatctccttgaatgctgattgtactgaggctaagccagagacctcagcacatgcattcatccaaatgtgtaggacagaacatttcttggaatgttgttccgtttcatcagataaattacactaaggaccttctcatactggcacgttgcaacatatagtttcataatttcattgaaagaatgaggatcgacaggcagtccatatctctgcagctcagccatgaaggtttcagctttctgcacatttctttctgtaacatagcaatggagaagcgggaatgacgcggccttcttggaagcagcagtacttagttttctgtagtactcctcagcttgagaagtaccatgaacttttgcaatcaaatccagtctaaccatatgatctgagggcgatagtctaaaatcattgtgcgagtccatccatgataaaatctgcagcataataaaattccgtttaggtagtgccccttgcatcgccactgcgcgatatagattggaacagcaataaacattcagctgagctgtgcaagtgtgtcaataaatcatataacaaagagtgaaacaatgttcactttgcagcataacattataaggaattattaagaagtttgaatcaaattgttgcaaaggtgaaaaagactcctatgtcctatctgtatcagatttttctcggttcaaattcgttcatcaggtagagctgtttggagtgtgctcacctccagggcttgctcgtagcggcgcgcgcggcgaagccggacgacgtcacggcggagctccggcggcgagac

SEQ ID NO: 23609 - DNA, 419 bp, Oryza sativa
  Clone ID: PAT_MRT4530_28672C.1
agaagggcatatatatatatatatatatatttctctgttctgctcttgcctctgtctacaaaattccacgtattctttaaaagcaacggaagctaaataacatttgtgggtgggtgtggggggtaaaactcatctcgttctatacagattgctgagactaagatatcatatatacctatgtaagctacgaagagctgatgatagttcgttagcattctatcattacctactttacatttcaactctgacataattcgcatgttcaacaatggcgatcctcgtactgcagctcttgttcgactatgatatgcattctacatcaccattgatgttgcaggaaacagcctgtccagtagggtataaacccctccacccagtagaaacgcaccactgattgggtttatccatgcagaatacct

SEQ ID NO: 23610 - DNA, 1157 bp, Oryza sativa
  Clone ID: PAT_MRT4530_28673C.1
ctatacgtctcctcgcgggcgtgtggcttcttctctctttgccccaagcatccgcggctcttctccctcttctccctccactcctccatgctctgcgtcgccatggccgcgcgccccgtcagtagcaccacctccacctgccgcccatgcctcccggcgcaggtttctgcttccaagccctccacctcctcgtcccctggtacgggtgtgctcgtgggtgtgccccgcgagcgcgggagctcggtttccaaggcagcgattcgtggagcgagattggaggccgcggcgaggtgctctctcgtccgccagcgccccatgctgctggcgaccgtggcggtggggagtctggttgctgctggcgctgcaaatgctacagaaattggggaattctctgctagggtcatctggacttgctttggctgaccttagcgttggagattggtttggaaatttgctatattcagcgggtcaggcaagccaacgaagctgttcaggatcagctgtctgctcttagtttcactagcttggctgtaattttcggtgctggacttgtaactagtttgtctccttgtacactcagtgttctgccattgactctaggatatataggtgcttttggctcgggcaaagatcgatctgaggttgttggaaattcagttgctttttcattaggactggcaacaaccttagccatccttggtgttgctgcttcttttgctggaaaggcctatgggcaggtaggacaaggacttccagtggctgcttcagggttagcagttatcatgggattgaaccttcttgaggtaattgagctacaacttccctcatttttcagcgattatgaccctcgagctgctgcagctaacctcccttccagtgtacaagcataccttgccggacttacgtttgcattagcagcatcaccttgcagtacacctgttcttgctacccttctgggatatgttgccacttcaagagatccgattgttgggggaagtttgttattgacttatacaactggctatgttgcacctcttctcattgcagcttcttttgctggagcactgcagagtttgctttccttcaggagatattctgcatggataaacccaatcagcattcgctacaatttcactgtcttggttcaaagagcttga

SEQ ID NO: 23611 - DNA, 199 bp, Oryza sativa
  unsure (1)..(199): unsure at all n locations
  Clone ID: PAT_MRT4530_28674C.1
nnctntcgacccttccntcgcctgtaaaantaaaattcccnttnntgnacccnttttcntcntngnttccgcgggcctcgtggccgttgncggnnggnagagggntcgtccccttcccnnagttnagnanagnagtnggnnnagtttcgtaaggncggntttttcccgtttntcgtttnnatgnngntgnaagttnaag

SEQ ID NO: 23612 - DNA, 5071 bp, Oryza sativa
  Clone ID: PAT_MRT4530_28675C.1
atggataacattcttgggggctctacacaatcatgtacaaaaacaggttcgcatgaagatgttagtgaccttactgtggctgaactaaaaagaaagcgtgctcgagaccgctacgcagcattgaccccacagcaaaaggatgataggaacaagaaggcacgtgaaagaaggaaacgaaagaaggaggaaactcaagaggaaaccccacttggcgatatttcaaatataagtgttgttgatataatgaagtgccacttggaagataatgattcttccacactgcatcaaggaagatgtgaaaatcaatatgaatccagtttttttgaaggcagcgatcaaaatgagtgcgaccacgatgacgacatctctctagataatgaattggtgcgtgcgccaaccaatgagacaaaagaacgattgcagtcaaagctagctcgagctagggagaagtatgcaactcttacaccggagcaaaagcaagctaaggtggaccaacggagaacacaacgtcaatcactaacaaaagaacagagactagagttgaatgcccgtcgtagggttgcaaggcaatctatgccagatgtggaaatccatgatatgaatgcttgccgtagatcaagacgacaaaatgttactcctggggaaagatctgctcatctggcacgacatgatatggattccttcatggatgatgactccgacgatgaatactacatgtttgctgggctaggcgacgatgaggatgacgagatggtacaatctgatgacgatgacacgcaatcaccgacctcttctgttcctgatccgtatgactatatgtacagcaacattccacaaagcacaaatgttctgaagcctgaacctgactgtaaacactgtggtgccaagaggttccagtacgaaccgccgagcttctgttgtcggggtggcaagatcaagcttgtacaaaatgaaacacctcctgaactgatgaggctttggacaagctcggatccagacgccaagcatttccgtgataacaatagatacttcaacggccacttctcattcactacccttggtgtaagccttgacaaggcctttgcaaacatgagttcgggcgtgtacacttttcgggctcatggtcagatatatcataatatacattctttcagtcctagagattctggtccagagcatctcgagttgtatttctacgatgacgatccaacattgagtcatagattccaacgttcccctagccttgaccaggatgtgattaggactgttgcagacgtccttcggaacaacccgtactcggagacatttagaagtctagggcaggctgaagacctcgcgaattatcgcgtgacactaaatctggatcataggttgcaccaaaggcgttacaatgtgccggtgacaactgaggtcgctgctatctgggttgagggaaatgagagaaggaagttcgagcctagcgtgacaatatacaggaacaaccgtacgcggaaatctatccagcctttctacgaatgttatgatcccctctcgtaccctcttttcttccctagaggagagagtggttggcatcaaggccttccaaaggacaaaataaccatggaggatgcaaacgcgcggaatggcgatgatcctgattgtaacagcaggatacaagtctctataagggactactactgctataaattccagatgcgtcgtggaattttcaatcctatacttcacggcggacgcctgttccagcagtttgccgttgacatgtacatcaaggttgagagctctcgtctagactatgatgagattactcgtgaacttgagcctggccagacaccacaagatcgtcttgatctcgtggtccgtgtctttcgagccaagttagaggacctaaagaagcagctgttcgagaagcacatccttggcaaagtcattgcacacgtatatgttgttgagttccagaagaggggtctgccacacgcacactttttgctgatcatgagtggtcgatacaagctaacgtctgcagagcaatatgaccgcatcgtctcagctgagctaccggacaagaaaaaatatccagagctatacaatatggttgtcaagcatatgatgcatggcccttgtggtcgactcaacggtaggtgccaatgcatgcgagatggaaagtgcaggaacaactacctacgagagttcaacaccacaacctcgcaaggcaaggattcatacccgttgtataggagacgtaatgacagtaagagtaaggtggttagaggacatcctctcgataacaggtgggttgtcccgtacaatccttatcttctacggatgtacaactgtcacatgaatgtcgaggtttgctcgagcatcaaggctgtaaagtacctctttaaatacctttacaagggacatgacaaggcctcgatatccataaacgaggcagataaaaacggtgaaatcgatgagattcagcgctacagggatgcgagagatttcccaatgtggtttacttggcagacgccagacctacgtactgttgatggtgtgctcatgccgtcgttccgtgctgcagctgaaagaaggggtcttatagaggcagacaacaccctcgacgagtgccttacggaggccggtgtctaccaaatgccggcgtcgctacgcaggttattcgctaccatattggtgtactgcgaacctaccgatatggtgctgatagatatccggggcatgctacaatcaatgggtaaggaaatctcatcgttcccgctccctgaaatagatgaatcacatgatagtactcgaggagatcccagagagattattgaggagtcttccattgttgtggagagagatgatatgaacctcccagaccagctcaatgatgagcaaaggtctgcattcaataaaatcatgaacgcggttggtagtgctcaggggagcgtgttcttcgtagatggcccaggaggcacggggaagactttcctatatagggcgctactagctacagtgcgtggcaatggtgatatagaggtggcaaccgcgacgtcgggtgttgcagcttctataatgccagcaggccggaccgcacattcgcggttcaagatcccactcaacattgaggaagggtcgtattgcagcttcaccaaacaaagtgggacggcaaagcttctccagatggcatcgcttataatatgggatgaggcctccatgacaaagaggcaagcggttgaggccctcgatatgagcatgagagatataatgggttgtccacgttctccgtttggagggaagacgattgtgtttggaggggatttcaggcaggtgctcccggtcattaggaagggcactaggtctcagataacagaagccactctacgcaggtcctatctttgggattgtatggttcaattaaagcttgttcgcaatatgagggcgcagagcgacgcgtggtttgcggactacctccttcgagttgggaatggaaccgaggaggtgaacaaggaaggaaacataggccttccttcggatatttgcttagagtgcaaagggaatgaaacggacctcgaaaggctcatcgataccgtgttccctaacctaaacgataacctgacggacccaaactacatcatatgtagggccatattgtccactcggaatgagttcgtcgatcgaataaacatgaagatgattgagcggtttagaggagatccaacagccaacggactttgcaatgggacaaggctggtggttcgtcagttcggaaaaaatgctattgacgcggagattgttgtagggcagcatgctggaaagagagttttccttcctcggatacctctatgtccttctgatgatgagatgttcccatttcgcttcaagaggaagcaatttccgtcggctgctcgccgaggagttgcaggtgatcaggagagaagcagccaggtccaggatgaagcaattcactgttatgaacaaattcaagatgaagtccttacttataatctatttttcaattggaaaactaatctataccgagttcttcgcttcaatattccacgctttgtctctccgctccagaacctcaaatatgttaaatacgttttgtcgtctcgtctcgtcttttaccgcaacgccgtcgcggagcggctcggcagcagccagcaggtgatcctgctttgctagccggaagacgcagaattagggggagaattagcgtacgtgctcggcttctctgccctgctctccgctcatatgattgggggtgtggaactcatcccacagccggagaagccggtgcacatgtacacacgacaggcttggaagttggatgaggaggttgggggcaagtcagcagtgctaggcagtcggtggtgttggcgccagcggcggccgtgcagtcgcagaggaggcacggcgtttgcgggtggggtggccttgcctaggccgcgacgctgtaccgattttcttggcacgacccaagttggcctacgagaattgtgggtcggcctcatgtgattcttgccggtgtcgtcgctgggtcgacgtcggcgcgacgaggattcgacccagttctgcgagtgaaacagccagttttatccagcaatcggccgaggaagaaggaagttcatatggcaacgtggatatttttcttttgaaaaattccattttacccccgaactattttcgtggagcactaacccctaaacaatttctctgttcatttatcgacagaactattgaaaacgattcacgttactccttaacgatgcacctcgtactgaactgtgcgcgggacagcagctgcagcaaccaaccgaaagagactcccagcagtcccccccccccccccccccccccaatgtacacgactcacgcagcccagacacagttgcaagcgcagccttgcgcgcgttacccgcgtacggtccgcagcccgcctcggcagccacctccctgctccgcggccgcgagcaccggtaggccggtagggcccgtttatcgttggggcgcagctgtcgtgggcgatcgtctcacgtactctcgtaccctcacgtcgttggtgctcgactgctcgcagcca

SEQ ID NO: 23613 - DNA, 755 bp, Oryza sativa
  Clone ID: PAT_MRT4530_28676C.1
cggacgcgtgggcggacgcgtgggtttaccgcgagtcctgtctctttgtggagggaaactactgagaggatctatcagttcttggacgtgacttggctcgtgtggtcattgttgataattcaccacaggcctttgggttccaattagacaacggcgtccctattgaaagttggtttgatgatcgtaatgacagagaactcctaacattacttccatttttgcaaagtttggttggggtggaagatgtccggccatgtattgcaaggaagttcaaccttcgtgagaaggttgccactgcaccttctctctttatgcacttttagatgatcaaatcattttctgggatatagagaaataaattgaagtggcagttgtactctatagagaaggaaaacatgggcagttgtgtgaattgctggagaggacccaaggtggtgaattatctgtatctttgccctggtgtaatcctgtgtacttggaacccataaaatcgtgtaaaatatgctctgttgtactaatatttatacctgaagaactagggaatcctgtgttagcattaagttaaaatactctacatgagagttggcatggccttcttgttgtgcattgcagatagaactgctcagcccccaatagattatcctcttggtccagtgagtctgtaattgtcgaaagtaatgttctatccatatgctccagtatgtacttgtcaaaaataatgttgcagatagaataaatccgcatttttattttcc

SEQ ID NO: 23614 - DNA, 678 bp, Oryza sativa
  Clone ID: PAT_MRT4530_28677C.1
atgtccaatggtggtggcggaaaccctttgggcgctggtgacgaaaaccctaggggcaggggtggtggaaacactatgggtgctggtgacggaaaccctaggggctacggcagggaaggccctaggggctgcagaggggaaagccctaggggctacagcaacagcaagcctacaggggtggtgaagagttgggttgcggctgcggtgatgacggcgacggagggttgggttgtggcggcggcgatgatgacgatggcaacagagggttgggttttgatgtgcctcccagatgcagtaagcaacaccgtcgaggaatgtggtactcgtgaagatacgaccacttatttgaagaaggcgaatattttgttctggatacacaagatgggtacaacgacgaccagttctcctcagaccaggagcttgtgcccgagactgagttccaggattgtggggaagtggaggagaagggtggtaggattcaagactatggcgaagtggaggagaagggtggggtttcaagattgtagggaaacagaggagaatgtcggtgggattcaagattgtagggaagtggagaagggtggtgtgatcagtggcagcagcagcatggtgcactcacatcatggagggatatggcctactgcccggagatgcgggcaacagcttcgagacaagtga

SEQ ID NO: 23615 - DNA, 391 bp, Oryza sativa
  Clone ID: PAT_MRT4530_28678C.1
ggcttcttctccccctcccggttcggttcggctcggttggggtccggttcgatttcggttttgccttcggttcgagggttggtgggaaagcatggcggcgccggatgctgagtaccgctgcttctgcgactgcctagcctgggccaccgacgaccgctccctcgaagccgccttgtccacctactgcgagagcctcgagtccaagatcatcaacgatcggtagacagtgaggtcgcgcgtgttcggatatcggacgatctcgagcagagcaggtcatgcacgacgccattgaggtgatgaacggcgaggagcttgacggccgaaacatcaccgtcaaacgggcccagtcgcgccgctccggaagctgaggctgcggtggctactgccagcg

SEQ ID NO: 23616 - DNA, 107 bp, Oryza sativa
  Clone ID: PAT_MRT4530_28679C.1
gtcattccattctacgtttaattgttgcgatatgaaccccacaggcgtttttcaacactgagccatggtccggagcccacttaatgtcagccaagccgcaccagaca

SEQ ID NO: 23617 - DNA, 750 bp, Oryza sativa
  Clone ID: PAT_MRT4530_2867C.1
atggccagatgtctcgagcacgcagctcactctgatactaaaaagcggcaaagcccaccgtggaccgagtccacggcggcagccggccacgtgggcgcgcacccgacgctccggatcggccggggccgatcggacggccgggggcggccgagcggcacgaccaggcaggcacgcccacaggcggcggcgaccgccgagcctagaccaccggcgacgacgccggcggcgagcggcgacggcgcgagaggcggcgagagagtggagagggaggcggttctcaccgagcgaatggggcggcgagacgaagacgaggagggcgacggcagaggtgcgactggaggcacaaaagtggctgtggctcgggttcaccgtggagcgggcggctcgggggtggaatggaggagcggcgtggtggccgggcttgccggcggagcagcgaagctagtggtggtggcggcgcggcttgaggtggacgggaacggcggcaagaggctgccgaaggcggcgaaacggcggcgagttgcggacggtgtgcgacaatgcgtggcgaggccggtggcacaagcggcgtggcgcggggacggctacggcggcggaggtggccggccggagatggcaaccggcggcggcggagggagcctcgagagtcgacggggaggccggttggcgacggatttgaagggggaaaggggcgccggcgacgtgggtgagtgggggcagtttggcgccggttttggaggggagaagtag

SEQ ID NO: 23618 - DNA, 261 bp, Oryza sativa
  Clone ID: PAT_MRT4530_28681C.1
atggtggaaactcgtcaccggcaagagatggtggtgatggtcggctgcatcttgccgatggcgctgggcggaggctcggtagccgacccgccaggggcacgagccgtgccgtgggttatggatccgtcctccggaggggcgcggccgacggttctggcggcaggaggcatcttggacaatgacagcgagtgggtggcgaggctcctggcggctgactggcggctgaactcgggcgaggcagcaggtcgacggcgaagctag

SEQ ID NO: 23619 - DNA, 320 bp, Oryza sativa
  Clone ID: PAT_MRT4530_28682C.1
ggagccacaaaattttttttaaaacatattgggggagaacatggcgtactacttttaattagggcacatattatctctgcatatgaatctaccacaactttcttttcaaaaattgagaggcacgcgtacctacttgctcctcctaaacagatggaaacaaataaccagaatgccctactgacctaggagggctatgggacgatgtgggcatatatcacatggcgaatgacctaattttggtgtgccgtctatctcttctcactcctaagctccctactcaagcaaccaattcccgtctgcacgaccatttggaaaagaca

SEQ ID NO: 23620 - DNA, 337 bp, Oryza sativa
  Clone ID: PAT_MRT4530_28683C.1
atggagatagagatcggtggagcgctgctaccctgcgtcgataatgagagagggaggaggcagagggtgaacgagatagagagatgcgagaaggatgagagactgggaggagataagattcaaccatgtgaacgtgaggaaacagagatgacttgtgtggcactcgctccgctgctctattcccccctcgcgtccgccgccgacggcgatggccacctcgccgccgcgaccacttcatcgtctcccttcagatggcggcgcaagatctcgtactgtaaccaggttgctgcagttgataattttgaaagagttgatcatttaaaccgtgcaacgagcg

SEQ ID NO: 23621 - DNA, 740 bp, Oryza sativa
  Clone ID: PAT_MRT4530_28684C.1
gctatctcctttgtgtccataatcgaaacgctttttgcgatttatcctaatcttttttctatcttctgctacaaatttggttcttttttggttgaatttggataaaatcataatctcctcttcaattttcttgtgaaatggaagtttcagtgattggaaatcctcaagcgaggatctgcagagcagaattagcttacagagagcttggatttagatttggctctgatgtaatctccggtgaatcgagaaatagggttagtttctgcaaccaaagctctaaatggaaagagatcgcgatacgttgctcttcgagatctgtcaaatgtgaagccatcgtctccgatgacgcttctccgtttctcaaatccactccaaaatctaaatcgctcgagagtgtaaaattatttggtgggcttccgttagacacagtttcagactgcaacaatgtgaatcacttgaaagctattacagctgggcttaaagctttgaagctacttggtgtagaaggtattgagttacctatcttttggggagttgttgagaaagaagctgctgggaaatatgaatggtctgggtacttggcagtagctgagattgttaagaaagtgggacttaagcttcatgcttcactttctttccatggatcgaaacaaacagagataggtcttcctgattgggtggcaaagattggggatgctgaacccagggatctattttacagatagatatggacaacagta

SEQ ID NO: 23622 - DNA, 515 bp, Oryza sativa
  Clone ID: PAT_MRT4530_28685C.1
gtggtttcttctctgggcaatgtcagttacgcatctttggttaggtatcaataagttacattgaaactgcggcaaccactatgaagagacaggacgatctcaagcactactacttcacttgcacatgtccccgttgtgttaaggtttttgatttcattgcttactattcttggatgtcctatgggaagctgacacattcttgataatgaagtgttctctagctataattttttccccaaccttacaggattctgaggaagatgcgctccttgagggatacagatgcaatgaccaaaagtgtgatggatttcttctgcctaatgcaggaaacaaaggttatacatgccagaaatgtagcacttctagagatggggaagagttacaaaagatggctagcgatgtactactattatctgacaaagtctcttccttagtttcatctggaatagataacagtgaggtaggttctatgtacaagaccattgaagagctagagcggaagctttaccatcctt

SEQ ID NO: 23623 - DNA, 488 bp, Oryza sativa
  unsure (1)..(488): unsure at all n locations
  Clone ID: PAT_MRT4530_28686C.1
cgtaattctagctccggccttccaccaggcttcgatcggcgacggcgacatggcaggcggcacgggcatcggcgcggacgagcaagagcttcctctgttccacccttccccgtgcgcctactacgtgcagagcccctccgccgcgtcgcacacgctcagccacccggcgtcggagtccacggcgatcatcctctccccgttccccgacgccgcgttcgccgccccgcgccactcccgcgtagtcgacgacgccaccgcgcacgacaacgacgtcgaccaggaaggcgtcccgcctcaccctgtcccgctactcctcctcccgcggctccaacaactccttcctcgccgccgacaagaagctgcctgccggcggcggccaccggggccggcaggtgctgtcggggcggtcaggcggcggcgtcgacgaggaggaggaggacgacgcnagggtgcgaggagcgnggcgtggaggtacgtgaagctggacc

SEQ ID NO: 23624 - DNA, 485 bp, Oryza sativa
  Clone ID: PAT_MRT4530_28687C.1
tcgtccacgcgtacggtcgggactatgtttggcagagtaactggaaccatacacgccttgctgaggtaaaaggaggacagaactgggtgctacgagaagggtaacgctatgatggtttcctggaggcggaactcactacaagcatggtagcatgagagtatatagagaggctagggaatatgacaacacacagtactgatgatctccgctcggcaggagtggtccaagctctggatgttggatgtggtgttgcgagcttttatgcttaccttcttccgctagacattcatactatgtcattggctccaaaagatggccatgagagtcaaattcagcttgctctagaacgtgcgattggtgcattgatctctgagatgggcaccaagcaattaccttatcctgaaaatgcatgagaaatgctgcatatgatccgctgactgagacgactgacatgaaaatgatggaatattgctgaaagaggtaga

SEQ ID NO: 23625 - DNA, 198 bp, Oryza sativa
  Clone ID: PAT_MRT4530_28688C.1
ccaaaccgaataaacaattttcagtgaatttttataaaaacatttctcccacttctatcaaacactctaacatacaaaacaaaaacaaaaaaatttcactagcaaatctaaacaaatttttactgtgctataaaatctcgaagacaaacacatatattttttctatataacaaaacaaaaaattgacagttacaatta

SEQ ID NO: 23626 - DNA, 328 bp, Oryza sativa
  unsure (1)..(328): unsure at all n locations
  Clone ID: PAT_MRT4530_28689C.1
aatttncccagaaaccctaaccctaaccccacccggcgccatggatctcctccagtcgtcctacacgccggacgacgaggacgacgacgagcagcagcccctntcctngncggacgnctngccgntccgcctccccgncaagtnggccggccccgncgtcgacgacacggcgctcgcgatatccgccgccgncgtgnccacntcncgccngctcganccttccttgcaactggtnncatttaaccccaacgccgaccagatatgngcgcnngtcctcgggtcccagcancacgacgacgnnatttacttcggcttcggcaaccggaaa

SEQ ID NO: 23627 - DNA, 1990 bp, Oryza sativa
  Clone ID: PAT_MRT4530_2868C.1
cattgcagggcaccagactgagaagtggcgagaagtccgtggggttcgtccctcctctctctcccgctgacaggtggggcccacctgttagggtcgtcttccacctcccgccgccagccgcgccctagctgcgcgcaagccgccgccccttccagattcggtcgcatcttttccgattcgatcaaattgatagaggggaaatgatccctttgatctcctctatcttttcccctatagaaactttagctaatttcgtttcgaaatcgtcggattcgacctcgattcggatttgatttcttccctccaaccctaaaccttccattgctgctgttggtcgctgtgggcctagccgccgcctcttagccactataaaaggatccccaggacgtcctctgttcgccgccaccttcgccctagcccgccgtcgtttgtagcgccgcttccgcgtcagcccgtgcgccgccgtcgtcgccgcaagtgcagtcgtgcggcaccgccgctcttgtcatcatcgtcgctcgggaaggtcgccatcgggttcgccaagtttccgccaaaggtcaccggagcaccgccgtcgccgtcgacccgaacgtcttcgccgcctcgacctcgccgccgtcgctgtcggttgtcgtccgtcatcgtcagagccctcggtgagttcgccgcgtcgccctctacccgtaggtgttgtccgtttgcgccgccgcgccgtcgttcgccggcgagcatgaggtgccgagccgccgtcggcaatgacgtcatcatcgacgtcagcaccacgtcagccgtagacccgtggtagatcggttagatcttggccgttcgttttgtttagattagatctcagccgttcgttccgtagaccgcttctgtgcacccggtccaccgtgaacccgagccccgctgacgcaataaatcctttttccagactgagaagtggcggagataagcccacgggggtcgctggggagtccatgcctctggttttgagggggtgattatgatccaggaaaggtgcactgtggtgggttgtgttatgcgagggttccgggcgtgacagcgcgggcggctgacggtcgggcccacgcggcagccactcggtgcgcccggaggcggccacgccggcgcaacggcgggaggcggcgtgcccgcgcccctatggtcgccggcggcggccataggcacggcggagcggcggccgaaagaggggagggaaaggggaaacgaagcggcggtccacggctcaccccgggtcgacggcgacgacggaaacggcaaccggagcggaggaaggcggcggcgcggctcgggtggacggggtcgacggtgctccggcggtcgcgaccgaaacgaagaggtggacgaggtcggcgaggatgcggcgaacccgaaggagccggcgccgaggtggaaggtggtccgggtcgacgacggcggcggacccgagctcggcggtgacggtggaaagagagagcgacggcgcgagctcgattccggtggggagagaggcgggtgagtggcggaaacggtggtggggagctcggggagggtttatatagggttgggagtgaaagagggcggccggaagagggggaacgggcgcgggagacccggccgccattaatggcgtcggcgacgttaggggaggggtttccaaacgaatccgggggagagagagagaaaaatggggggaaaggggagggaatcccggggaataattccccccactttattgcgcgcggggacggcggaaggcggcgggattcgcggcggcggcggcgctagggcgcgggggaggcggcgggaacggcgggagaaaggggatgacgggtgggccccacccgtcagcgagggtggcgggcgggcccgcccgtcagcggcgcgcgcgcggggaggaggccgaatgggccgcggggagaggagagggagggggaaggagatgggccgagccggcccaagggggagaggggcggaaaggactttt

SEQ ID NO: 23628 - DNA, 460 bp, Oryza sativa
  Clone ID: PAT_MRT4530_28690C.1
ccgactcctagctctaccctatccctctgcgtacgcactagcaacagcatggcctgtgcgcacgactttcttgcgttgtgcggcgctatgcactgtcacaatgacgcgctgacggacatcgcgacccccatcaacgacttgccgatcatcgcgtactgctcccgcgacaagtcggtgttggtgtgggacctcaccaatcttttccagaacgtcggagagggcaccggaacctgcgagcaccgcgtgcacttcctccgcctcatcggccacttccaattggctcaatacgtggttgtcagttgcgactggacaccaccggctctctggttcctgagacggggagctccatctctagcacctcttcaccgtgcacagcacccgtgcgtttagggcgcaagatgaagaccagatctccgtagggtcttccgtggagacccgatgcatcatctgcgtctaccac

SEQ ID NO: 23629 - DNA, 852 bp, Oryza sativa
  Clone ID: PAT_MRT4530_28691C.1
atggccgccgcccctgccgccgcgtcaccacgccggccggtcgcgccgtcgcctcctccagcaccgcagccgcctcctcttcgccggcctaccctccgtttcccgcggagacctccggaagtgcctccccgccggcaaccgtggtgttgccgccacgatttcgcctccggccgcctctgccgcgtccccggtgcgccggccgacgtcgccaccacctctcccggcaccggagtgccgtcctctctcccggccaggccacggtgtcgcccgaatttcgccggaacgccgtcatctccgcgccggcctctccttcctcctcgtcggctcgtcgccccgctgcaccaccaccttcaccaacatcgcagcggcgtgttccacgccgtcccctcctccgctcagccgctgctgcctgccatcatcgtttcatcgtcgtctccgatcgttctcgtcgtcgacgtcccgtcggtcgcccggctcgtcgtctcgcggcgccgcctccgtcatcgtcatcgctgcggcgtgttccacgccgtcctcgtccccgtgcagccgctgccggctgtcctcgtcgcctcctcgccggtcccggtcgtcgtcgttgccgtcgtcctctcgtcgttcccggtcgtcgtgacccctgtcctcttcttcgtcctcgcctccgcgtcgtcaagccccgtgccggccgcgtctcgccttcgttcaaggatcgccgccgaagtcgttccctcgccgtccgtctccgccgcgcccctttcgtcgttccggaggttcccgaagcgtggttcgcggtcgtcgccgaaggttcggaaggccgttctctctgagcaaggcaagtcacatcatccttga

SEQ ID NO: 23630 - DNA, 900 bp, Oryza sativa
  Clone ID: PAT_MRT4530_28692C.1
tctctccatgttcccatccctactccaacagcggcactgccgtgctgtggtgtcaacgacgaggccaccccgtcatcggtttcactttccctggtgccgctgcgcaaggtcgccctagtgaccggcatcacaaggtaggacgggagctacctaatggagcttctgttccggaagggctacgaggtgcgcgcgacggctctaccacatctaacatgacccacacacacaatcatcgatgccacgctagtagatgcacctccactacgccgacatctctaactcctcgtcgctccgttgcgtgcttgatcacatcctcctcgacgaggtctacaacctcaccgcgcagtgccatgtcgcgttgtccttcgaggtgcccgactacaccgccgacgtcacagccacgagcgcgctctgcctcctcgaggccgtccacctcgcccacaagcccattcgctactaccaggcggtcccctccgagatgttcggctccacgccaccactacaaagtgagtcctcccccttccacccatggtcccctacaccgtcgccaattcgccgccctctagtacgccatcaactaccacgaggcttacagcatgtttgcctggcagcagcgtactcttcaaccatgagtcctcacgccatggcgagaacttcagactaacattaccggcgccgtcggccgcatcaaggttggactcaccaaggtcttcctcagcaatctctctgtcaccagggacttgggcttcttcggggactaagtcaaagcaatgtggcatatgttgtagcaggaccagcacagcgactacgtcgtagccaccaaggagtcccacaccgtcaaggaattcctcttggccatcttccccactatttcgctgatttgggccgagcacaagccag

SEQ ID NO: 23631 - DNA, 990 bp, Oryza sativa
  Clone ID: PAT_MRT4530_28693C.1
atggtggcagagtatctgatagtgaagggtcagatcaagtctcctcggatgatgaagaagagtctccccgacatctcggcgaggaagagatggaatcaaaggcatgcacccgttgtggagaaaattggacacattgctagcagccgcctctccctcctcgccggagcgccgtccggtcgcgccgtcgcctcctccagcgtcgcagccgcctcctcttcgccggcctaccctctgttttccgcggagacctccggaagtgcctccccgctggcaaccgtggtgttgccgccacgattccgcctccgcccgcctctgccgcgtcccctgtgcgccggccgacgtcgccaccacctctcccggcaccggagtgccgtcctctttcccggccaggccacggcgtcgcccgaatttctccggaacgccgtcgcccgcgccggcctctccttcctcctcgtcgacgtctcctccggcagcccccttccgccgcgcccgtgcatcagccggcgctgccgtccctccctcggcacggtgacccgcgacgtcgtcctcggcatcgcttccccttcggccgaacaccgccggtatccgtcgtcgtcttcaccgttcatcctcgcccggttcgtcgtctcgcggcgccgcctccatcgtgggcatcgctgcggcatgttccacgccgtcctcgcctccgtgcagccgctgccggctgccctcgtcgtctcctcgccggtcccggtcgtcgtcgtcgtcgtcctcccgtcgttcccggtcgctgtagccgtcgtcgtcttcgtcctcgcctccgcgtcgtcaagcctcgtgccggccgtgtctcgccttcgttcaaggatcgccgccgaagtcgttccctcgccgtccgtctccgccgcgcccctttcgtcgttccggaggttcccgaagcgtggttcgtggtcgtcgccgaaggttcggaaggccgttctcccggagcaaggcaagtcacatcatccttga

SEQ ID NO: 23632 - DNA, 468 bp, Oryza sativa
  Clone ID: PAT_MRT4530_28694C.1
gtgggctcagaatcgggtgatgacaaggaaaaagggaagggtgagatgaagcctgaggaagctcaagaagtgtggaaggagatgcttaagcagttcaaggatgaggcgcagcgaatgcacggcctgacattgcaggcgtatggtgtctactcccagagggcaagggaggtgctattagaggcctcagagaagctgaagatccacgcagacaaagcacagaaggatctcagcgtgattgccacagaggttggaggtttcctgaacttcatgcttactgggaggacatctgcaattcgttttggtattattcttggctttgcgctgttagctatgggcatctcaagtttgagatctcaaagagcaggtggccgtcgtcctcgtcttctgctgaaaggacaagctgcatgtgtttttcccctgtacgtcaacgtcaacacattcaactcttcattacgaattctcccatat

SEQ ID NO: 23633 - DNA, 2106 bp, Oryza sativa
  unsure (1)..(2106): unsure at all n locations
  Clone ID: PAT_MRT4530_28695C.1
cggatgtcgagccttcgtgatcagtagcaccaccaccnnccccaagagtcagtagtctgtgcaaaacgcacaaatttcacgggaactatcgaatttcccgcgttttgcgcgtatcgcacgaccctcagtagttcgtcaagataatcgcacgcanctattttaattcaggaagggatttagagtggcacaagtatattacgtgagagttaatatgggagaattcgtaatgaagagttgaatgtgttgacgttgacgtacacggggaaaaacacatgctaagaagaaaaatggcaggtgaaaggggcacagaaatggccaagctgagcaacagagcaggtaataatagagaattgctactcctactacttgcaaagcatatatgtccagaagagcagccaaagagaacacaagaccgtcagcttgacgcataactgacgcacttctgatggtaacaaaaaaccggccaccatggtccccatgtgaacgaatggattcattagttgtaataatggtaatagtagtgacactcaattgcaatatcatgctgggtacagggttaaggatcagatggttagtttaaccaccaatagcaacaagctgaaacgaatactggttttgctggatttcactggatgttgttgaatatcacaagcttagagcacaacaacgttgcatcaaataaacagaagaaacagaaaacagctaggtacatctatgacctttggaggtcaatttcttattgttgttcgaggcgaatgtgtatattacatggggagaacaaaggagcgcaactgcgaggacgagtatgcatgcaagtcgtcttctgaacccaaccgtcaaagtccacagccacttggggactaaagacaaactagggttgcttgagtttgatggggatggaaacggaaagcaaatgggccagtcaatcttcaaacccaagttcctgtgatcatctgattcatccagggtgatgtgtaaccattagtaatctaaccagcttgtcctttcagcagaagacgaggacgacggccacctgctctttgagatctcaaacttgagatgcccatagctaacagcgcaaagccaagaataataccaaaacgaattgcagatgtcctcccagtaagcatgaagttcaggaaacctcctacggtaagaaaggtaccaaagggaatgcccacgtgataatcctcatactctgatatcttcaacttgccaagagaattgaatgtctcgataatatccttaattgagtctggcgagttttgagccgcgagttttagatactcctgtccctcctcaccaacctctgtggcaatcacgctgagatccttctgtgctttgtctgcgtggatcttcagcttctctgaggcctctaatagcacctcccttgccctctgggagtagacaccatacgcctgcaatgtcaggccgtgcattcgctgcgcctcatccttgaactgcttaagcatctccttccacacttcttgagcttcctcaggcttcatctcacccttccctttttccttgtcatcacccgattctgagcccacagattcctctccggcgaaggtggcgatgacgcggcgagtccgcggggcgccccatccggcggcgaggcgtgaccccgccgagagcgccctgagcggggcgtcgaggcaacggcggcggcgggtggagggggaggaagcggtggcgcacgccaggcgcaggaatggggaggaggaggcgagcgggtggaaggcccccacgcgggcggccggcgcgggggaggcggaggctgccgcggcgtggacgagcgaggcggccatgttgtgagttcaacgacaattggttttatcatttatgcgtaacatcatgtaactagttcagttatcatttatcaaagcacataggcagtgtttatagacctatttgtatactgtacatgcatgggaaaatagcatgaaagtanaactgtcaagtgttaccattagttctctgcagtactctcggagcttggacctttgtgaccaccagtcataatacgatgagtgtaaaaggctgtcaccgccccactgcagaacaattcaaaactagtttaaaaaaataaaggttttcatacat

SEQ ID NO: 23634 - DNA, 660 bp, Oryza sativa
  Clone ID: PAT_MRT4530_28696C.1
ctcccgcggacgcgtgggctccgctccttgtgccatctcgcggcggaacaggggaggggaggggcggcgatctccatccggcgagcggcgagcggcgagcagcgagcagagcagagcaggggaggagatcctgattcatgttcttcatttctgtgctggttagtatttccaatcaccaacgctttcttcaagaatggagttacaggaggatgaatccagtgacgaagtgttcatgaagcagatgctaaggaatctgatgtttcatgaacttaaccgagcaaattatagaaaccagttaccaaatgtttacagcatttgtacagttcaaattgagcaactgttgtagttggagttttatgtcagtctgctttcacatttgaaaatttacagttacacaacagggtagtcaataaacatgaaagtaaaaaaagaaaatcaagcttatattttttatgacattttcttccatcggtgatatctctattctattttatttggtaataataatttatgaacaactgaattcatctaggagtaatggagtatgaggtaaagtgcagtagtgctgtcattggcattctggatgcagccacagtatatgccaaaaaaaaaaaaaaaaaaaaataaaaaaaaaaaaaaaaaaaaaaataaaaaattaag

SEQ ID NO: 23635 - DNA, 780 bp, Oryza sativa
  Clone ID: PAT_MRT4530_28697C.1
atcacattctttgtggaggctagaaattcccacattaatcggaaaaaaagaaaaaaaaagaaaatgagagtccaagtagaagtacaatctaagaatagctatctaaaaatagctgaaattcggaattaaaaataagcaatattgaaagaagtttctatataagaacctaatacgagattaattaaaatttgaaataaaaataaaataaaatctaaaattagaaaagaaaagaagagaaaaaaaagcgagaaaaaaaaaataaaaaaggagaaaataaaacttctatcgtaaagaaaacgtccgactcctccggtggaaaaaaaaaaggagagacgacggaaaaaaaatcgatacaaaaaataaaaaaaggagagaaaaatttataccgtaaaaaaaagtccgactctgactcctccggtggaaaaaaaaaagagagacgacggaaaaaaaatcaagaaaaaacaaagaaaggagaaaaagaaaacttctataaaaaaaaagaccgactgactcctaaaagaagtccgactcctccggtggaaaaaaaacagaaaaaaataagagaaaaagaacttctatgtaaaaaaagtccgactccataaaaaaagtccgactatctgtggagaaaaaaaaggcaagaaaaagtaaaaaaaaaaaaagagaaaaaaaaacttctaccgtataaaaaaaataaaaacgttcgattccttaaaaaaaagtacgactccctcgaaaaaggacttttttgtccgtaatcttctcttctacttctactatttt

SEQ ID NO: 23636 - DNA, 379 bp, Oryza sativa
  Clone ID: PAT_MRT4530_28698C.1
tttacaacacgtcaagatttgtgcgctgtcacccactatcgctttctgtgtcatcaacaactactcgctctgacaccaacctgatcgtgcaacgtgacgtcatcatgcagccctgtcacgtgatgttgggcctgctgctcgtgcttgtagtgcatctgtcagctgtctccacatcacctagcacttcactgagtgtcaccagtgatgccagcaagatactgacaagacttgatcagctggcaccagtggtcagtgagcgcgtctccttatcaggtgatgctggtaaccttgacattggcggtgagagtgatgacgtaagcagcgaatatgtgattgaagaggaagagaacagcaatgacgtcacttcatcacctggtga

SEQ ID NO: 23637 - DNA, 1208 bp, Oryza sativa
  Clone ID: PAT_MRT4530_28699C.1
cggatccccgggctgcaggaatcggcacgaggaccctctctgcgctgctgctgctgcttccgatggcggcgcctccgcttccccgcgcccccgtctcctcctccgccgccgccgcgtcgccggggggccgcgctctcctcctcctccgcgtcggcggaggaggttccggaagatgcgctggcgtggcggcggcggcggcaccgggttggcggcggccgttcccggctgcctccgtcgcggcgcgctcggctggtaccacgccgggagaggtcgccgtcgatcctaaggtcgaagcaatactagacagtgtgaagtgggacagtaaaggcttggctgttgctattgcccaaaatgtggatactggagccattctcatgcagggttttgccaacaaagaagcccttgcaacaactatatcaaccaggaaagctacattctatagccgttcacggtcttcattgtggacaaaaggggagacatcaatgaatttcatcaatgtgcatgacattttcttggactgtgaccgtgattctataatataccttgggaagccagatgggcctacttgccatacaggggcagagacttgttactatacttcagtctatgatgctctacaaggttcgaagcccaatcaagataggcaggttgtctcaactctgtactcacttgaagatacaattagtagacggaaggaagagatagttactgaaggaagtggcaagccatcatggacaaaaaaactaatacttgataaccggctgctttgctcaaaaataagcgaagaagctggagagctaaaccaaacactgcttgagaacgaggacgagagccgcacaatcagtgagatgggtgatttgctataccacgcgatggtgctgcttagggtcaagggcgtgaggatggaacaggtcttggaggtcctcaggaagcgattctcgcagtctggtattgaggagaaggccagtcgcaacaaatcttaggatattactcacagagtggatgggtttaccagtttgcttatgtcgtatcggcattggtgccaagtgtgtaccattgagtagtttggtcttcttaattagaccgaaggttgtgaattgtgattatgctttaattgttctccaataagacactgagcaaatacatgtctggaatttgcagtgctgttcttgctgtcgccaataaaataataaaatcagctcataagt

SEQ ID NO: 23638 - DNA, 102 bp, Oryza sativa
  Clone ID: PAT_MRT4530_2869C.1
cttgtttcttttgaaccataaagctcgacagtggagagagaagctgatcgcaacccggcgccaggagctaacgccagctctggctatcgcgacttggcagag

SEQ ID NO: 23639 - DNA, 501 bp, Oryza sativa
  Clone ID: PAT_MRT4530_286C.1
atgcaacttgggaaggtggagatgagtttcatggtgctggtggaggtgactcggggcagcatgcgcggggtcattgtggacgctgctctaggaggtggtggtgaggctaacagcactagtgaaggtgacttgggaaggtggaggcgaggccagctgctccaggagtttgaggcaagccaacagtggtggcttggggaagcacacaaggcgtcactggaggaatgtgccagtgaggctactcaggtcacctgggcggtacttgggattgtcattgttgttggcgcggcagcactccgactccacagtggcggtggtgcaacagctacgggctgtaatgtgaaatgtgaagcgtgtgaattagatcctgccattgatgcaatcatccgtgttgggctaaagagtagagcccgtcaaaggatgctcattctagacaggctccaaagagagcatgtcaaaggcaatggagaatatgagatgacctacttcatcgaccgcgactag

SEQ ID NO: 23640 - DNA, 588 bp, Oryza sativa
  Clone ID: PAT_MRT4530_28700C.1
atgtccatgttcctccgggcccttgctcccctcctcacccggaggttctccgcacgcagcgcgcaggcgcagcgatcggcggcggcggcgacggcggggagtagtccagcaccacgctctcccgtttcccccagatctcagatcaaaattttcttcactcgcgcgcagcggctcacgctcccgtccatctccgcgcagagggatctcggcgtcggccgtggcgcagtgaaaggtgttcttgccttgacgagttcgttggctggattgctgctcggattcctctatttcaagcaagatagagatgactcagcagccggggaggagaccaggaaggaggaggaggaggtgactgttaattggagggacgtgatcgagccatccgtcatggcaaggttcaccaggaaagatggcacatttgcctatcttgactacacggattacctcaactcccaaatgaaccatggggggaaaccactctatgacaagaagtgttccgacaaggaggaggccgtcgtcgatgatgccgccgaggaggacaatgtggtggatgaggtgaccatgaaggcaaaatttgaggactggggatga

SEQ ID NO: 23641 - DNA, 437 bp, Oryza sativa
  Clone ID: PAT_MRT4530_28701C.1
tttgtgtttttttattttctggttttttttttttttttttgtttttatgattttttttgtttttttttttctgtttttgtttacaggaaacaaaaggacagctgggggtaccttggacaaagaaacaaatgtgtttatgcctggcgaaaccgacttttttgggtaacaggggttgcaaaagggcctcaaaacaaaaggggtttatcacggggacaaaatttgttttgggggggggggcacctggggggaaaaagggggaattggaaaaatgggggtggcccatgggccacaggggatctcggataactggttggggggggcaaaaggccggggggaaggggggaccggtttaacccaggggaggccccccggggaaaacgggagtccggtttaaaaaacttaaatttctgtttaagccaccaagggggggggccaaa

SEQ ID NO: 23642 - DNA, 179 bp, Oryza sativa
  Clone ID: PAT_MRT4530_28702C.1
ccaaaaaaaataactgaattagaatatttttgtacacttaaaataattttaagatccaaatttctatttatgcatgtagattttaaattgaaaattacgatccagattaagataaatctatacagaataacattttttactttttacctgaatttgattgtttcaggatgaaagctttt

SEQ ID NO: 23643 - DNA, 996 bp, Oryza sativa
  Clone ID: PAT_MRT4530_28703C.1
atggagctctcaaaaccccaaagcaaatcaaagctgcaaccgctcacgaatcatctcctctcagtgtttacttcggcgaatttgaattcttcgtcggattctcctctgcctcgatcgaagtatctgaaccatctttcaagtttaagtcgttttcctttgcagattgatcagtcaactgtagccatcaaagaaaatttcggcaagtttagtgaggttctagagcctgggtgccacttcttaccttggtgcataggacagcaaattgctggttacctctcactgcgtgtgaagcagctggatgtccgctgcgaaacaaagacaaaggacaatgtctttgtcactgttgttgcatctgtgcaataccgtgctcttgctgacaaggcatctgatgccttctacaaactaagcaacaccagggaacaaatccagtcgtatgtctttgatgtcattagagctactgttccaaagctgaacttggatgatgcatttgagcagaagaatgatattgcaaaggctgttgaagatgagcttgaaaaggcaatgtctgcatatgggtatgagattgtgcaaactctgatcattgatattgagcctgatgtccatgtcaagagagcaatgaatgagatcaacgcaggcaaattgagggtggcagccaatgagaaagccgaagccgagaagatactacagatcaagaaagctgaaggagaggcagagtccaagtacctggctggtgtcggtatcgcgaggcagcgtcaggccatagtggatgggctgagagacagcgtgctcgccttctcggagaatgtccctggaaccactgcaaaggatatcatggacatggttcttgttacccagtactttgacaccatgaaggagattggggcctcctccaagtccacctcagtgttcatcccccatggccccggagcagtcaaggatgtcgcggcgcagataagagatggcctcctccaggccaatgccgaacgcaatgactga

SEQ ID NO: 23644 - DNA, 379 bp, Oryza sativa
  Clone ID: PAT_MRT4530_28704C.1
cccacaaaaagggttttttttagaggcaacaaactaattccacaaccccttatggaagcctcccatacgggataaaatattatcagcacccatcccgttttttcccctttatacaccttaccaaatggggtcaactggcaggggtaatttttcacataataagggttaaatctctaacccaaaaattccccaaatcccagagtttccaagggtggctttttgctttaacaaataaggggggttaaccgatggtatttttacgggttaatggggcccttttgaggccccgccattttttttccaaaaggggggccccaatttggaaaggcacggcacccgggtttccacagacccgttggtttttttacccttgcctgaa

SEQ ID NO: 23645 - DNA, 1008 bp, Oryza sativa
  Clone ID: PAT_MRT4530_28705C.1
atggacctcggcaaatcatcctccaccagtgcgtcgctgaagaagcttcaggaagacggcgcccatcccggtcgcggaaccatggaaagggaagcaggaggtactaatccccagcccgtcttaggtcgcatggttgtgaccgaagactatattctctgcggttttctccctccgccttccgaatttcttctcttggtttggaacttctacggtctttctcttctccatttgaaccccaattctatcgcctttcttagcatcttttctcatctttgtgaggcctacattggggtagagccctttcttgatctctttcgcttctactacgagctgcgttggatggagtccaacatgtctggttgcgtcgggttccaacttcgggatggcctgaagtcgcgttatatccccttccagtgcccttcttctcgcagcaaatggcggactaggtggttctaccttcagatcaaagattcgaaccctgtcttcgttgttcccgaggaacaaccggacaagatttcgtcttggaccgcaaagccccctttgacccgctctctccagtcgtttatcgacattatcgacgatctccgagtacgaggcttgtcggggtatgaagtcgctgcagacttcgttggcctgaacagtgaagccgtggaacatcgtgttggccaggtgatgatcagtggtccgacaacggcgagtaccatccccgttcccctttgtgagaaaagggcggccgaacgtgatgctgccatcaatgctcttcctctgactgacatcatcgggccgctcgcggaacatcaggtggcggtgtctctgaaagagaaggtcgccaaggaggcgtctgatgctgctgctgctactacaagtggtggcaatgttcggacaaaggggaggaagttctcctctggcggcacggacgaaggctatgcaagacgagtccggagggacctccggcgcatcgcccgctgcggcctcgacggatgtcgtgctcgtacccgggagccgtga

SEQ ID NO: 23646 - DNA, 2295 bp, Oryza sativa
  Clone ID: PAT_MRT4530_28706C.1
atggacctcggcaaatcagcttccaccagtgcaacgttgaagaaactccaggaggatggcgctcttcctagccgtggaaccatggagagggaagcaggaggtactaatcctcagcccatcttgggtcgcatggttgcgatcgaagattatgttctctgcggttttctccctccaccttccgaatttcttctcctggttttgaatttctatggcatctctcgtctccatttgaaccccaattccatcgccttccttagcatctttgtgcatctttgtgaggcctacatcggggtagagcctttccttgatctttttcgcttttactacgaactgcgttggatggaatccaacagggtatctggttgcgtcgggttccgacttcgggatggcctgaagtcacgttacattcccttccagtggccttcttctcgcagcaagtggaggaatatgtggttttatcttgagatcaaggactcgaaccctgtgttcgtggttcccgaagatcaaccggacaagattccgtcttggaccgcaaagccccccttgaccccctctcttcagtcgtttatcgacatcatcgacgatctccaagaacggggtttgttgggatatgaagtcgttgcagacttcgttggtctgagcggcgaaaccgtggagcgccgcatcggccaagtgatgatcaatggcccgaccacaacgagtgacatccctgtgcccctttgtgaaaagggggcggcggaacgtgatgaagccatcaacgtggcgtcatctctgaaagtgaaggtcgtcaaggaggcgtctgattctgccaccactagcggtggcaatgttccgacaaagccgaggaaattctcgtctgtaatcagacaacgtcgcaaggcgtcgaccccctcggcctcggacgcgtctcccccacctccacgacgacaacgcattgtgacaatcggcgagaaggaggcgcgggcaaaggctgcgcgagccaagtccggaggagcttccagtgcgtcacccgtcgtggcctcgacggatgtcgtgcccgcagctgggagccgggaggcgacgcctagtggcccagtcagcaaccccgcggcaggtcgtgatctgccagctacagtcctcacctgggaggagctccaagtcgagatggggcgcctcctcgaagccggtgctcgcggcatcggccgcgagattgcggaggcgaggtcggaagcggcgacggcgaatgcgcgtgctgacagactagtgtgcgagttggctaaagcccgtgaagacctcacgaagatgagggagttggcggccggcaatgagcgacaacggaaggggctcgaggaccgaatgtcggaactcgggaacaacctatctgagatccggggctcgttgagggtcacctacactggccttcaccagctcaccggggaatgcggcgtcacgtccacaatcccagcgaatcccgatgagttttcgctgacctctctcgcggaactggcgacggcgatgggggaaatcccctccaagcatgcggccaggattgcggaggagacgtcaaacggaatctacaccggggcgtgtcatgtcctcgcgtgtgtaaggctgtcgcgtcctgaactcgatctgcgcgagatcttggaccagggggcggccagcgacacgcgtaaggagcgcgggcagcccgagtcactggcagtaattccggtactcgagttagaaccatacgtctcgcctgaccatgtggatcaaccccttgatatagagggaaggatggcgacgactgcctcagatctcgagggtgcccttgctagccaagatcgtcgtatccaatactggaagacgaagtttgaagtggcggagctcgagagaaccatgctggccgtgaagaaagagcaggttgtggaaacgctccgaggccgtgaggtatggtttaactcgtacttgaagagttgttgcacatccatggccagggtatgcagggagcttcgagtagtccgcggagatcccgaggagtcggcggccgggtacatctcgtggcttaatggggcctgtgcccagctcgatggaatcagcaagcgtatcgacgaggccttgaagcaggagtgtcgtcgatcgagccgatatgccggggggcacgtgttggcttgcctacgagatcatcgcccgcacctagaccttgaatatcttcgtgagggttttgctcgttctcggaggactccggcagagatagaccatcttgcaaggtcaatgtcgccgttggccgagaagatcttccagtctatggactggtgttggccctcttggtag

SEQ ID NO: 23647 - DNA, 1704 bp, Oryza sativa
  Clone ID: PAT_MRT4530_28707C.1
atggaaagggaagcaggaggtactaatccccagcctgtcttaggtcgcatggttgtgatcgaagactacattctctgtgattttatccctccgccttccgaatttcttctcttggttctgaacttctacggtctttctctgctccacctgaaccccaattccatcgcctttcttagcatcttttctcatctctgtgaggcctacattggggtagagccctttcttgatctctttcgcttttactatgagctgcgttggatggagcccaacagggtgtctggatgcgtcgggttccgacttcgggatggcctgaagtcgcgttatatccccttccagtgcccttcttctcgcagcaaatggcggacgaggtggttctaccttcagatcaaagattcggaccctgtcttcattgttcctacggaacaaccggacaaaatcccgtcttggactgcaaagccccctttgactccttctctccaatcgttcatcgacattgtcgatgatctccgagtacgaggcttgtcgagcgaaaccgtgggacgtcgtgtcggccaggtgatgatcagcagcccgacaacagcgagtaacatccccgttcccctttgtgaaaagcgggcggctgaacgtgatgctgccatcaatgctcttcctctgactaacatcatcgggccgctcgcggaccatcaggtggcggcgtcactgaaagagaaggtcgccaaggaggcgtctgatgctgccgctgctaccacaagtggtggcaatgttctgagaaaggggaggaagttctctgcctcggacgcgtctcccctgcctccacggcgacaacgtcttgtgacagttggcgagaaggcggcgcgggcgaaggcggtgcaagacgagtccggagggacttccggcgcgtctcccgctgcagcctcgacggatgtcgtgcttgcgcctgggagccgcgaggtgacaccaagcggcccagtcagcgatcccgcagctggtcgtggtccactggctgccgtcctcacctgggaggatctccaggtcgaaatggggcgcctcctcgaggctagtgctcgcggcattggccgtgatggaagaagtcgagatgttgatgacgaggatgtccagcaacgcgggcagcccgagtttgaaccacatgcgtcgcccgacaatgtagaccagacccttgctacggggccagagatggtgacgacttccttagatctcgagagtgctcttggtggccaagatcgtcgtatccaatattggaagacaaaatttgaagtagcggatcttgagagaaccatgcttgcagtgaagaaagagcaggctgtggaaacgctccgaggtggtgaggtgtggttcaactcgtacttgaagagttgctgcacatccatggccagggtttgtagagaacttcgagtaccccatggagatcccgaggagtcagcagctggatacatctcatggctgaacggagcctgtgctcaacttgatggcgtcggcaagcgtatcgacgaggccttgaagcaggagtgtcatcgatcgagccgatatgccggagggcacgtgttggcttgcctacgagatctccgtgagggctttgctcgttctcggaggactccggcggagatagaccacctggcgaggtcgatggcgccgttcgcggagaagatcttccagtctatggactggcgttggccttcttggtag

SEQ ID NO: 23648 - DNA, 1995 bp, Oryza sativa
  Clone ID: PAT_MRT4530_28708C.1
tcagcaatggacctcggcaaatcggcttccaccagtgcaatgttgaagaagctccgggaggatggcgctcttcctggccgtggaaccattgagagggaagcaggaggtactaatcctcagcccatcttgggtcgcatggttgcgatcgaagattatgttctctgcggttttctccctccaccttccgaatttcttctcctggttttgaatttctatggtctttctcttctccatttgaaccccaattccatcgccttccttagcatctttgtgcatctttgcgaggcctacatcggggtagagcctttccttgatctttttcgcttttactacgaactgcgttggatggaatccaatagggtatctggttgcgtcgggttccgacttcgggatggcctgaagtcgcgttacattcccttccagtgcccttcttctcgcagcaagtggaggaataggtggttttatcttgagatcaaggactcgaaccctgtcttcgtggttcccgaagatcaaccgaacaagattccgtcttggaccgcaaagccccccttgaccccctctcttcagtcgtttatcgacatcatcgacgatctccgagtacggggtttgtcgggatatgaagtcgttgcagacttcgttggtctgagcgacgaaaccgtggagtgccgcgtcggccaagtgatgatcagtggcccgaccacggcgagtgacatccctgtgcccctttgtgaaaagggggcggcggaacgtgatgaagccatcaatgcccttcctttgactgatatcatcggaccgctcgcggaccatcaggtggcgtcatctctgaaagtgaaggtcgtcaaggaggtgtctgatgctgccaccactagcggtggcaatgttccgacaaagccaaggaaattctcgtatgaggagctccaagtcgagatgggacgcctcctcgaagccggtgctcgcggcatcggccgcgagattgcggaggcaaggtcggaagcggcgacggcgaacgcgcgtgctgacagactggtgcgcgagttggctgaagcccgtgaagacctcacgaagatgagggagttggcggccggcaacgagcgacaacggaaggggctcgaggaccgaatgtcggaactcgggaacaacctatctgagatccggggctcgttgagggtcatctacactggccttcaccagctcgccagggaatacggtgtcacgtccacgatcccagcgaatcccgatgagttttcgttgacctcctctctcgcgaaactggcgacggcgatgggggaaatcccctccaagcatgcggccaggattgcggaggagacgtcaaacggaatctacaccggggcgtgtcatgtcctcacgtgtcgcgggcagcccgagtcactggcagtaattctggtactcgagtttgaaccacacgtctcgcctgaccatgtggatcaaccccttgatatagagggaaggatggcgacgacttcctcagatctcgagggtgcccttgctagccaagatcgtcgtatccaatattggaagacgaagtttgaagtggcggagctcgagagaaccatgctggccgtgaagaaagagcaggctgtggaaacgctccgaggccgtgaggtatggtttaactcgtacttgaagagttgctacacatccatggccagagtatgcagggagcttcgagtagtctgcggagatcccgaggagtcggcggccgggtacatctcgtggcttaatggggcctgtgcccaactcgatggaatcagcaagcgtatcgacgaggccttaaagcaggagtgtcctcgatcgagccgatatgccagggggcacgtgttggcttgcctacgagaccatcgcccgcacttggacctcgaatatcttcgtgagggctttgctcgttctcggaggactccgacagagatagaccatctggcaaggtcaatgtcgctgttggccgagaaaatcttccagtctatggactggtgttga

SEQ ID NO: 23649 - DNA, 2778 bp, Oryza sativa
  Clone ID: PAT_MRT4530_28709C.1
atgaatcgggaggacggcgccaatgcccggaatatgcagaggttggcgtcgtggacaaaatatgggagccttctccccaagctggttgaggtactcaaggaggagtacgacttgcacaaaggcgtgaggaagaagatcaagcatctctcacaggagctggagagcatgaatgctgtcctcctcaaggtcggtgaggtgcctccagaccagctcgacgagctggtcaagctctgggcaggggatgtcagggagctgtcctacgacatggaggacgtcgtcgacgctttcttggtgcacatcgatggtcctgagcctcttgacacacacatgctcaggcgcttccggaagaagatggctaatttcttcaacaagtgcaagcatcaccataagatcgctggagctatccaagacgtgaacaagaaagtcgaggaggtggctgcaaggcgtgacaggtacatggtggacaacattatcgccaaggttacaggtcctgttaccatcgatcctcgccttcaggcgctatacaaaaagacgacagagcttgttggcattgaaaagcagagtgaaaagctcgtaaagatattatcccttggggatgatgttcatgcctccgacgagaaaatgaagattgtctctattgttggatttggaggactcggcaaaaccactctttccaaagcagtatatgacaaacataaactggcatttgactgtggggcttttgttccggttggtcgggatcctgacatgaagaaagtcttgagggatattcttattgattttgactacatgaatccaaatgtgatgatattggatgaaaggcagctcatcaacgaactacggaaactcatccagaacaagagcgatgaccaacaaaaacaacttatggtgggtagcaatgctcgcaggttggctgtgcacggtaggagtgttgaagagcacaaccaccctcagctggttaatgtgggtttggagaaagtgagtgttactggggaagcttgtggaaaacatagattagagcatgtagggaatttacgccacctgagatatctggggatttggaatacacgtattgatgagttccccaaggaagtaggagatctcaagtttctacaaacgctgaatttgtcaggtactggaatacaacagctcccggaggctgtgggccttttgaaacaactgttgtgcctacgtatcaatgacagtatagcagttccagctggtttgatcgggaatcttacttcattgcaagagctgaagatatggccggttgatgatgtctcaacaaggcagtttgtgaaggagctgggcaagctgagggagctaaggattctccgttatgctggggacccgacccaacaagcgagcggcggcgtcgccttcgcttccaactccggcggccggggcaacgacggcggcggaaacagccggggcatcgggaggaggctgcggagtctggaagctgaaaacaagatggatgagcttctacgggccaacgttttatctgaggtcttcctgttaactgcacttctgcttggagcacttttgagttatggtgaacctgctgttcttgttcttggagagaatcaacaaactttgtcctttaaatccaagatttccattactgactgttcgattgacaaggttgagactgttgctgtcgaggagcacttggataaaacaactaccagtaatgaagatacccaccgtgaaggaaaaggtatcacatcagtggaaactgatactgttccttgtgtggcgccttcaagttttgcctacagtggtgtaactgtggaaactgaagacgttggggagaacagcaagaagaatgatgagctgcaagaacttggaagcatcaatcctgaaagtgataacaataaagtacaatatcaatatcagttaggtgagtttatgagttcatgttgggaacctgttatgagacaggagccacaggatgcttgttctgattctgaatctgatcttactgagagttctcctgatgcatcaatgactgacattattccaatgcttgaagagttgcacccattaatagacttgcaaactggccacccttcattggtctccagagacaacttgaatacttcttcggatgatgatgaagatgatcttgaggaggaggatgctagcacagatgaaaatcaattggaagggaaaatagatgattttgctaactggaaggatgttattgatctaaattacttggatatggacaataatagcaagctggagggtatgatggatctgcaaagagcaaagaacattctgaaatttgaacttgacaggaggttaatggacttgcaagcagctgatgcagtacagaaaatggaggaggcatcacgcttccgtgtgcaggttccctccatttccactggaaggcagaacccatttgattcttcaaatggctcagatgaaataatagagttaccacatgttcctgattcagcaccgtcttgtctccttccacggaaaaatctatttgatctttgcaactctgggaccgggacacatttcattgacgggagttcagttgaagattcggatccacaatttgcacagctcaaggatgaagcactggtatctgctacttctaacgcaacatgtcgtaatgagtcaattgaagagaaatcaagtgaagcattactggcaggaaacgaagattattcagaactgccaaatgaactgttaaaatcaggagatccacagtttgcagatagttctgagattcaaatgcaggttattgaggctacaggtcactga

SEQ ID NO: 23650 - DNA, 1016 bp, Oryza sativa
  Clone ID: PAT_MRT4530_2870C.1
cacaaaacagagtcgaattgttcaggcatctgcctcaatatgtacatggaactcagcttcctgacctcgagtcaaaattttttcatcttgatctaatgcatccttctgtctacaaggttggacttcaatttttgtctggtgttatatcaggtggcaatgcttgttgcgtagcaatgcttcttgctttcagagaggccataaaagattactctacaccttccaccaaaactctcaaccgagatcttactgctaaaatcagtagctacgtgtcatttctcatcgagtgcaagcctctttcaatcagcatgggcaatgctattaggtttttgaagaacagaattgccaagctattgcttacattgtctgagtcagaagctaaagctagcctacagtctgacattgatcggtttataaatgagaagataataattgcagaccatgtcattgttagccatgcaatagccaaagtcagagatgatgatgtattactgacatacgcatcatcctctgttgttgaaatgatttttgatcatgctaatgagcttggaaagaagtttcgtgttgttgtggtagattctcgtccgaacaacgagggacaagcactattgcacagattagttgcaaagggcatcagttgcacatatacgcacattaatgccatctcatacatcatgcatgaggtcacaagggtttttttgggtgcctcttcgatattgtcaaatggagcagtttactccagcgttgggacagcagctgtagcaatggttgctcatgcctttggagtgcctgttttagtgtgctgtgatccagatgttatttcaagagttcctgagagggaagatttgtgccaccttaaaaactgtacttataatgaaaatctacaacttctgaatcttaagtatgacactatgccttccgactatgtttctatgatcataacagaatatggaatgctcccacctactagtgtgccagtcattgtgagagagtaccgcagggagcacatatggatatag

SEQ ID NO: 23651 - DNA, 438 bp, Oryza sativa
  Clone ID: PAT_MRT4530_28710C.1
cgaagatatttctgcttccaatgcgaagaaattttggcgtggtggtgtaaagtctatcactggtccctaaacttgtaccactgtgtcatcccggtccataaactcgcaaatcgaccgtttagtcctcaaacttgttcaaccgtgtcatcccggtccctaaacttgcagatcactcgtttaagtcttctaacttattcagttgtgtcacaccggtctctaaacaggacgcccagatgatatttaaatccaagtttagagaccggggtgacacaactgaataagttggaggacctaaacgagtgatctgcaagtttaggaaccgggatgacacaattgaacgaaccaaccatgagtgcacatgccattccacaaagcaacattggcagcaatagtcaaactagacagccttattactggcatgaaatcagtgagacccct

SEQ ID NO: 23652 - DNA, 1719 bp, Oryza sativa
  Clone ID: PAT_MRT4530_28711C.1
atggatctcggcaaatcatcctccaccagtgcgtcgctgaagaagcttcaggaagacagcgcccttcccggtcgcggaaccatggaaagggaagcaggaggtctgaacagcgaagccgtggaacgtcgtgttggccaggtgatgatcagtggtccgacaacggcgagtaccatccccgttcccctttgtgagaaaggggcggccgaacgtgatgttgccatcaatgcccttcctctgactgacatcatcgggccgctcgcggaccatcaggtggcggcgtctctgaaagagaaggtcgccaaggaggcgtctgatgctgctgctgctactacaagtggtggcaatgttccgacaaaggggaggaagttctcctctgtgagcggacatcatcgcaaggcatcaaccccctcggcctcggacacatctccccggcctccacgacgacaacgccttgtgacggttggcgaaaaggcggcgcgggtgaaggctgcgcaaaacgagtccggagggacctctggcgcgtcgcccgctgcggcctcgtcgaatgtcgtgctcgcacccgggggccgcgaggtgacaccaagcggcccagtcagcgatcccgcggctggccgtggtccaccggctaccgtcctcacctgggaggagctccaggtcgagatggggcgcctcctcgaggctggtgctcgcggcatcggtcgcgagattgcggaggcgaggtcggcggcgtcgtcggcaaacgagcgggctgaccggctagcacacgagatgtcggaggctcgtgaggacctcaagaagatgagggagttggtggctggcaatgagcgacaacaccaggggctcgagcaccgcatgtcggagctcgggaacaatatgtcggaaatccgtggctcgttgcgggtcacctatactggtctgcaccagctcgccagggagtgtggcattaagtctactatcccggcgaatcccaacgagttctcgctgacatcttctcttgcggagctggcgtcggcgatggaggagatcccctccaagcatgtggccaggatcggggaggagacatcgaacgggatctacaccggggcgtgccacgtccttgcgtgtgtaaagctggcgcatcttgaactcgatctgcgcgagatcttggatcagggggcagctagcaacacgcgtaaggaggtgatggaagaagtcggtgacctgggggaatctgttctctccctttttgaagaagatattgatgacgaggatgtccagcagcgcgggcaacccgagtcaccggcgattattccggctctcacgtttgaaccacatgcgtcgcccgacaatgtagaccaaacccttgccacggggacggacatggcgaccacttccttagccaaggtttgtagagagcttcgagtacctcgtggggatcccgaggagtccgcggccgggtacatctcgtggctgaacggagcttgtgctcaacttgatagcgtcggcaagcgtatcgacgaggccttgaagcaggaatgtcgtcgatcgagccgatatgccggagggcacgtgttggcttgtctacgagatcatcgcccgcgcctggatctcgatttcctccgtgagggttttgctcgttctcggaggactccggcggagatacaccacctggcgaggtcgatggcgccgttggcggagaagatattccagtctatggattggcgttggccttcttggtag

SEQ ID NO: 23653 - DNA, 542 bp, Oryza sativa
  Clone ID: PAT_MRT4530_28712C.1
agtaaaatggcacctacatgacagttgataccggtctaaatgacgaaatacatacgaaggatggaacttctgattatgatttgcaggatacccaccgtgaaggaaaaggtatcacatcagtggaaactgatactgttccttgtgtggcgccttcaagttttgcctacagtggtgtaactgtggaaactgaagacgttggggagaacagcaagaagaatgatgagctgcaagaacttggaagcatcaatcctgaaagtgataacaataaagtacaatatcaatatcagttaggtgagtttatgagttcatgttgggaacctgttatgagacaggagccacaggatgcttgttctgattctgaatctgatcttactgagagttctcctgatgcatcaatgactgacattattccaatgcttgaagagttgcacccattaatagacttgcaaactggccacccttcattggtctccagagacaacttgaatacttcttcggatgatgatgaagatgatcttgaggaggaggatgctagcacagat

SEQ ID NO: 23654 - DNA, 2514 bp, Oryza sativa
  Clone ID: PAT_MRT4530_28713C.1
atggatcttggcaaatcatcctccaccagcgcgtcgctgaagaagattcaggaagacggcgcccttcccggtcgtgggaccatggaaagggaagcaggagtcatgaacttctacggtctttctctgctccacctgaaccccaattccatcgcctttcttagcatcttttctcatctttgtgaggcctacattggggtagagccgtttctcgatctctttcgcttctactatgagctgcgttggatggagcccaacagggtgtctggatgcgtcgggttccgacttcgggatggcctgaagtcgcgttacatccccttccagtgtccctcttctcgcagcaagtggtggacgaggtggttctaccttcagatcaaagattcggaccctgtctttgttgttcctgaggaacaaccggacaagatcccgtcttggaccgcaaagccccctttgaccccttctctccaatccttcatcgacattgtcgacgatctccgagtgatgatcagcggcctgacaacggcgagtaacatccccgttcccctttgtgaaaagggggcggccgaacgtgatgctgccatcaacgctcttcctctgactgacatcatcgggccactcgcggaccatcaggtgacggcatctctgaaagagaaggtcgccaaggaggcgtctgatgctgctgctgctaccacaagtggtggcaatgttccgacaaaggggaggaagttctcctctgcctcggacgcgtctctaccgcctccacgacgacaacggcggcacggggcgaaggcggtgcaagacgagtctggagggacttccggcgtgtctcccactgcagcctcgacggatgtcatgcttgcgcccgggagacgcgaggcgacaccaagcggcccagtcagcaatcccgcggctggtcgtggtccaccggcggccatcctcacctgggaggagctccaggtcgagatggggcgcctcctcgaggctggtgctcgcggcattggccgtgagattgcggaggcgaggtcggcagcggcgtcggcgaacgagtgtgctgaccggcaggtacgcgagttggcggaggctcgtgaagacctcaagaagatgagggagttggtggccggcaacgagcgacaacggcaggggctcgaggaccgcatgtcggagctcgggaacaacctgtcggaaatccgtggctcattgcgggtcacacacactggcctgcaccagcttgccggggagtgcggcattaagtctactatcccggcgaatcccgacgagttctcgcttacatcttctcttgcggagctggcggcggcgatgagggagatcccctccaagcatgcggccaggatcgaggaggagacgtcgaacgggatctacaccggggcgtgccacgtcctcgcgtgtgtaaagctggcacatcctgaactcgatttgcgcgagatcttggatcagggggcggctagcaacacgcataaggaggtgatggaagaagtcggtgatctgggggaatctgttctccccctttttgaagaagatgttgatgacgaggatgtccagcagcgcgggcagcccgagtcaccagcgattattccggttcttgcgtttgaaccacatgcgtcgcccgacaatgtagaccagacccttgctacggggacggagatggcgacgacatccttagatctcgagggtgctcttgctggccaagatcgtcgtatccaatattggaagacaaaatttgaagtagcggaactcgagagaaccatgcttgcagtgaagaaagagcaggctgtggaaacgctccggggtcatgaggtgtggttcaactcgtacttgaagagttgctgcacatccatggccaaggtctgtagagaacttcgagtgccccatggagatcacgaggagtcggcggccggatacatctcatggctgaacggagcatgtgctcaactcgatggcgtcggcaagcgtatcgacgaggccttgaagcaggagtgtcgtcgatcgagccgatatgccggagggcacgtgttggcttgcctacgagatcatcgcccgcacctggacctcgattttctccgtgagggttttgctcgttctcggaggactccggcggagatagaccacctggcgaggccgatggcgccgttggcggagaagatcttcctgtctatggactgctcgctggggagcatggcctcggagccgtacacgaggaagaagggtgtttccttgttagacattgtcggtgtgcccgatgcagtaatcctggaaatcagcgctgatgaactgggagccgttgtcggttatgatgcggtgcggcatagtccaatcggctacgaagtcggcgagtacctgggatttgatggctgttcgtggcgcaaagtggacatcaaactggctcagctcgactacccattttgcaatgcggccgacaacgtctttgtttctcacgacttcaccgagagggaaggaggagacaactgtgactctgtgggcttgaaagtagtggcgtag

SEQ ID NO: 23655 - DNA, 3156 bp, Oryza sativa
  Clone ID: PAT_MRT4530_28714C.1
atgctgtgggcccgacccaaactggctacccaacaagcgagcggcggcgccgccgccttcgctctcaactccggcggccggcgcaactccggcggcgaagacggtgcgggcggagccacggaggtggacgccgcacgtggatggattcaacggaaacgtaatgcgaggaggtcaaggagaagtttcatctcgatttacccatctccttgactccagatttcatcccctttcatgtctgcttccaatggagtgcccctgccgcgcatcaggccaacgttttatctgagggtaaaattcaagaagatatatatggcttttggtgcaaatgacattgtgttgcatatcaagagactaatgctttgcccttctctattcaacttcttgctgtcttcatctccagtcttcctgttaactgcacttctgcttggagcacttttgagttatggtgaacctgctgttcttgttcttggagagaatcaacaaactttgtcctttaaatccaagatttccattactgactgttcgattgacaaggttgagactgttgctgtcgaggagcacttggataaaacaactaccagtaatgaagtatatgtcagggaaagaaattttgagggtaatatacatgacactcactgggaagagaaaaatggcacctacatgacagttgatactgctctaaatgaggaaatacatacgaaggatggaacttctgattatgatttgcaggatacccaccgtgaaggaaaaggtatcacatcagtggaaactgatactgttccttgtgtggcgccttcaagttttgcctacagtggtgtaactgtggaaactgaagacgttggggagaacagcaagaagaatgatgagctgcaagaacttggaagcatcaagtacaatatcgaatatcagttaggtgagtttatgagttcatgttggggaacttgttatgagactgggagccacaggatgcttgttctgattctgaatctgatcttactgagagttctcctgatgcatcaatgactgacattattccaatgcttgaagagtagcacccattaatagacttgcaaactggccatccacttgcaaactggccacccttcattggtctccagagacaacttgaatacttcttcggatgatgatgaagatgatcttgaggaggaggatgctagcacagatgaaaatcaattggaagggaaaatagatgattttgctaactggaaggatgttattgatctaaattacttggatatggacaataatagcaagctggagggtatgatggatctgcaaagagcaaagaacattctgaaatttgaacttgacaagaggttaatggacttgcaagcagctgatgcagtacagaaaatggaggaggcatcacgcttccgtgtgcaggttccctccatttccactggaaggcagaacccatttgattcttcaaatggctcagatgaaataatcgagttaccacatgttcctgattcagcaccgtcttgtctccttccacggaaaaatctatttgatcttgcagtcaaccaaaatatggcccatgatagtccattgcaagaaacttggactcctctttcgtacttttcagcaagacggcatagaaagcatggaaacttatatgttaggcactctactagcctgcatcacaatagcttcaaactggagaaagatgaaataagtgaaaatgatgcccataaatcccataatagtcagtcagacggtgatgccaagcaagaaaggaacaacagcacgttatttggttcactggaagcacatataggcgaagaaatcaaaatattaggcatggcaatttcagaggtgggtgtattagaagtaaattctggaatggttagcagtaaccaaaatgctgatttcagtgatgatatcagttcatctcctttccagaagcctagacaaagcactttcgaagctaaggatacagtacatgcaggtattgagcaattaacatcgtgttccccttacaaggtaaataattttgaggcacatattgttgaagcagactccattgatgaatttaactcattgtttaagtgtcgtatggaggaagtactagtgcaatccatctcaaagtccagtatcagtcaacccttgacagttaaacttgaagatgaattgagtgaaccattatctccagattctgggactgggacacatttcattgacgggagttcagttgaagattcggatccacgatttgcacagctcaatgatgaagcactggtatcttctacttctaacgcaacatgtcgtaatgagtcaattgaagagaaatcaagtgaagcattactggcaggaaacgaagattattcagaactgccaaatgaactgttaaaatcaggagatccacagactgcagatagttctgagattcaagtgcaggagcagcaatgtgatacagtggaacatcagttgcagttcctcggcctcactgtgaagaaacaatccctgcataagtctccgacgacgacgacgacgaggacaagaggaaagagcgtaatgagtcaccgtgacgcaactctgttcagctccgatgtcgcgagccttgctgccccaaacttcctattagatggcgtgattaactttgtgatggcgcacatgacaaccgagttgggtgatgagagccttctcctggtgtcgccatccgtggcttctctgctggcgaacttgcaagactatgagcctgagactgtcgctgatacagcccaggcactgttactggcatctcgcaggatggtgttattcccggtgaacaacagcgagaggttggacaaggccgacgatgggtcacactggagtcttcttgtgctggacaacatcaccggccgcttcgtccaccacgacagtatggacggcgccaatctgccggcggcaacccgcctcgccgacgcgctccggccactgctcccggcgccaccgcagggaccgcccatctcaggcccgacaccgcagcagagcaatgggtacgattgcggcgtctacctgttggcagttgccctggccatctgccggtggtggaagaagcatccaaggacagaagaagcggcgccctgctggtttgagtcggtgatggatcaagtaacatgcgaaaggttcacacgtctttgtattaaggagtag

SEQ ID NO: 23656 - DNA, 1956 bp, Oryza sativa
  Clone ID: PAT_MRT4530_28715C.1
atggacctcggcaaatcatcttccaccagtgcgtcgctgaagaagcttcaggaagacgacgcccctcctggtcttggaaccatggagagggaagcaggatgtactaatccccagcccgtcttaggtcacatggttgcgatcgaagactatattctctgcggttttctccctccgcctttcgaatttattctcctagttttgaacttctatggtctttctcttctccatttgaaccccaattttatcgcctttcttagcatctttgctcatctttgcgaggcctatattggggtagagcctttccttgatctctttcgcttctactacgagctgcgttggatggagtccaacagggtatctggttgcgtcgggttccgacttcgggatggcctgaagtcacgttatatccccttccagtgcccttcttctcgcagcaagtggcggaataggtggttctatcttgagatcaaagacttggaccctgtcttcgttgttcccaaagagcaaccagacaagatttcgtcttggaccgcaaagccccctttgacctcctctcttcagtcgtttatcaacatcattgacgatctccgagtacggggcttgtcggggtatgaagtcattgcagacttcgttgcgagtgacatccccgtgcccctttgtgagaagggggcagctgaacgcaatgacgctatcaacgctcttcctctgactgacatcatcgggccgctcgcggaccatcaggtggcggcgtctctaaaagagaaggtagccaaggaggcgtctgatgctgctgctgccaccactagcggtggcaatgttccgacaaaggggaggaagttctcctctgtaagcggacatcgtcgcaaggcgtcgaccccctcggcctcggacgcgtctcccctgcctccacgacgacaacgtcttgtgacggttagcgagaagcgcggcctcgacggatgtcgtgctcgcagccgggaggcgacgcccaacggcccagtcagcgatcccgcggcaggtcgtgatccaccagctgccgtcctcacctgggaggagctccaagtcgagatggggcgcctcctcgaagctggtgcttgcgacatcggccgcgacattgcagaggcgtggtcggaagcagtgctggcgaacgcgcgtgctgaccggctggtgcgcgagttggctgaagcccgtgaagacctcacgaagatgagggaattggtggccggcaacgagcgacaacggcaggggctcaaggaccgcatgtcggaactcgggaacaacctgtcggaaatctgggatgctgatgacgaggatgtccagcagcgcgggcagcccgagtcaccggcgataattccggttctcgagtttgaaccacacgtgtcgcccgacaatgtggaccagacccttgttacggagacggagatggcgacgacttcctcagatctcgagggtgcctttgctggccaagatcgtcgtatccaatactggaagacgaagtttgaagtagcggaacttgagagaaccatgctggcagtgaagaaagagcaggctgtggaaacgctccaaggttgtgaggtgtggtttaactcgtacttgaagagttgctgcacatccatggccagagtctgtagagaacttcgagtggtccacggagatcctgaggagttggcggccgtgtacatctcgtggctgaacggggcctgtgctcaactcgatggcattggcaagcgtattgacgaggccttgaagcaggagtgttgtcgatcgagccgatacgccggagggcaattgttggcttgcctacgagatcatcgcccgcgcttagacctcgaatttctccgtgagggttttgctcgttctcggaggacttcggcggagatagaccatctggcgagatcgatgtcgccgttggccgagaagatcttccagtctatggactggcgttggccttcttgctag

SEQ ID NO: 23657 - DNA, 416 bp, Oryza sativa
  Clone ID: PAT_MRT4530_28716C.1
ggttcttgacccttgtgttttcaaccctccttttttttttaaccaaaccacagcatcgtgaattttttgacttattaaacggggcatttcagtttactacatgtaagaccttcacattttttcccaaaagggggctacttttacaaggttacaatttcaacttcttaggtgccaagattcacacaacctcaactttacagcttggattaaacagggtttccccctccccaggaaggcctttttatagcattcttcagggcattatagaacacctttccacaggtgaacaaactaacaaagcaacaccctgttggggatctttcgcgcattgattgggagcatttttgggcccctgtgctaagggtaagctcttcacatatttgcctaactgcaataatagatttatcgcccttgcc

SEQ ID NO: 23658 - DNA, 2106 bp, Oryza sativa
  Clone ID: PAT_MRT4530_28717C.1
atggagagggaaacaggaggtactaatccccagcccatcttgggtcgcatggttgcgatcgaagattatgttctctgcagtcttctcactccaccttccgagtttcttctcctggttttgaatttctatggtctttctcttctccatttgaaccccaattccattgcctttcttagcatctttgcccatctttgcgaggcctacattggggtagagccttttcttgatctctttcgctcttactatgaactgcgttggatggaatccaacagggtatctggttgcgtcgggttccgacttcgggaaggcctgaagtcgcgttatatccccttccagtgcccttcttctcgcagcaaatggcggaataggtggttctaccttgagatcaaagattcgaaccccgtctttgttgttcccaaagaacaaccggacaagatttcttcttggaccgcaaagccccccttgaccccctctcttcagtcgtttatcgacatcatcgatgatctccgagtacggggcttgtcggggtatgaagtcgttgcagacttcgttaataagcggatccagtcgctccaggctcgggcctatccagcttataactattccggaccggaggacgcgaccagggtttctcctcggggtctaaacatcgaggccgtggagtgccgtgtcggccaggtggcggcgtctctgaaagagaaggtcgccaaggaggcgtctgatgctgctgctgccaccactagtggtggcaatgttccgacaaaggggaggaagttctcctctgcctcggacacgtcacccccaccagcacgacgacaacatattgtgacgatcggcgagaactgccatcctcacctgggaggagctccaagtcaagatgggcgcctcctcgaagcgggtgctcgcggcatcggctgcgagattgtggaggcgaggtcggaagcagcgctggcgaacgcgcgtgctgatcggctggtgcgcgagttggctgaagctcgtgaagacctcacgaagatgagggaattggtggccggcaacgagcgacaacggaaggggctcgaggaccgcatgtcggatctcgggaacaacctgtcggagatccggggctcgttgcgggtcacctacactggcctgcaccagctcgccggggagtgcggcatcaagtttacgatcccggtgaatcccgacgagttctcgctgacctcctcccttgcggaactggcgacggcgatgggggagatcccctccaagcatgcagccaggatcatggaggagacgtcgaacgggatctacaccggggcgtgtcatgtcctcgcgtgtgtaaagctgtcgcgtcctgaactcgatctgcgcgagatcttggatcatggggcggctagtgacacgcggagggaggtgatggaagaagtcggtgatttgggggagtctgttctccccctatttgaagaagatgctgatgacgaggatgtccagcagcgcgggcagcccgagtcactggcgataattccggtactcgagtttgaaccacacgtgtcgcccgacaatgtggatcagacccttgatacggagacagggataacgacgacttccttagagggtgcccttgctagccaagatcgtcgtatccaatactggaagatgaagtttgaagtggcggaactcgagagaaccatgctggccatgaagaaagagcaggctgtggaaacgctccgaggtcatgaggtgtggtttaactcgtacttgaagagttgctgcacatccatggccagagtctgtacagaacttcgagtggtccgcggagatcctgaggagtcggcggccgggtacatctcgtggcagaacggggcctgtgcccaactcgatggcatcggcaagcgtatcgacgaggccttgaagcaggagtgtcgtcgatcaagccgatacgccggagggcacgtgttggcttgcctacgagatcatcgcccgcgcttggacctcgaatttctccatgagggttttgctcgttctcggaggactccgacggagatagaccatctggcgaggtcgatgtcgccgttggccgagaagatcttccagtctatggactggcgttggccttcttggtag

SEQ ID NO: 23659 - DNA, 129 bp, Oryza sativa
  Clone ID: PAT_MRT4530_28718C.1
atggcccgcaaccgtcattggggagcaatcctggacatccacgtggaaggccgggatgagaggcctcggctaagaggtcgttgtgttcaaataaaatttcaagcacaagtggaaatagattatttctaa

SEQ ID NO: 23660 - DNA, 2733 bp, Oryza sativa
  Clone ID: PAT_MRT4530_28719C.1
atggatctcggcaaatcatcctccaccagtgcgtcgctgaagaagcttcaggaagacggcgcccttcccggtcgcggaaccatggaaagagaagcaggagggccggagaaacgcagacggcgtaccacacaggaaaagatcgcaattgttcagcagagctttgaaccggggatgacggtctccctcgttgcccggcaacatggtgtagcagccagccagttatttctctggcgtaagcaataccaggaaggaagtcttactgctgtcgccgccggagaacaggttgttcctgcctctgaacttgctgccgccatgaagcagattaaagaactccagcgcctgctcggcaagaaaacgatggaaaatgaactcctcaaagaagccgttgaatatggacgggcaaaaaagtggatagcgcacgcgcccttattgcccggggatggggatcgtcacactgatgatacggatgtgcttctccgtatacaccatgttatcggagagctgccaacgtatggttatcgtcgggtatgggcgctgcttcgcagacaggcagaacttgatggtatgcctgcgatcaatgccaaacgtgtttaccggatcatgcgccagaatgcgctgttgcttgagcgaaaacctgctgtaccgccatcgaaacgggcacatacaggcagagtggccgtgaaagaaagcaatcagcgatggtgctctgacgggttcgagttctgctgtgataacggagagagactgcgtgtcacgttcgcgctggactgctgtgatcgtgaggcactgcactgggcggtcactaccggcggcttcaacagtgaaacagtacaggacgtcatgctgggagcggtggaacgccgcttcggcaacgatcttccgtcgtctccagtggagtggctgacggataatggttcatgctaccgggctaatgaaacacgccagttcgcccggatgttgggacttgaaccgaagaacacggcggtgcggagtccggagagtaacggaatagcagagagcttcgtgaaaacgataaagcgtgactacatcagtatcatgcccaaaccagacgggttaacggcagcaaagaaccttgcagaggcgttcgagcattataacgaatggcatccgcatagtctgaacagcgaagccgtggaacgtcgtgttggccaggtgatgatcagtggtccgacaacggcgagtgccatccccgttcccctttgtgagaaaggggcggccgaacatgatgttgccatcaatgctcttcctctgactgacatcatcgggctgctcgcggaccatcaggtggtggcgtctttgaaagagaaggtcgccaatgaggcgtctgatgctgctgctgctactactacaagtggtggcaatgttccgacaaaggggaggaagttctcctctgtaagcggacatcgtcgcaaggcatcgacccccttggcctcggacgcgtctcccccgtctccacgacgacaacgccttgtgacggttggtgagaaggcggcgcgggcgaaggctgcgcaagacgagtccggagggacctccggcgcatcgcccgctgcggcctcgatggatgtcatgctcgcactcgggagccacgaggcgacaccaagcggcccagtcagcgatcccgcggctagccgtggtccaccggctaccgtcctcacctgggagaagctccaggttgagatggggcgcctccttgaggctggtgctcgcggcatcggtcgcgagattgcggaggcgaggtcggcggcgtcgtcggcaaacgagcgggctgatcggctggcacacgagttgtcggaggctcgtgaggacctcaagaagatgagggagttggtggccggcaacgagcgacaatggcaggggctcgagcaccgcatgtcggagctcgggaacaatctgtcagaaatccgtggctcgttgcgggtcgcctatactggtcagcaccagttcgccggggagtgcagtattaagtctactatcccggcgaatcccgacgagttctcgctgacatcttctcttgcggagctggcggcggcgatggaggaaatcccctccaagcatgcggccaggatcggggaggagacatcaaacgggatctacaccggggcgtgccacgtccttgcgtgtgtaaagctggcgcatcctgaactcgatctgcgcgagatcttggatcagggggtggctagcaacacgcataaggaggtgatggaagaagtcggtgatctgggggaatctgttctccccctttttgaagaagatgttgatgacgaggatatccagcagcgcgggcaacccgagtcaccggcgattattccggccctcacgtttgaaccacatgcgtcgcccgacaatgtagaccagaccattgctacggggacggagatggcgaccacttccttagatctcgagagtgctctcgctggccaagatcgtcgtatccaatattggaagacaaaatttgaagtagcaaaactcgagaggactatgcttgtagtgaagaaagagcaggctgtggaaacgctccgaggtcgtgaggtgtggttcaactcatacttgaagagttgctgcacatccatggacaaggactccggcggagatagaccacctggcgaggttgatggcgccgttggcggagaagatcctccagtctatggattggcgttggccttcttggtagtcttcgtatcctgtgatagatatctcaggaaaaaggtgtaa

SEQ ID NO: 23661 - DNA, 5402 bp, Oryza sativa
  Clone ID: PAT_MRT4530_2871C.1
tcagaggacgtagtcaccgatcgaaagtatgcgtgctcggatgcgcttctcgtggtagcggcggagggcttgttggtaactggctgcactgacggcaactcgttcgcgatgttcctcgagtagattcacatcgacgtttcgctgctcctcctggtcctcgtcggaatacttctgtactcgtgtactatgatgtcgtagctcactagggagcatggcctcggagctgtacacgaggaagaagggtgtttccttgttagacgttgtcgttgtggtgcgtacggcccatagtactgatgggagttcttcgacccattttttgtcatgtgacatgagtctatcgtagacgcgggtcttgatcccttgtagtactatgctgtttgccctctcgacttgtccgttgctttgagggtgagagaccgaggcgaagcatatcttgactcccagtccgatgcagtaatcctggaaatcggcgctgatgaactgggagccgttgtcggttatgatgcggtgcggtagtccgtatccttgccgaagagctttcccgaccaatgtccgtccggcggcgtgtgacccacagatgccttcatgtatatcaaggagaaggtgtctgccgtcgtcggacgagacgcatttgagaagtatcccgtttggtgctttcttgtatagatcgttcccgatcatgcagtagatttttgctttacgggttattttctcggcctctgcatcgtcctcgggcaactcttcgcagttgatgaatttgatcagtggggtgcgccagtcgtctgtggtctcgatatcgacaacggcgcgttctgcctctgtggcctccgagctaatgtcgggggcggctgggctaacttcgtcgataacctctttcactgatggctttgtcaggatgtccagaaaagtgccgggctcgagcggttctcgtctggacgcatgtcgtgctaggtcatctggctcgatgttgtccttgcggtatacgtgtcgaacctcgatcccatcgaaccttttctccagcttcctgacttctgcgagatacttggataactcggggttagagcatttataatctttgtgcacctggttcgcgactagctcggagtcccctttcacgatcagtcgcttgaccccaagtgcggctgcagctcttatcccggcgagtagtcctttgtattcggctgtgttattggtcgccctgaagttgaggtggattgcgtgcttgaattggtctccggaaggagatgtcaagatgaatcctgcccctgctccttggctgttgagtgcaccatcgaacgccattgtccatgtttcgttatcgatttggttgtctgggactttgatggctgttcgtggcacaaagtggacatcaaactggctcagctcgactacccatttcgcaatgcagccgacaaagtctttgtttctcacaacttcaccgagagggaaggaggagacaactgtgactctgtgggcttgaaagtagtggcgtagctttcttgatgtcatgattaccgcgtaaagcagcttttggatctgtggatatcttgtctttgcgtcatggagagcttcgctgatgtagtagactggtcgttgtactttctctctctcgacaacaatgacggtgctaacggaatatggcatggcggcaatatagaggaataattcttcattaggttggggagcaacaagtacaggggggtttgataggtagtccttgagtgcaacgaatgcctcttcagcttcctgtgtccatacaaatttgtcttgcttcttccgcagagcgaagaagggttgtcctcgttctcccatcctagcgacgaacctgcttagtgctgccatgcatccggttagcttttgtacttccttgagtcttgtgggtgacttcatgttctcgattgccttgatcttctcgggatttgcttctattcctctgccagagacaaggaaaccgagcagcttgcccgacggtactccgaacgtgcacttctttggattgagcatgaggcgatatcgtcggaggttgtcgaacgtttcccgcaggtcctcaatcaatgagtcacttgtcttggttttgacaacaatgtcgtcgacgtatgcctcaacattgttgccgagttggtcgctaagtgcgccctgtaccgtgcgctggaaagtattccctgtggttatcagtccgaatggcatcttaacaaagcaaaataccccgaatggcgtgatgaatgctgtcttctcttcgtcctctttcgccatgctgatttggtggcagccagagtaagcgtcgaggaagctcaacagctcacagccggctgttgagtccaccaattgatctattcgaggaagagggcattgatccttgggacacgccttgttgaggtcggtgaaatcgacgcacattctccatttcccgttggccttccgcaccatgactggattggctagccactctggatgaagtacttctctgatgaagccagctttgagaagtttctcgagctcttcttgtatggcttgttttcggtctggtgcaaatctccgcagtttttgctttactggcttggcatcgggtcgcaccatgagtttgtgctcaatcacctccctggggacccccggcatgtcggacggtttcttgggtggctcagttgtggcgggtgggctaggcgtttgcttaaccttgtcgaggctaagcttgtcgcattgtaccgccagctttgcgttcctttgaatagtgattgttcccttcggtcctggcatcttgagcacttgatacgcgtagtgagatgcggccatgaacttcgcaagtgcagttctcccgatgatggcgttatacgcgtcgatgagaacccgcgcgaccttgatgttccgaatagtggattcgaccatgatcggatagcatcctgggatgatggcagtcttgggatggtcttcttccgaaaattctatcttctgttcagaccacttcatcttgggtgcagccccctgccatgtcaaacagacttcacgttccactttcttgtattctcgctttgaggagtacgctgtggaacctccgaaaatgtgtgaaacgtggatgtcagagtctggatatgttgagtccgattcctgaggagccgcctccgcatccttctcgaccacgcgtactcgcttgcctttttcaaatgccatgtgcttctcgagcgactttttgaaaacaagacaatcttccaaagaatgtatgtccgtcttgtgtatggggcaccatgctttcttcacgtcgctaccttgtggatctgggcgcttgggagggttcgcgtattctgctgcgagaacttccgcttgagcttttcttttcccatttttgcgatttttcttcttgcttgactcaggtgcgtccatggctggtttcttctctcccccggtcttcggcttatcgttcttgcgtctcagcgcatcatttgcgtgggtgcatcgctcaacgatctcgaacaatctccgagtagttgtgatgcgtcttgtcgccaactcctgggtagtatagcgatctctgacaccggacttgaaggcgcgaattacagaagcatcggtgatttcggggattgtatttctgcactcgttgaagcgccgaacatattccctcaaggattcacccgagttctgtgtcaacgcatgtaggtcgtcttcgatcgcgtggcgcttgtaagttccttggaagttggtgacgaagaggacgtcggctaggttctcgagaatcttgtcgccgccctccggtcttgttctggcgccgatctctgtcgtcctcgtcattatggcggtgtcctcgaccagcgtcgccctgcgtccgcctctcacgatcgtggcgattaacacagtctcggtcttcgttcgagcggccttcctgtctttcattatcgcgacatcgtgaagagacgcggtatcgggagcgatccccgttgtctcatgtgcgtcgtgcctctcggcggccattgaggtggttgcggagatcgccggtgccgcgaggtggggggtagctcgatgcggtgactcctgctgtttgggattttcgccattggcaccgccagttagtggctgttccgggtgcgccgcagcagcggcttcttcgaacgcgtagttgaggttggttcttgattcccgtagccgttctgtccattgtgcgagatcatcgtttagaacgggatcgtaaggggtctccctcagtattgcgttgatggtcctgatgtgctgggccggtgtagccatttgattttgtgtttccgcattagcgtgtgctgacgtgctggttccgtcgatagctaatacctcgcgcggcgtacttgctggcgatgagccatagtcctcgagtagatgcaggactgatggttcgggtgagctgatgtcgattacgcctacgaatcgatctgaaaccagcgtcgttccttgttccttgtcttcatctctaagggatatgcctgactgctggaccttaggagatgacgtcttcgtggcgctgaggaagaccttgcagcttgagaggtcgtgattctttgtcttgtgaataggacaatagacatcacgagttggagaaatacgctgaattccacgctctttgcaggcgcgaatttcagcgcggacgttgagaaaaacccagcaggcttgcaaagtgtgtttcatggttttgtggataggacaccaggaccttgtcgcttcggaagtcattctcgttggctcgtggctcttgtctaaacgacaaggtttggtcgcattagaatccttctcgagctcggatgtcgtcgatgttccgttctccgcttcggcgggaggatccttcgacatggagtcgtcctgggttgtagccattgcgttctcgtttctgatcattgatgggtcggctgagatcgggatcgtggtgtaaaccgggaagacgatttcgtcgacttgagtccacaccagcattattgaagcaggaaatccccggtggaggttggtgttgacgcggttgtcggcgaagctggatgacatagtagtagaaccttgagcaccatgttcccctacctggcgcgccactgtcgacgggtgatacccgtagaccggatatagagggtattggggtacgttggtacaaggatcggcgagatcatagtcgagttggttcgactagatcccgatgacttggctccctgcaggctctggcttcgtaggctgtgtgggttgtgctggctctgagattcgatgccttaggccctccccggggggtcccttttatatcgcagatctggaggtctccaagtagaactcggagatgtcagaccctgtacgatacattaacgacccaatcttgtccgagtaggattcttcccatctatagactctgtgaaggatttccttagagtacgcgggaagcatccgtatgcgtgtaggtataccat

SEQ ID NO: 23662 - DNA, 401 bp, Oryza sativa
  Clone ID: PAT_MRT4530_28720C.1
ttgtgattatatatacacaaagggccctggaaatctggtcatcagtgcttatgtgacttgccatgatataacatttacagtaactcttgatttgaagcttggcaaggatggagttttgctgcgcattgacctgacctaggatatcttaaagaaaggttttgaggccgtttaggaattgcttagtgatggaggtcttaatacgagtgttcttgaaatggcatttgctggtaattgcggtgttaagctgaacattgagtcagaagattctgggtttcttcaaccactctttgccggggaagcttggccttcttcttcaagtgcacttgaaagatttattcacaatgaatcttgccatggaaattggaagaaagacagcaaatgccttctcaagcatcctgctg

SEQ ID NO: 23663 - DNA, 105 bp, Oryza sativa
  Clone ID: PAT_MRT4530_28721C.1
atggcccggatgacgaggcaggcccctgaccgcggctacgtgtcgccatcgcagcgaaatcgtcggaccatcgttctgaccccacagtgggacccaccgagctag

SEQ ID NO: 23664 - DNA, 432 bp, Oryza sativa
  Clone ID: PAT_MRT4530_28722C.1
tcttgagcaaatatgtaggaacagaaaaggggtcttttctttatgtgcaatagtaaattgttgttttatagtgaaattgctaaggcaactgcttctaatttgcctaaatcagtcattgcttggttaaaaaaaataatgacaccatggcagacaattctgaagagaccatatatctttagtttgattctaacaaccatcttctgttctgaacttacgatatttagccattgatttatggattttccatttatctatgaatgtttgggctcaccattaatttgtttcatttcagtgacccttatctgtgaaatatttttcgcttcctcccactttgttttctgcacaatccatgtgtcgtggttgatgctggttaatggttgtatttcctcttttttattttgggagaagtcttcagttgattggcacatttag

SEQ ID NO: 23665 - DNA, 1034 bp, Oryza sativa
  Clone ID: PAT_MRT4530_28723C.1
tttttttttttttttttttttattttagagaaaaaaatttataaatatagcatgttttatacatactcatacgtatgcacgtcacatcctaatcaacatcagctaggtaaattaaccttgccaagccatttagatacaattatcagataatactaggttttatacaatttttgcaggtacaccaatgctctcgtacaaaatcaaggcgtagggtaggggcacagtaattgatatacacactaaatactctgcttaattacacactaattgcaaattaagtggtaattaatcactcaaagctaaggcagtgagcatgtaatcgcttcagctggacgagctctggagcttggacacgaagctggaggcggcgaaggcggtggagccaccgacgacgcaggcgagcgcgaccacggcctggacggcgacctcccatgggtactcctccgggacgaggtagacgacggcggggccggcggcgagcagcagcagcgcgacgccgagcagcgcgccgggggtgcccgggtcggtcgccgccgacagcacctccagctcctccgccttggacaacaggcccagccgctccaccgccgacagcgacagcccggcgcgctccgccgccgacaggagccccgccttctccgccttcgtcagcagccgcagcttctccacgttcgtcagcagcttcaccggcggcgccgccgccttcccgctcgtcgtctgcctcggccccggctcccccaccgggaagtacaccgtcgtcccccttcttgtgccggaggtgggcttctgggtggccatggcggcgaccttgtgaaggcggcggctgctcggcctcgccgcgacggtggccggcgacagcgacggcatcgccaccgctctagctgcgtccatcaccatggatggattccctctcctaccaccacacgtacacctctcgttcttctcgacttctcgtgcagcggcactcaccacgctctagctgcgtcaatcaccatggatggattccctctcctaccaccacacgaccctcgtgc

SEQ ID NO: 23666 - DNA, 424 bp, Oryza sativa
  Clone ID: PAT_MRT4530_28724C.1
gtgtacgtgtggtggtaggagagggaatccatccatggtgatggacgcagctagagcggtggcgatgccgtcgctgtcgccggccaccgtcgcgctgctgctgctcgccgccggccccgccgtcgtctacctcgtcccggaggagtacccatgggaggtcgccgtccaggccgtggtcgcgctcgcctgcgtcgtcggtggctccaccgccttcgccgcctacagcttcgtgtccaagctccagagctcgtccagctgaagcgattacatgctcactgccttagctttgagtgattaattaccacttaatttgcaattagtgtgtaattaagcagagtatttagtgtgtatatcaatgactgtgcccctaccctacgccttgattttgtacgagagcattggtgtacctgcaaaaattgtataa

SEQ ID NO: 23667 - DNA, 174 bp, Oryza sativa
  Clone ID: PAT_MRT4530_28725C.1
gccgcgtaccgtccgcatccggtcgccccgcgtcgccaccgtcggtctcgccggacgagcagtagggtcgacttttttttcccacaggagggcgagagatgttcggcgcgcgccgaaaagagcgacaccgcggactacgagtgcttggggtgcccaagatgcgtccagatgacc

SEQ ID NO: 23668 - DNA, 420 bp, Oryza sativa
  Clone ID: PAT_MRT4530_28726C.1
cattatgcatgtgaatgagccaattatgtcactctccatcggctgtggaatctcattcatccattcagtttccccatttttcggatctggagaggcgatggttgcggcatccaggtagcggcgatgacgaggagcgccggcggtagccatggtgcgggaggtgatgatcaggaagcagaggaggcagcgacggcgaagaagcttcgttgggacctccacctcctcctcacggagctttgtcatcatgctcaccactgccggtgccctcccggcggcgtcctcgctctccgtcgccggccccacagaagtggagaacaatctgatttgtacaacaagaaggctgaagcgatgccatcgtcagcccttataaacaacaaagctaaagttcagtttgcagaccttcctgagaatttgatgtga

SEQ ID NO: 23669 - DNA, 803 bp, Oryza sativa
  Clone ID: PAT_MRT4530_28727C.1
ccggccgggggccccgactctcgccgcccctcgctggcgccgccgtcgtgccgccgccggtcgtccacgcgcacccagatcccagccggcaggctgtcgctgaatatccccgcagctaaccctgcttggtgaatccggcgagcaaccagagatcgtgtaagcgcggaggatcgggatggagattattgtcattctctcgcttgtcgttcttctggttcttggagctctatttgtactaccgaaatcccgtaacaaaggtaaagcgaaggaagccagttcaaatgccaaatcagtgacatttaggagctatacaaaagaagagatctcagcacacaacacaaggacggattgctgggtcatcatcaaggataaggtttacgatgtcacctcttatgtggaggaacatccagggggagatgccatcctaaacaatgctggtggtgattcgacagaaggattttttggccctcaacatggcttcagagtctttgagatcattgaagatttctgcatcggcgagttgaagcactcatgattggagggattttgtattgcatccacgattctctcattgaaatcgaatttcgagagtgtagattattcaagttcaagtcttgcaatcccaggcgttgggacgcagatgacagggcaaaaacatttttagcgattatgatctaaaagctgccctaagcttccggatgtaatttcatttttttttcagctggcaatttgtagacatcattctgatcaggagctgtcctatgaatgtatttaggaacatgttcttcctagacgttcactcc

SEQ ID NO: 23670 - DNA, 925 bp, Oryza sativa
  Clone ID: PAT_MRT4530_28728C.1
cggacgcaggacaaaaaacgatcagccatgaagagcggcagcctgctgacgctcaccctgggagccctcctcctcgccggcatccccatctcctccgccgctgtcacccccaacagcaacatccgcctccccaccgacggcggcgacgaatggccgtcaccgccgtgggactgctgcgacaagctgaagcagtcgccgctcaggatctggccgcccaagtacaagtgcctggacgaggtcgaccactgcgccgccgcctgcgaggactgcaagcgtgccgacggcggcggctacgtctgccgggactggtactggggcgtcaaccccgggcccaagtgcaccggcggcggcggcgaggaggcggtgaggtcgaggccgtggaaatgctgcgacgacgccgtgtgcacaaggtcgatgccgccgacgtgcagctgccaggacaaggtgaagtcgtgctccggcggctgcggcaagtgcgtgcaggtggagtcgcagccgccgcgcttccgctgcctcgatcgctaccacggcttcccggggcccaagtgtcacaaccagccagcttaattagctactcatgttaattagcctcagatcatacgatccaacggtgaataagagcgacgcgtcgagcaggggcgcacgcgctgaccgctcgatcagcgttaacgccttgcttgctgccgagtagcagtgacatatgtgtaacattcgtgtggtcacgtatgttttttttcctttattgtgttttttttctttattgtgtttgttttatctggatcgtgagggaatgtttcggtgaccagagtacgtagtactagtatgttgtggttgctgtccaataaataagatgaatttggtagccaacagtctcaactctcaaaaaaaaaaaaaaaaaaaaactcgagactagtctccctcgtgc

SEQ ID NO: 23671 - DNA, 237 bp, Oryza sativa
  Clone ID: PAT_MRT4530_28729C.1
acggaataccactgtagcacttcaccttcgggtgaccccaaaaggatatctaactcagggaacatgcgtaatctacctaaggctaagactattcaaggacaacaactgatgcgtggttccggctatagctctttgatgtatccaaacgtggagaattactaggacaggattcagggctgtcaccacctgccgcctacctctgacaaatccgtgggatacacaacaaacaaaggtaat

SEQ ID NO: 23672 - DNA, 858 bp, Oryza sativa
  Clone ID: PAT_MRT4530_2872C.1
gaaaccaaacaaattgctcaaagatcatttggcctccgagtatctcaagaagataacataataaacattccaaaatgaaaatgtacaatttggttatgaagtatagtaaaaaatctagagtgatcacaattacagtagtttgtctatttatgcattattgccaaccaaaaatccttcagcccaagccaaggaggttttctcttctctgtaggcctgccatcaaccacaactcattcatttcaggaaattcgcatcaacaaaaatattcttggcttgcaaaagcaaagcaaaactttgtaaatcttcaggtagtttctcctagacagcaaacgaatgatgacaggttattctcatccttgtaagtgatggttctgccctgaataatagtttcagaaaatctagttcatgtttcttttctttgaagttggtaagctccacctctgcgagtaacttcatcagaacattatgagctccctagcttgttgattgatagcagatgcaattcaaagaacatgattcttcccccatgattgtagccatacagaaatttgtgcctcgctcttcatcactccatctttggcatcgtctcttttatttgagccgatctgggatgggatcatgggattcagtgggcaagggaggaagagatggcgacagtcttgttgcagtacttctgcttgaatttgcgatctgatttttgacctcgatccaccatcgtcgatctcgatcttgttctgttctttgcagctgtgattcggatcaatggggaaacacggcagcggcggcggcggaaaacgctgcggtggaaacgatttgaagcagtggtgcggatggggaggtgcggtgggcggacgcggg

SEQ ID NO: 23673 - DNA, 263 bp, Oryza sativa
  Clone ID: PAT_MRT4530_28730C.1
attattgggaagccttggtgccaaagagcgcaatcttatttactatgctagaacatcacaacaaacgcagagacagctccaagataggcacggataccacacacaaacatggctcaaaccaggttagcacacatttgtgtataggttcggtaggaggagaaataaaatttcctcagcgggattattccatcctgggttgttagagtgccctaataccataattctgaaaaggcatgacatttccgtggggacgaacctcttga

SEQ ID NO: 23674 - DNA, 640 bp, Oryza sativa
  Clone ID: PAT_MRT4530_28731C.1
acccggggatcagcgttatgaccgctttacacctatcaggttgattcggaatgggttttagcccgatagagagataaatattagcccccagacttgttttactaagtattatttaaatatctaccaaagggatgatggcagaagaattttggtatataatgccgccatgatccaattaccaaaatcctcccatggttagagctatacgtcctcccattgtgcctaccctaaaaaagacttggtggcaaaaaggggtttttagtgcggaaaatggattcggtcgttggtttcaacgggttttcggtcgttacttccagggaaaagagttagtttcggagagttctttgtttctccatcagcgggccatggaggaggcggggattttgggtcggaatgcggaagccctcgacaacgaaaaatttggcaagaaacaattcttagtattagttggactccgttacatcctggccaaaaatatcggtgaatataagggacttaataatagtgtagaactacttcaggcggcgatcgacgccaaggacagcttcattaccatagaccaagcaaaacatcgtttccgggcaagcaagcaacaggaactgtatcgttcaccggcgatcctctagagtcaaccggcagg

SEQ ID NO: 23675 - DNA, 212 bp, Oryza sativa
  Clone ID: PAT_MRT4530_28732C.1
atgtcggctgtggccgtggagcttagccccgtctacaccggcatgagtgtaatctaccacatggagaggtgccaagccacgtttccttcggctgccatctgcaccaacttctccatcgatattttcttcttgagtctttgctacaggaaggtgccgagtcacgttccttcgacggtcgtccgcaccgacctctccctccactctttcaagct

SEQ ID NO: 23676 - DNA, 616 bp, Oryza sativa
  Clone ID: PAT_MRT4530_28733C.1
ccgtccggagcccttacgaccgaaggagggcgccgctcctgagatggcaagacaggcgattgcaccgatgcacgccgcagcggcgcaccgcgcaccatgttcctaccactccgccgctgcgtgcgccgtgcgtggcgtgttgaacagcacctgagccgccgccggcggcgccggcgacagtactgacaaggtgtccggagcctttgggcattacaatttacctcttgcgggcgaaaggcgatgagagcctggactacataccgctccgggtgactgagggcgcgatccgcgccgacttcccggccggcacctactacctcgacggtccgggcagtgttgtgcgacgaccacagcttccacgtgcacgccctcgatggtcacaggtacctgcggtgcttgcgtttcctgaccgacgagcgcaccatccagtatttcgcgcgggaagtcgagcacgtgcgcatgcacccaggaggaggttcgtcagagagagcgacagactgatattgcacgcgtgagtgacccatgcacgtacgtggaaacggcagccaatatgtaggagagcctagacggcgcgtcgtacgtaatgttccttcaggttcatcaagaacagttcccg

SEQ ID NO: 23677 - DNA, 656 bp, Oryza sativa
  unsure (1)..(656): unsure at all n locations
  Clone ID: PAT_MRT4530_28734C.1
gctttttcctgatcatgtcatcagagtgtccactggtacaggacggttgttattgaactcatcagccacatccttccaataatactctccctttttgtcatttccatctgtaggatcaaccgagttgctcaaccaagcactaattaaccggcagggagtcgatgactccgacccatggaaagaactgttgggagtggctctaactgaggggtgttgcagtgcaaatattgcttggtggtttgcagttccaaacccctgatttggagcatggagaaggagagccaacacccagcagcaatggctacttcaacggacacctgctcggctgctcacgcaccagcaccaactgctttagattttatattcatttgtacacagtgaactgaaaaagtattgtattttatttccttgtggccagcccatatagctaaagactgctttagcaaaaaaaaaacaaaaaaaaaaaaaaaccananaaaaaaaaaaaaaaaaaaaaaaaaaaaaaaaaaaaaaaaaaaaaaaaaaaaaaaaaaaaaaaaaaaaaanaaaaaaaaaaaaaaaaaaaaaaaaaaccccccaaaaaaaaanggggggggccctttttagaagacaaattttaagtccgcggggggggaaaaaaaattttttttttgggg

SEQ ID NO: 23678 - DNA, 1571 bp, Oryza sativa
  Clone ID: PAT_MRT4530_28735C.1
agggcatccacaatgtatcactaaagtgggcattatgcaataaatgcagctctaaggacaggcaatatacattgtggaggtagtccatatggcattaattgctaaagcagtctttagctatatgggctggccacaaggaaataaaatacaatactttttcagttcactgtgtacaaatgaatataaaatctaaagcagttggtgctggtgcgtgagcagccgagcaggtgtccgttgaagtagccattgctgctgggtgttggctctccttctccatgctcctataaaacagaccaacaagagatttcagtttgtatctcttcatttcatcaggagatggattcatccaaccaaaaattcatagatcttctcagtcaagactctccaaaccatgcagaaaagcctagccacaactcccctccccaacaattccccaataattttccccaatctcagtttacccaaagcttcaacccacattttttacacaatttctatccatttcattccccaagcaactatccaccatatggtcattctcctcccagctttcaaggtactcctccaagctttcaaggtattccacatcaaggaaattgggcacaacctaatttagccaccttacaaggtttccatttgcaagaaaatatggtgcactcaccaaatcaggggtttggaactgcaaaccaccaagcaatatttgcactgcaataccccttagttagagccactgtcaacagttcttcccatgggtcagagtcatcgactccctgccctgcaagacaacaagaggcgccagttaatctcgagtcgtcaagtgaaagcagcgaagacgaggtgaggagagcaacacgcaccaattggacagaagaggagaacttacggttaattagtgcttggttgagcaactcggttgatcctatagatggaaatgacaagaagggagagtattattggaaggatgtggctgatgagttcaacaacaaccgtcctacaaatggccacaagaggacagtcaagcaattgaagacacactggggaaatgttaagaaggacattgggaagttttgtggagtttatgctcaagttagacgtacctgtaccagtggacactctgatgacatgatcatggaaaaagctcatctatggtacaagaatcaatcaaatcagaagaagcctttcaccttagagtatatgtagagagagctcaaggatcaaccaaaatggcgaagtattatcaaaaaggaagaaaacaagaacaagaggactaagatttctgagtcaggagcttacacatcctcatcaaaccaagagactgaagaagaatcatcaaacaaagagagacaccccgagggacagaagaaagcaaaagagagattaaaaggaaaaggaaaaggaaaagctcaatcttctccgttggggaaccagccatctcagaacatagttttgtacaacgaagctatgaaaattaaagctgaagcattattgaaatcagcagaggcaacagcaaaatcagcagaggcaaaacgggaacaaataaggatggaaaagtggcaggccggacgcgtggg

SEQ ID NO: 23679 - DNA, 174 bp, Oryza sativa
  unsure (1)..(174): unsure at all n locations
  Clone ID: PAT_MRT4530_28736C.1
cttgagtggcttaaccctcccnntctgtctgtgtctccgtccgtgagtgangtgtcaaattancnttcctttatcccntcccggggncnngtttcgtggnntgctgtattttcnannaattgcntnccntgnctttcaatngntgnnnctcccccattnatttataanaagtaa

SEQ ID NO: 23680 - DNA, 507 bp, Oryza sativa
  Clone ID: PAT_MRT4530_28737C.1
gctcgttctgtgccaccttgctcacagagcggggccaggatctcggccgccttcgaaggcaggctaatcatcacttggcacaccctctgttcatttaagctgaagtcgggggctactgtcatggttatggataaggcataccctctttccttggacttatggaatatacggatacaacataccatcacaaatacgagctatctccgtatgcgttaaggaaattcgccagatgttatggaaaatgtctctacgggacaagcgacggacgaagtcctactcggaatcctacttggagatcaagatgatccacggtataaaagggacccctgagagggattcaaggcattgaatctcaccaccaacacacctgccatagtttacgaagccggagcacgcagagctaagtcaccgggagatctcgtcgaatccattgactacaatttcatcctcataccagcgaaccccaataccctaatcatccggtctacgggtatcactcgtcaacag

SEQ ID NO: 23681 - DNA, 691 bp, Oryza sativa
  unsure (1)..(691): unsure at all n locations
  Clone ID: PAT_MRT4530_28738C.1
cgagacgcaactttgatccgagcggcggcggacggcggcggcgggaggaggaggagatggcgcanagnagcaaggagccgtgcaagaaggaggcgtgcgacatccaggcctgcctctccaagaacatgcgcgcggctttgatccgagcggcggcggcggcggcggcgggaggaggaggagatggcgcagcagagcaaggagccgtgcaagaaggaggcgtgcgacatccaggcctgcctctccaagaacatgttcgattccaagaaatgtgtgagagttatccaattacttcaatcctgctgtgagcagtgcgagtacaaatcaacacactgcggttctttgactggattattgaaaaacatttccaagtgatgaaacaatacagacatgtttctctgcagctgtcaaataaaagttcttttaggtttgcttaggattgagagtgataaccgagtttcttatgcatcatgatgactcagggggaagtaacaaacccgtcctcagcctgaagaagatgaatggtgttcttatggctgagttgttttgtgcttaatcggtcaacagatagacgctactttaagatagataccagtacccctaattccttgtatatgtggtgcccttcatactacatgctcttgtagacatgtgatctcatgttcccttcaaagtataataagtgttcacctgg

SEQ ID NO: 23682 - DNA, 372 bp, Oryza sativa
  Clone ID: PAT_MRT4530_28739C.1
atggcgcagcagagcaaggagccgtgcaagaaggaggcgtgcgacatccaggcctgcctctccaagaacatgttcgattccaagaagtacgtttatggattcctagtatttaccagctgccaggacagtgtcagggcgcaggagttgggctttgttgttggggaagttgtgggtgatgcttatgggtggtggtcgtggcagcaagatgatgcttgcttccagttgattggagttagtatgattgaacatttaaacggtgctgcaagatgtgtgagagttatccaattacttcaatcctgctgtgagcagtgcgagtacaaatcaacacactgcggttctttgactggattattgaaaaacatttccaagtga

SEQ ID NO: 23683 - DNA, 564 bp, Oryza sativa
  unsure (1)..(564): unsure at all n locations
  Clone ID: PAT_MRT4530_2873C.1
ngcggccggagctcgccggtgacgncgaagagaaaagcgacggcgcgagtttattcgctgaatagaagagcggcgagtgcgtaaacgccgaagtaaggcacggggagtgtttatatagggttggaaggggagagaccgtccgaatgaggggaaaacgggcgcgaaagatccggccgccattgatgcgtcggcgaggttagggggaaagtttccgaacgaatccgagggagagagggagggaaaaatggggggaaagagggaggtaatcacggggaatatttcccccctcttgattgcacgcgggacgtacgggatcggcgggattctcgccggcggcggcgctagggcacgggcgaggcggcgggaccggcgggagaaaggggatgacgggtgggccccacccgtcagcgagggtggcgggcaggcccgcccgtcagcggcgcgcgcgcgggaagtaggccgaatgggccgcggggaagaggggagagagggaaagggatgggccgagccggcccaagagggagaggggaagggaaagggatctttttagggtttttcttttta

SEQ ID NO: 23684 - DNA, 3081 bp, Oryza sativa
  Clone ID: PAT_MRT4530_28740C.1
ttactactctgttccccgagggcgcaccgaaggaaaccctagccgctgctccccgaagccatggcggaggcggcggggggccagccggagttcgtggaggtgcggtgcgcggggtgcggggagacgctggaggtggagccgggcctcaccgagttcgcctgcccggactgcgggacccaccaggcgctcccgcccgagctcatgcctccgccgccgccgcgcccgcggcgggctctgcccatccccggacgggggcctcctcccgccgcggtgttgcacgctcccgtgccggtccccgtgcaggttcccgcgcccgcgcgcatgccgtgcggtggctgctgcgctctgctgagtgtgccggcggggctcgtgcgcttcgcctgcccggtctgcgccgccgagctcgtcgtcgacggcgggcgcctccgcctctacttcgcttcccctgccgcccccacggtctccgtcgtggcgccgcccccagctggagtaaagctcacagcggatcccctgcgccatcagcaggaacaggcaaaaatagaaattgaccatccacaacgtgcaaaacagataccagcacattgctccatccattcagatgcaaaagaggaggaggacgatgctttcggaaacgcaaccgaagcagcagcccaacagacaatggcacgagaggagccttttatccattcaattcataggggggaatcatgcaatgagacacttgataaaaccactgcaaggtctagttcaaggaaggctagattgcaggcaggtgttgaatctatatatattgaaaaactacaaccagagcgtcctattcaggaaagcacaccacaggcacaagcttgccctccgagtaattcagttcgtggggaccacgcacaagggcagcaacctcttgttgacatttcaagtcgtgaacagcgggcaaaaaatgtctcaagtactatggagcgggaaaaagcagagcccctcaatcaagctagtgaactgaaaaaagcacaagctggtaagacgattggatgcccgaagagaaaaaggagcagcaagaatgctggtgagaataagaggaaaaataagggctttccgagttctccaaatgaaggactctatcttaggcgtagcaagcgcttgacgaaacaaccagaacaaccaataaatgatgatccagtccagcagccagctgcttctccaaaccaatataattctgatcctccagacattgaccgactcattgccaatttgtgtcccagtccatcacctcagtgccaaatgcctcaagcatgctcaagtgagtcaggcaatgctgatgcatctgttttaccagcatcttcaaatcgtgagatgcctcaagccgagcaatccccgcaccgctacaatcaactgtgccctccagaggtcaggggtacacaccagcttgataaaagtggtgagcaggtgcagccacagtcaccagagcaggttacgcatgcgcaacaggtgtcctctaccatcactgctcttttgaagcagaagtaccctggatcaacctatttgccggttggtgagcatggtgatgttccagctaatgaggaattggtttaccgctggaaacattatcctgcagagacgagggctgctattttgaatgaatttcttcaaaggtacaagtgggcccctggccgtgaggccgagtgcctgaagatatttcagcgcagagcagtaaaacagtttactggcctcctgtgcgaagagaagcgaagggttagagcagaattggctgcagtacaaaaagccaaaaaagcttcaggttctcgtagctccaatagtcatgcagagtcagaggaggaagatgctacagaagagccaaaggacaatcagacagaaaaggtaaatgaggacgaggaccctttactgtggaaacccttcccccctgcatggatgcatccgaattggtgggagagattgtgtgaatattgggccaaagaagaagtcttgcagatgtctctgaagtataggaagaatcggtttgttggaggtcgtgctcatcacacatcaggttctcggagctttgccatgcaacggcagcttatggtcatagagaatggtgggaagccagtgtcagaacttgagatattcaacaagacccataagtttaatggtggcacaggagaatttgtcagtgagaaagcgaaacggattgtggagggtttcaagaagcgaatggaggaggctggtgataaacctgcagatcccgatgctgcatggatacagcaggtggggggccggaaccgtgggaggtactatggactcactggcaccatcgacaaggccaaaatcgcggagatagcaaagtccatccctggtaaaaggggtcagcagaagttctcgcaggaggaggtccaacagatgatcaatcatgctctgcaaggtttaaatcaatcctgggaggagaagtttaaatccctggagcaaagtgtgcgtggtgcgccattgttaggtgttgatcatgagacccaagagattgatctggtgactctgcagcatgcccctgggtcttcggcagctggaggagatgttcaacaggaccagtcaaaacatcaggacgaatcagacaaacagcatgttgaaaggcgtcaatctgcgagacaccacgacgacgatgacgacgacgatgacgaagattatgaggttgaggaggaggaagtggtgtctacaagcgattgatctgcctccccgcgtagaattttggccatgtaatatataaacctgcgtctaatgctgtttccctgtccctggtcttttggagagatgctgaaatgcactgccagcagtggtatttcccgctgctacgctgactccgatcgatagtgaaactcatctcttggctcttgacccagatggccagaatagcttcatctcttcacgttttgtttattactctctttgttccaaaattagaaacctaataccggattagacatttcataccacgatgaatctggtaaatatctctatccggattcgtaatgctataaaatgtctaatccagtactagattcttacattttaagatgaaaggagtatctatcttctctgttc

SEQ ID NO: 23685 - DNA, 477 bp, Oryza sativa
  Clone ID: PAT_MRT4530_28741C.1
ttttgtttttttttttttttttttttttttttttttttttttttttttttttttttttttttttttttttttttttttttttttttgggggtaaaaccaaaacgggatttaaaagaccgcccaaaaacagggtttgggaaaaattttcccctcattaaaacacacccctacttttagctgcaagggggccctggaaaaattgggaaacggaacaacaattttgaggcaaacttcacccccccaggaaaacaacccctttttttttttccaaaccaaattccaaattcaaaagatcttcaaattttaaatccgaagggatcggaaccacccaaaaggggccttgaacttgccggccccgccggcgttttaaccccctccccggaaaggtgtttaacgggtgcctcccctgggaccgggtcctcccggtcccggtcccctgggcggggtgccccagcctccgggaccccccccgaaggg

SEQ ID NO: 23686 - DNA, 246 bp, Oryza sativa
  Clone ID: PAT_MRT4530_28742C.1
agggaaagctggtaggcctgcgcgtaccgtgtacccgaattgaccgatcgacccaagggttcgccgacgcatgagcgaaaccggggaggggggcgcactgaggttctgccgctcacctttccagctctcaacttggggtcgctgggccaacttgcgatctttcacgattggggtggtgtatccagatccggctctgagcgagtggctggcgtgtacaaacgaagccatataagggatctgtctggc

SEQ ID NO: 23687 - DNA, 347 bp, Oryza sativa
  Clone ID: PAT_MRT4530_28743C.1
gtatacgccaaataaaagcaggatttgaatcttacagggatagtatacatatcgtcacatattttggcaagcagtgcaagcatggaggcacagggcgaaaagaaagagagagggcctgcagtggctattgtacatattcctaagaaaatcatgtactctgagatggcaacacaactgtatgactggataaaaatatgtaggtgtttaaacaaaggatagaaggaaggatgcgcaccatgcgcaacggcagctcatagaattttccaaagctgagcatggggagcaactcattctcgagcttcaagtgcttgaaatgggggaacaataccgtgtgacgcgtgaggccg

SEQ ID NO: 23688 - DNA, 203 bp, Oryza sativa
  Clone ID: PAT_MRT4530_28744C.1
atggcgacgccgagcaccgctctcaatgccgcatggcggcagaggagcaggaggtcacgcgctgtgcttcactttgcacctcgcggccttcactctgcatctgcacaacactgcgggtttgtaatccaacggagcaacccgatagggaatagcctgctcagcctccccatcccaggcagtgacgggctcacggcccacccgag

SEQ ID NO: 23689 - DNA, 815 bp, Oryza sativa
  Clone ID: PAT_MRT4530_28745C.1
ggcgctctaaactagtggatccccgggctgcaggactctccaagccggctgacgggggcgaggcgcgggggcgtccaggtgtagatctggggtcggagacagaaactctggtggcggctaactggcctggcaacgcagatcggtaagatgggtgtatgggcggcgcggatgctaggggacggcgacggcgactccgatgcggcgtctttccggtcccctctcgcacggatccgtcatcagctgcgacgggaggggttggatccggcgacctgttcctctcccgctcggatcccgttgtctctccgtgccccgctcacgcagatccgccgccggtgttaacgggagggtccagatccggcggttctaccgtggtcgtggcctccctgccgccgccgcctctgcgcgcgcggcccctacgccgcccccgcccctgctgcctccttctcccccacgccgtcttcgatggctgcgataaggggcggcggcggcggcggtgggaggcgctagagggagggatatgaaggggaggcgcatggtccggtgggtgaagactgaagaagtgggcggtcgatgagatggaggcgaaggtggcgagaggtggtcgtcaagacctccgtcgagcatctggatccggcatcccttatcctagcgactgatggcgctggcccgttcctcatccatctcgatctgacagcgccgcgctccgcaggaggaggtcaccatctaccagtccaacgacggcaatatcttcggaaacatcatccggctcactggagctatgctgataggcgagccttacgggagaaacaatgtcc

SEQ ID NO: 23690 - DNA, 564 bp, Oryza sativa
  Clone ID: PAT_MRT4530_28746C.1
atgaatctgttcgatgcctctcgatatcctgctgctgctgcctttgtattgctctgcacaaacgccgccgctgctcttccaccccagctccagcaggtgaactccggcgaggttggtcggcgatacactgccaggcgacgccgctacggcacttccacccccgactccggcaggcgaactccggcgaggttggccgccgacacgccgccagccacacgccgcagcgacactgtctttccccggcgacccgcggtcaccccccccctaaaacactctgcatatgtgcatccatttttttcgatcccctcatctttggcccgtttaccattcggcggtgctatttcggacggccaaaactgcttcgacgatgaatcgctctcagggaccagcttcttggccggggatgtccagagttcagccaagcacactgctgatctaattgggaagtttgatcaggaggagagatttggtatccagcattggatttggcgggttgctgggattgccgcaaatcgacggattcgacagaagattcacaacatggctgctaagcagagtaaattg

SEQ ID NO: 23691 - DNA, 1100 bp, Oryza sativa
  Clone ID: PAT_MRT4530_28747C.1
ggctgggcttcttcttcgtcgtctcatacctaatcgtgcggcgagcggcggcaggcggtcggccgacggcacaggtcgagcggcggtcggcggcggggatgagcggctggcagttgccgcgggtatcggagcgaagcttggtgaaggtgaaccacgagtaaggtgacgtagtgctctgctggatgggctcatccgggggtgctctgggtggccgtccgcggtatcctctacgtgcgagatccagcgacctgagtgtctcggctttgcggtcgtcgttgggtttgcgcgtggtgtgttttagatccgcggcgcgctcctatttgctgtccgcttctctccgcgtctacccacgctgaagttgtgcacgcgctccttagttgtcacctacttccgattcggcgttggtcgccgcaccatagcgaccgttcgcactccgtggtcatcttgtgactctgtgcgtcgtttattcacggagcattcctcagttcggtcgcatacgcgatccagtcctattgttctcgtgtcgcacggtatatttgtgatgtctgtcatgactcaatattcacctctcacttttatcttatctcggccgattcgtgtcgtgtgcgttgattctgcgccctgccgattttgtctggggtctaccttacctctgtgcctttgcgcacctcgctcttctcacctgctcactcttcgtccctgtctatctgcgattactctcggttcattgctcctcgttgtctagtctgtgtcctcgctgtgtacgctgtgtactggcatgcgtctctcgtttcttgtgatagtctggagtccggtattcctattcctcccatgccagttagcatggctccttgaccctacgtatagccgaccgtctctacctttaacctttgttccctcgtcggacatgtcgtctaggtctgttggtccgcgtcatcgtgctgcgctgcccaagtggtcctggcggtctacctcgtgctgcgtctttgatcgtactttgcttctcgcttctcccgtctccggccccgaggcactacgagggctagcttcgcgggctgtgatttgttgctgcgcccgctcttccgctgttcttcggtgtg

SEQ ID NO: 23692 - DNA, 746 bp, Oryza sativa
  Clone ID: PAT_MRT4530_28748C.1
ggtccccccgggcaggggagacgtcggcgacgaaagctccggcgatcgagcggcagctggcttgcagccttgaggacctctacaggggcgccaccaagaagatgaagatctctagggatgtcctcgacgccactgggaaaccgacaaatctggaggagatcctgacaatcgatatcaagcctggatggaagaagggtacaaaggtaacctttcccaagaaaggcaatgagaagcctaacatcataccatcagacctagtgtttataatagaagagcggtcgcacgctagattcaagcgagacaaggatgatcttatttacacgcataggatctcgctcgtggaggctttgaccggttgcacagtccaactgacaactctggatgggcggaatttaaccgttccagtgaagtccgtcatcaatcctacttctgaagaggttgtgaagggcgaagggatgccaatcacaaaggaaccgtctaagaaaggggatctgaagatcaggtttcagatcaagttccccaccaatctaacgtctgaccaaaagtcagggatccagcaacttttgcctaagccttaactggtagtacaatattgtgaacctgtatttagtcgtttgtttagcagttgggaatacattgagagggtttgatcacagttgctgaatgtacaatcactgcttcggtgcaagtattgaagaacatgtttgcattggtatttcccaaaaaaaaaaaaaaaaaaagggcgg

SEQ ID NO: 23693 - DNA, 1332 bp, Oryza sativa
  Clone ID: PAT_MRT4530_28749C.1
ccccgcgtccgctcttcttcttctacccatctcgccgtcgccgccgccgccgccgccgccgccgtcgaatcgatcgaagcccagcagcgagcgatggggctggactactacaaggtgctcggcgtgggccgcggcgccaccgacgaggagctcaagagatcctaccgccgcctcgccatgaagcaccaccccgacaagaaccgctcgccgcacgccgacgactccctcttcaagcaagtctccgaggcctacgacgtgctcagcgacccgcagaagcgcgccatctacgaccagttcggcgaggaaggcctcaaggccggcgcggcgccgccgccgaccacctcctcctcctcctcccacggcggcggaggaggcttccgcttcagcccgaggagcgccgaggagatcttctcggagatgttcgggggcgcattcggcggcgcggggccacgcgcccccggcgccgggttcccggggttcggtgggtccccccgggcaggggagacgtcggcgacgaaagctccggcgatcgagcggcagctggcttgcagccttgaggacctctacaggggcgccaccaagaagatgaagatctctagggatgtcctcgacgccactggggaagacggagtaaaggggaggaaggttgagaggagaggaagattgagggtagtacacgagaggagacatgagagaaggagctttgacttttcggggaaaaggaaaccgacaaatctggaggagatcctgacaatcgatatcaagcctggatggaagaagggtacaaaggtaacctttcccaagaaaggcaatgagaagcctaacatcataccatcagacctagtgtttataatagaagagcggtcgcacgctagattcaagcgagacaaggatgatcttatttacacgcataggatctcgctcgtggaggctttgaccggttgcacagtccaactgacaactctggatgggcggaatttaaccgttccagtgaagtccgtcatcaatcctacttctgaagaggttgtgaagggcgaagggatgccaatcacaaaggaaccgtctaagaaaggggatctgaagatcaggtttcagatcaagttccccaccaatctaacgtctgaccaaaagtcagggatccagcaacttttgcctaagccttaactggtagtacaatattgtgaacctgtatttagtcgtttgtttagcagttgggaatacattgagagggtttgatcacagttgctgaatgtacaatcactgcttcggtgcaagtattgaagaacatgtttgcattggtatttccaacattactccaattgattgccaact

SEQ ID NO: 23694 - DNA, 2301 bp, Oryza sativa
  Clone ID: PAT_MRT4530_2874C.1
atgtcgtactacgtagatcctcgtaccagcgtaccccaataccctctatattcggtctacgggtatcccccgtcgacagtggcgtgccaggtagggggacttggtgctcaaggttctactactatgacatccagtttcaccgacaacagcgttaacaccaatctcaaccaaggagttcctacttcaacaacactggtgtggactcaagtcggcgaaatcgtctttccggtttacaccatagtgctgatctcagctggtccgccaatggccggaaacgagaacgcagtggctagaacccggggtgactccatgtcgaagaatccagccgccgaagcggagatcggaacgtcgacaacatccgagcccgagaaggatcctagtgcggccaagccttgtctttccaacaggaatcacgagccgatgaggattacttccgaggtgacaaggtcctggtgtcctatccacaaaactaggaaacacaccctgcaagcctggtgggtctttctcaacgttcatgctgaaattcgtgcctgcaaagagtgtggaattcaacatacctctccaactcgtgatgtccattgtcctattcacaagacaaaaaatcacgacctctcgagttgcaaggtctttctcagcgccatgaagacaccacctcctaaggtccagcagtcacgcatccccatcagggatgaagacaaggaacaaggagcgacgccgattttagatcgatttgttggggtaatcgacatcgatccccacgaaccatcagtcttgcacttgctcgaagactatggatcatcgacaacgagtacgccgcgtgaggtattggctattgacgatgtcggcacgtcagtgcgcaccaatgcggaagcggagaatcaagtgactgctccgacccagcacatcagagccatcaacgcaatactgagggaaaccccctacgatcccattctgaacgacgatcaagcacgttggatagaacgactacaggaatcagtgaccaacctcagcaacgtgttcgaagaggccgctaccgcagcacacccagaacagccaccaactggcgatgctaatgatcgaggaggccattcaagcgaagaccgagaccgtgataaccaccataaccacgatgatcgcgaacggcggtgctgggcgatactggtcgaggacatcgccataataacgacgatgatggagatcggcgccgagacaataacgggagacgacgacaggattctcgagaacccggctgacgtcctcataatcagattattcgaaattgtcgatcgatgcgctcatgcggatgacgcactgaacgacaaaccgaagaccggagaagagaagaaaccagccaaggacgcacctgagtcaagcaagaagaaaaatcgcaagagtgggaaaaggaaagctcaatcggaagttctcgcaacagaatatgcggaccctcccaagcgcccagacccacaaggcagcgacacgaataaagcatggtgccccatacacaagtcggacatacattctctagaagattgcctcgttttcaaaaagtcgctcgcaaaacacatggcatcggaaaaaggcaaacgagtacacgtggttgagaaggacgctgaggcgcctactcaggaatcggactcagcatacccagattccgatcttcatgtctcacacatcttcggaggttccacggcatactcctcaaagcgagaatacaagaaagtggagcgtgaagtctgttcgacgtggcagggggctacgccaaagatgaagtggtccgagcagaagatagaattctcggaagaggaccaccccaagattgctgtcatcccagggcgatatccgatcatggtcgaacccactattcgtaatatcaagtcattgtccaaatcattgggcaaaattacgttgcctgtgactttcggccaagcaaatagcttccgaacggaacagatcacctttgatgtcactgaattcgatacagcatataatgccatcattgggagaactgcactcgcgaagttcatggccgcatctcactacgcgtatcaagtgctcaagatgccaggaccgaagggaacaatcactattcaagggaacgctaagctggcagtacaatgcgacaagcggagcctcgacatggtcgagcacacgcctagcccacccgccacagctgaatcacccaagaaagtgagcaaaacaaacaagacgccgaagccggacggcgcaatcaagatcgttccactctccagtgccaaccccgacaagaccgtcaagatcggggcatcactaggcgagaaatag

SEQ ID NO: 23695 - DNA, 306 bp, Oryza sativa
  Clone ID: PAT_MRT4530_28750C.1
atgaagagaggactaaaattaacacgccttgattctgatgtcctcggcaagatgctgatcctaccatccattgcaccgaagaatcccaggtacaacctgagaaagtaccagctggccgctcagaattcacgtcagaaacacaaggacaggccaggacacacacgaggccaggacgagaaaattgacatacactggctcgcttcggtcggaaatttccaggttgtcaacctagcccgcgattggcaccaccgcgccgccgcggcccacagcaacctcactagtcacaagtgggtggccaccatatga

SEQ ID NO: 23696 - DNA, 1107 bp, Oryza sativa
  Clone ID: PAT_MRT4530_28751C.1
attgggttggtggtgcttgagaaagtgggtggctggatacgaagaaagtctaacagtttggacacgtgtgatggtggaggaccaaactaggaccggccagggtacacaaacgacaattgttgacatacagatccacgtcttacaaaaatataaaagattacaaatgcagcggaaaaacgggcgactccattccacaggcatccttgacggcagcgacgaaaccaacctcttcgagacatcttcaactgagaaggacttcaactctggtgtgggggaaaagagagcaagactgagtactacccacttggcacaaggcgggaggggcgcggctggtggctcggctcggcttcaaagccggcaggccaagcatggcgaatgacggcggcacgcgcggtcgccggcgacggcaaccggcggcgcggacggcgacggcagacggcgcgaaaagcggcggcggcggccgaagacgacgatgcgcgcgcggaggacggcgacgcacacggaagagagggaaagagggaggagggggaggaacaaaatgggaaggattagagggagaggggtggtctacggcgggcggaaaccatggccgaaggcggcggcaatggtggtactcaccggcgcgcggggagaagcgggccccgacggcgggattggatggggatgcggcggccggggtagctttggcggcggcgaagctaatggcggcgcagcggtgcgggagtgatggagggcacgggagagagcggcggaaagaggaaaaaggtggaggggagtgcggggaagctttattggggctcgagagagacggacgaggccgggaggcggccggatttctcgccgacgtggggaatggagagagagagagagagagtttcgaatttgaatccctccgttgcggggtgcacgcgcgagtgggaggagtggggatggtgggcggcgacgtgggcgcagggcgcggagtggggcgcggaaggcggggaaggcgggcggcgatgggtggtggtttcggcggcggttggcgcaggcgtgggcggccggaggttagggaaagggctgacaggtgggccccacctgtcagcgcccgagagggagagggaggccggg

SEQ ID NO: 23697 - DNA, 489 bp, Oryza sativa
  Clone ID: PAT_MRT4530_28752C.1
atggcggcccgtcggcaggctagcagcggcacacacacctcaaatcgagggggccaaatgtttctaggtgttagacgcactctccccgacgtccagcggctcccggcgttgatgcaaggcagcagaagaagtagaggcggcccgagccacagctcccgcgatagggatggagtttttatgggggggattggcttggggataagccaggatggcgtggaggataggatcggcagctggggtggtgtgggggtgacgtcgcggccgttacccctcggctccgagacgatgggcgacgcgacgttgctgatgcgcgctcccgtggcggcgcggctttggcgcgggttttcggtggctcggtcggcggcgggcccacgcggtgtggcgcacgggcacgcccaatgcggcgcacgagcagagaaggcgcgaattttcaggatgttacaatgcattgccagcaatgttaggttcgacaacactaccattgttctg

SEQ ID NO: 23698 - DNA, 2010 bp, Oryza sativa
  Clone ID: PAT_MRT4530_28753C.1
atggcggcacaactaaagagtatggacatgtccatctctgatggtttcctggttcacttcattatgaactcattgccatctgactacgaaggcggaaaggcaaagaagcaagcctaccttgttgataatgagaaaggcaaaaggaaggctgatgagatttgtgctgctgaaaccagtaagaaacccaggaactctccacacaagcccaagccaaaggggaagcctaagacaccagcttctcctgctcctggtccatcagcaagtgccataatatgcaggttttgcaaaaagccagggctcattcagaagaactgtaatggctttaagaagtggctcgctaagaatggaattgagttccgtgaggactatcgcaaagggggagcgaacgggcgactccattccacaggcatccttgacggcagcgacgaaaccaacctcttcgagacatcttcaactgagaaggacttcaactctggcaacgggcagcccccctttcgtgccgcggtgaatccggaagccgatcaaccggacaccccggccgacccaactccatcacgcccaccctcgcctggggctgacgtcagcataaggaggggtggcgccgacacgcgggacctgcgggtcagtgactcaaggagagagaggggcggctggcaagcgggccccaccgagcggcggctcaagagagagagggaggggcgccggcacgtgggccccactggcagtggcacaaggcgggaggggcgcggctggtggctcggctcggcttcaaagccggcaggccaagcatggcgaatgacggcggcacgcgcggtcgccggcgacggcaaccggcggcgcggacggcgacggcagacggcgcgaaaagcggcggcggcggccgaagacgacgatgcgcgcgcggaggacggcgacgcacacggaagagagggaaagagggaggagggggaatttttcaccgagggaacaaaatgggaaggattagagggagaggggtggtctacggcgggcggaaaccatggccgaaggcggcggcaatggtggtactcaccggcgcgcggggagaagcgggccccgacggcgggattggatggggatgcggcggccggggtagctttggcggcggcgaagctaatggcggcgcagattgactcggcggcggcgagcggcgaccggaggagtggaaaaggcggcggcggcgggtgtagcggtgcgggagtgatggagggcacgggagagagcggcggaaagaggaaaaaggtggaggggagtgcggggaagctttattggggctcgagagagacggacgaggccgggaggcggccggatttctcgccgacggcgcggagtggggcgcggaaggcggggaaggcgggcggcgatgggtggtggtttcggcggcggttggcgcaggcgtgggcggccggagtgcgctcagatcggggaggagagtactatggcaagagtgctccatatgggcaaattccggggccatttgccaaattcctacaagaaaatggcattgtagcccaatactctatgcccggagaaccacagcagaatggagtggctgtgcgccgcaaccgcaccctaatggacatggcgtcttcttctgtggcccaggctctagttgaggatattaatgaacctgtagcacaagataatgtgcaaactccacaacccactgagatcactaatgaaccattaagaagaacacagcgagagaggaggtctgctattcgcagtgactatgaggtctatattggagaagacattgggaaatcagacgatcctacttcatttaatgaagccattaatagtgaaagttcatccaagtggcttgaagctatggaagatgaattaaagtctatgggcactaatggtgtttgggatttagtagatattcctgaaagggtcaagacagtaggctgtaaggcgacgccatctgcttcacctccggcaacttgctaccacgacctcgacatcaccgacgactcctaccgcgactaa

SEQ ID NO: 23699 - DNA, 1066 bp, Oryza sativa
  Clone ID: PAT_MRT4530_28754C.1
atggcggcagcggaggactgcagaggcagtggtggcggagggcgacgaggcagcagccacgttggcggtgtcggcggctggagacagcagcggcgatggcggccggcttgcggcggccgtgaatgtggaggcaaggtgacgaccgtggctgcggtgggaggaggcacggtggtgaccaccgtggctgaggcaatccttgacggcagcgacgaaaccaacctcttcgagacatcttcaactgagaaggacttcaactctggagtgggggaaaagagagcaagactgagtactacccactgtactcagcaagtcataccggaagaggagggttcgcccccgtccccagcaggcaacgggcagcccccctttcgtgccgcggtgaatccggaagccgatcaaccggacaccccggccgacccaactccatcacgcccaccctcgcctggggctgacgtcagcaaggggtggggcggcgccgacatgcgggacccacgggtcagtgactcaaagagagagagaggcggctggcaagcggggcccaccgggcagtgacacaagggggagaaggggcggcggcagcccccgggctcggatcggcatcaaagccgatcggccgacccgggctagcggcggcggcgcgtgcgcgtcacgtcgccggcgacggcatccggcggcggaggcgacgcgaaagcggcggcagcggacggcggcaacgacccaaagcgacgggaaggagaagagaggggttagagagagggagatagaccacggcgaccggaatccatggccgaaggcggcggtagaggttaaacccaccggagcgcgaggagacgggtgttccggcggcgaacctcgacggggaaggggcggccgagggggagagagagccggacgtggccgggaacggcgggattcgccggccgacgcgggggagtggggaggagagagaggcgggattcgaatttcgaatcccggccatcttgggcgcgggcgcaagtgggagagagaggggaaagggcgcgggaaacgcggcgcacgcacgggcgtggaccacgtgggccgagga

SEQ ID NO: 23700 - DNA, 897 bp, Oryza sativa
  Clone ID: PAT_MRT4530_28755C.1
atgggtgctactgccggcgtgcggcctcttgctccgtttttgctaatgccgccgcgatggctacgtgaggtgcggcggccgggctacgggggcgctggtggccagatggcagtgcaaagggagctggcggcgcgggggaagctcagggtaccgaagcagtgccacccagtcccgggttctccttcagccagatttggcgaggcggccggcgggtggtggaacggaggggtcctgggccagttctcagggtggcggttcgatgaagtcggccaacggaggggcgttggactcgaagctagccgggccagctctcagggtggcggtttgatgaagtcggccgacggaggggcgtcggtgcgcggacgactccattccacaggcatccttgacggcagcgacgaaaccaacctcttcgagacatcttcaactgagaaggacttcaactctggcaacgggcagcccccctttcgtgccgcagtgaatccagaagccgatcaaccggacacctcggccgacccaactccatcacgcccaccctcgcctggtggcacaaggcgggaggggcgcggctggtggctcggctcggcttcaaagccggcaggccaagcatggcgagcgacggcggcacgcgcggtcgccggcgacggcaactggcggcgcggacggcgacggcagacggcgcgaaaagcggcggcggtggccgaagacgatggtgcgcgcgcggaggacggcggcgcacacgagagagagggaaagagggaggagggggagtttctcaccgagattggccggcgcgagtggacacgacggcgaacgacgacgacaagcgacgggaggacgacggcgacgggcagacgatctccgggaccttctagggaacaaaatgggaaggattag

SEQ ID NO: 23701 - DNA, 671 bp, Oryza sativa
  unsure (1)..(671): unsure at all n locations
  Clone ID: PAT_MRT4530_28756C.1
ctgcaggaattcggcacgaggccagaagagcacctgctcctcctggaggtggaagctgcggctgtttcgggagaatatatttatgagggatgggatccagagctggtaaagcatgttttgagcttcttccatccagacaacatgagagttgatgtccttagtaaatcatttgacaaacagtcccaagctattcaatgtgagccatggtttggcgcacaatacatcgaggaggacattccgtcatctttcatggaaagttggcgaaacccagcacaaatagatgatgcttttcatttgccacgaaagaatgaatttattccanggggactttaatctgcganaatgctaatatgccaaaacccctgagtgatgataatcctcgatgcattgtggatgaaccattcataaagctctggtacaagatggacatgacatttaatgtacctcgtgccaacacatactttttgatttctgtcaaggatggctatagcaatcttgaaaactctgtcctgacagatctatttgtaaatcttcttaaagatgagctgaacgaggtcctctaccaggcatatgtggctaaactggagacttcaatgtccgttgttggtagcaaccttgaattaaagctttatggttacaatgacaagctgtccaccctgctgtccagtatc

SEQ ID NO: 23702 - DNA, 969 bp, Oryza sativa
  Clone ID: PAT_MRT4530_28757C.1
atggaatgccctggttttcaacttgagagcggtgcatctatacaaccaggcgactttatccccagtgtctccaggccaaatggggctaggcaatacatggcactcaaagtattcaaggatagtgcttcaggggattggttggtgtactacgggttcaatagtgaccctgaactaattggtcgtctccccaaatcaatcttctcaggcctggcttacaaggctatagccttatggttcagtggcatggcgattaataatgcaacgtttcagccgacacccgctctgcctccggtgggcagcggatacatggcaggtcatggcagcaacatggcagcatccatgagcaacattcaactcatcgacgagcaggggcaagcgttgtcaacggcgagacattttataggtttctcatccaacccgaagctctactcttacacggcgattgttgacgaccagtttttctatggcatagatgacatcattatcaaagttcaaaaatacatattgaaacttttcatgaccatttgcttgaactttaaaatcttcgacggtctcgccatccttgaactcaatcgcctcgtactccttcaagagagtctgcgccttcaccttgcgcacacgttcgacaccgacatgcagcgtcttcactgtgtcccaagcctcctaggcagtagctttgatggcgagtgtgccgagcagcttggcaggaacgacacggaggattgcctccagcactgtgcgatcctcctgaaagttagcatcgccatgctcaactgcatcccacagtccgcgcgcttgaagcatgaccttcatcatcagcgctcaatcatcatagttcgtcttcgtcaacatgaggtagttggccgggccgcccacctccttcaccacccgccaaaatgacacaagtgcatcgccattactctctttctgagcttagttggttttagttggtttttgtttcactatgaa

SEQ ID NO: 23703 - DNA, 332 bp, Oryza sativa
  Clone ID: PAT_MRT4530_28758C.1
gccccagggatgacgtcagcagggggggaaggcgccggcatgcgggccccatgagtcagcggctcaagagagagagagagggaggggcgccggcacgtggctcgactcggcttcaaagccggcaggccaagcatggcgggcgacggcggcacgcatggtcgccggcgacggcaaccggcggcgcggacggcgacggcagacggcgcgaaaagcggcggcggcgaccgaagacgacggtgcgcgcgcggaggacggcggcgcacacgggagagagggaaagagggaggagggggagtttctcaccgaggttggccggcgcgagtggagacaac

SEQ ID NO: 23704 - DNA, 1188 bp, Oryza sativa
  Clone ID: PAT_MRT4530_28759C.1
atggaggatgctcgtgacagaagggaggttgcccgccgctcgccgctgtggagaccaccaaccccggcgtcagctggctgcttcctcgcccacgacgataaccccgtcgccatcgccttccgccgcgcccggctccgcaaggatccctaccgccggccagagaggggaggggagacgcggccgggtgctgctgctgctggcaccccgtcgccgtccaactccgggctcttcgcggatgcggcgctccacgccgcgcccgggagcggcggcgcgcgcacgctgcagcctgccgcgaccgcgacggaggaaagccaagcagcaagacgaggagctgacgacggtcatggctaccaccgcttcgctcgaggccgcgccgtcgctccaccacgaggccggccaggccgccgcacacgtccgagccgcccagccggcgcaccgttgctctgtctcaaggcaagatcgccgctgcttcgcctcgagagcgagccactgctacggggcggcggtaggcgaagcgggcacgatgccaacgagagcttcttccggcgctggtgccgccgcccagcttcttcccgcgagctcgcccgccacggcgcctgctccgcccactgccgccgccgcccctgcttcgccgccggccgcctctcccacatctgccgccgcccgagaagagaagagaaaaggaaaaaaaagaagagagcgggcgattccattccacaggcaacccttcacggcagcgatgaaaccaacctcttcaagacatctccaactgagaagaacttcaattctggtgtggaggaaaagagcaagactgagtactacccactgtactcagcaagtcataccagaagaggaggcaacgggcagccccccgttcgtgccgcggtgaatccggaagccgatcaaccggacaccccggccgacccaactccatcacgcccaccctcgcctggggctgacgtcagcaaggggtggggcggcgccgacatgcggaccccactgggcgagggcggtggcggcaagcggccaccgacggcggtggccggcgagaagacggcggcggccggcgacgcgggcgacgctttggcggcggcgaagctaatggcggcggcagattggctcggcggcggctccagcggcggcgagcggcgaccagaggagtggaaaaggcggcggcggcgggtgtag

SEQ ID NO: 23705 - DNA, 273 bp, Oryza sativa
  Clone ID: PAT_MRT4530_2875C.1
atggcgctctggcgtgcgctcttcctcgccgccggcaacgggaacgccgcgctcgtccgggcgctgcttatgagtgcccttcccctgcccgtgcttctcgaaattcaaggtgttccaagccggggatgcccccgtgcccccaaggagcagctgacgacgtgcattaggccacgctcgccggccaccggcgccggtcctcgagacaggaaaaggggaaagagagggggagagggaatgacaggtggggtctacatcaagggtattttggtctga

SEQ ID NO: 23706 - DNA, 1047 bp, Oryza sativa
  Clone ID: PAT_MRT4530_28760C.1
gcattaaacccctgtccaggaccagccagggtacacaaacgacaattgttgacatacagatccacgtcttacaaaaatataaaagattacaaatgcagcggaaaaagataaaagcgagctaagcctgaagacttgactcctgcagcgggcgactccattccacaggcaatccttgacggcagcgacgaaaccaacctcttcgagacatcttcaactgggaaggacttcaactctggtgtgggggaaaagagagcaagactgagtactacccactgtactcagcaagtcacaccggaagaggaggcaacgggcagcccccctttcgtgccgcggtgaatccggcagccgatcaaccggacaccccggccgacccaactccatcacgcccaccctcgcctggggctgacgtcagcaaggggtggggcggcgccgacatgcgggacccgcgggtcagtgactcaaggagagagaggggcggctggcaagcgggccccactgagcggctggcacaaggcgggaggggcgccgctggtggctcggcttggcttcaaagccggcaggccaagcatggcgagcgacggcggcacgcgcggtcaccggcgacggcaatcggcggcgcggacggcaacggcagacggtgcgaaaagcggcatcggcggccgaagacgacggtgcacgcgcggaggacggcgacgcacacgggagagagggaaagagggaggagggggagtttttcaccgaggttggccggcgcgagtggagacgacggcgaacgacgacgacgagcgacgggaggatgacggcgacgggcgaacgatctccggggcctcctagggaacaaaatggaaaggattagagggagaggggtggtctacggcgagcggattcgccggtcgaaggcggtggccatggtggtactcaccggcgcgcggggagaagcgggtcccgacggcgggattggatggggatgcggcggccagggtagctttggcggcggcgaagctaatggcggcggcagattggctcggcggcggcgagcggcgaccg

SEQ ID NO: 23707 - DNA, 801 bp, Oryza sativa
  Clone ID: PAT_MRT4530_28761C.1
atggggttgtacatacgaagggattttcctgaagcgggcgactccattccacaggcaatccttgacggcagcgacgaaaccaacctcttcgagacatcttcaactgagaaggacttcaactctggcaacgggcagccccccttttgtgccgcggtgaatccggaagccgatcaaccggacaccccggccgacccaactccatcacgcccaccctcgcctggggctgacgtcatcataaggaggggtggcgccgacacgcgggacccgcgggccaagcatggcgagcgacggcggcacgcgcggtcgccggcgacggcaaccggcggcgcggacggcgacggcagacggcgcgaaaagcggcggcggcggccgaagacgacggtgcgcgcgcggaggacggcgacgcacacgggagagagggaaagagggaggaggggaagtttttcaccgaggttggccggcgcgagtggagacaacggcgaacgacgacgacgagcgacgggaggacgacggcgacgggcgaacgatctccgggacctcctagggaacaagatgggagggattagagggagaggggtggttaacagcgagcggattcgccggtcgaaggcggcggccatggggtactcaccggcgcgcgaggagaagcaagctccggcggcgggattgaccggggaaacggcggacggggtggcgcacaagcttgcgaacccggcggcgtcgacggcgcggtgcggcgacggctctagcggtggcggagtgcggccggagcttggcggcgagcggcggacggcgggatga

SEQ ID NO: 23708 - DNA, 1626 bp, Oryza sativa
  Clone ID: PAT_MRT4530_28762C.1
atgtgcattaaaccccctgtccaggaccagccagggcatccttgacggcagcgacgaaaccaacctcttcgagacatcttcaactgagaaggacttcaactctggtgtgggggaaaagagagcaagactgagtactacccactgtactcagcaagtcataccggaagaggagggttcgcccccgtccccagcaggcaacgggcagcccccctttcgtgccgcggtgaatccggaagccgatcaaccggacaccccggccgacccaactccatcacgcccaccctcgcctggggctgacgtcagcaaggggtggggcggcgccgacatgcgggccccattggtaagcggcactaagggagggagagggggcggctggcaggcgggccccactgggcagtgtcacaaaggggggggggagcggcgaggcgcccggtcggcccggctcggcttcaaagccggcaggccaagcatggcgagcgacggcggcacgcgcggtcgccagcgacggcaaccggcggcgcggacggcgacggcagacggcgcgaaaagcggcggcggcggccgaagacgacgggaacaaaatgggaaggattagagggagaggggtggttaacggcgagcggattccatggccgaaggcggcggcaatggtggaagctcaccggagtgcgaggagatgcgagccccggcgatggaattggacgggagaacagcggacgaggtggacctcgggatggcggacgcggcggcgccgatggcgggctggcgggaggtgcggggaaggtgggcggcgacgtgggcgtgcggtacgggcggagtgggcgcgggaacagcgggatacgcggcggcgtgggcggtggtttcgacggcgttggcgcgggcgtgggcggccggagtgaatctggaagccgatcaaccggacaccccagccgacccaactccatcacgcccaccctcgcctgggtacgtctgctagaggaaagctacactacaagcccagccgttgcccacgctggcttgtgccgaccggccggccatggggcggtggcgcgcgcggagctggcggcggcacacggttatcggcggcggcgcgggagtcggaggcgacggctggaagcggtggcgcgggaggcggcggagtcggccgaaggccacgacgagtgcgtggagaggggcggcgcaaacgagagagaggggaaaagggaggagaggggatcctcaccggcgagcacggcggccggcgcgaaggatgaaggcggcggcgacgacccgacgagcggaggggcagacgggcaccgagagagaggcgttccggcggtgggattggatggggatgcggcggacggggtagctttggcggtggagaagctaacggcggcggcggattggctcggcggcggctctagaacgtgcggcgttcggacgggaccacggtggcgagcggcggcgcttgacgagaatcgcgtgtgccgcggtcaacggcttcagaacgccgcgaacaggcgcaagggcaatgggaaccgggaaaccataatggggccgggaggggggaccgccggagagcccgcaaccacaccgcgcagcgcgccacgcgccacgaacaacgacgagcacacaccgccgctc

SEQ ID NO: 23709 - DNA, 1210 bp, Oryza sativa
  Clone ID: PAT_MRT4530_28763C.1
atcgatctctttccaaaacattcagtagtagtttacgggtcaactctgcatggcttcctctgcagcttactttgctttctctgtgcttgtggctttacacttgtgttgctgtcatggacaagctcctgatgctgctggtaatagcagtgatgtaactgcgatctatagccttggtgactccatcactgacaccgggaatctgatcaaggaggcgcctcctggcatgtttgagaccatcaagcatctcccgtatggcatcacgtttgggtacccgactggacgctgctctgatggcctcctcatgatcgatttcctcgctcaggacctgggtcttccatttctgaacccttacctgggcaagaacaagagcttcgaccatggagtaaacttcgccgtcgctggagccactgcaatggaccctaccgatcagttcaacgggagattcttcgcgcctttctcttctaactcccttaatgtgcagcttaggtggttcaaggacttcatgaagtccaccttcagcactgaagaaggcaattcccctgatcaatttcatatacgcaagaggctccagtcttctctggttttgattggggagattggagggaacgattacaactacgccttgtttggaaaaagtgtcagcgaagtggagaagctaatcccaagtgtcgttcggaccatcatagatgcagccaaggaagttcttgaaatgggcgcgaacagagtcatcatcccgggcaacttccccatcggctgcatgccgacctacctgaccagcaagcgctcatccgagccgtcggactacgacgccacgggctgcctgcgcgagctcaaccgcttcgccgccaagcacaacgcgaggctccggcgcgccatcgccgacgagctccggccgtcgtacccggccgcggccgtcgcctacgccgactacttcaactccttcctcgccctcctcgacgccgccggcgagctcggcttcgacgcgggcagcgcgcgcagggcgtgctgcggcgccggcggcggcgagtacaactacgacccgaggaggatgtgcggcgccgagggggcggcggcgtgcgcggagccggagaagtacgtgagctgggacggggtacacatgacgcaggcggcgtacagggcgatgtcgaggctcgtctaccatgggatgtacctggagccgcagatactgagtctcgcggatgcgccatag

SEQ ID NO: 23710 - DNA, 584 bp, Oryza sativa
  Clone ID: PAT_MRT4530_28764C.1
ctattttgagcagctacgacgtatgctgcccgccgacggcagggagcctccagtgcggccgccctcctttttttttttttttgttttttagcacaaaccaaccaccacaaacatgattataatcgccaaactgaatacaacgtgctgcacaatgagcgaatttgaggtatgaaaggctagttcgagtagaaaaatatcgaaaagatacacccccaaaaacaggctaaatagaaaatggccgtatgctaaatagccagctgtctccaccatggagaacgaatttatccggatgacatatgaagcatatcaggagtaacaccatccaaatcatgtctcaagaacgtactaattgcaagatagaccactcgtttgacgacaccgaacactttctgagataaattaaattgactgcgcgtgcaacacccaactggcacaaggcactgcccaatgagaaaaaacagcccatacgcggaagttacgtccatgggagataaattttttcacacgtataaacacacggggtttccttatcttcacgctggaggggcaaacatttatgcatgatattctgcttagggtctgac

SEQ ID NO: 23711 - DNA, 177 bp, Oryza sativa
  Clone ID: PAT_MRT4530_28765C.1
agcgccgcataggagagcagcaatgaggccgtcgctgatgagatccgcctcgcaggtcctgcgccgccgccgcggctactcctgcgcctgcggccagcctgatcggaaggtctccatcctcggctcggccggcggcatctgtcaacacgttcaccctccttatgaagctgaacccgc

SEQ ID NO: 23712 - DNA, 2862 bp, Oryza sativa
  Clone ID: PAT_MRT4530_28766C.1
atgggaaacgatggagaaaaggcatcaaaactatgcaaggaggcaggagggcctagcctagattcaaatcttgctccaaccatcgggctagcgctcaccaccgtccccatggggtgggataaccgtaggaggaaacacgcgagtacgataatgaatgcacgtggccgaggggctaggaatggaaacgggcccaaccgggggcgtgggggtggaagggctcattcagatgtggtggttggagcaaacaccaccgtactagcaacaaggaggtgggttgggttggagatagattccgtgccaggtaatgaggggcaacgtgacattgtgaactactacctccgttgcgccactggcgttggtaatggggagagggagctggcggtggtaggaacacaccatagcaataggagggtgacttatgtggtgcatgagccattcctacagtccctcaaggagctgcaggtggctgcggttgttggagttgaacgactcatgtggaagtcgaggaaggatgtggtgcactggctcaacatgctcatctcagatgttgcatctgatgaagttgcaatttgtaacaatgatggcaaagatgctaaacttgctaatatctccacaacaaagggctcttcatcatcaactgctggaaatgattcaggggatttcaaatggttaggtcctgaatcgcattctaaaaaagggaagagctacaaatccttctggcgaaggggatttacattcatggttcacgattttgtttacatcttggtccaacatggcaacaaacttgttgcttatgtggaagaactctatgaggataaccatgcaaacaagatggttcagatacgacggttccgcacactcaactccaccggtattcaactttctccaggtgttaatgatagagagatcctccactccgacaatttgcaagacatcggagttgaatgcatagatggattggcttcagtcctgaacgaagaacactttgagatgtttcaggcaattgccaacaacaccaacaggcaaccctacctatgcatccggcatatcgacaataacagcaatgtcaagacctttgacattgcacaactgcaagggtattcagaacaggagatatttagaatagtctcaggcacacctcccgtgaccgtgcatcccgacgcatctgaaggcagcaagaacacaccaagatcatcagccagaggtcatcatcatcatcggaccatggagaaccccactgctagtgatgagaccaatgttcaggccacaacaatcaatgtccttgcacgcaatgctgcaccaacagagtctgcttctgctctgataaactctgccctggagaagtatcttgagcagtacttctctcatggttgccttgtggaatgcctaagccaggacagtggcattaggggctgttggttcatcggttcagtgattaggaggtgcggagatcgcatcaaggtgaggtaccaacacctccaagatcccgaaacgccaagagcaaacctagaggaatggttgcttgtgacaagaaccgctaatcctgacacgctacgcatacgcctctctggaagaacaagaattcgtccccacaatatgtcggagagggagaacccctctacgatcagtgttggcaccgtcattgacggatggttgtatgatggttggtgggagggaattgtgctgaaggtgaacgatgcaaggaggctgctagcttacttaccaggggagaagaagatggtgctattccgcaaggatcaactgaggcattcactcgagtggattgataacgagtggaagaattttgctcaccgggaagatatcgcacgtcgaatccctagtgcggaagatcttagaataagagtcattactgcacgagaagttcttacaagagaagaagtaatgaagcaattggaaggcctgaaaacaaacaaaggtggttcaaactctgcaaaaccagctgcagagaagggaagtagcagctctgctactaagaaaaccacacctgatctcattaggcatgcaacaaatgatctaggatctttaaacttcaagcatgtcggtgttcctgcctctgaagaaattagaactgataacaagggatcgcaaaaccatgccactgccgtcaccttttccatccatccgcttcctttccgtcttcttccttccttctccatcttcttcacggcatcggcgtcctgggccatcccgtcggccgccgctctctggcgacagggctgtctcccggagccaagtggtcgtcgcggcagctgccaggtaccgctgctgctccccacgcgcgccggagtgccgccggccgtcgtcgcaaccgtggggttctgctgctgctgctcggccgtcgccgccaccaggtgccagcgcgagaagggaggatacagtgcggtggcttcagctatggcggtgcaaacgacggcggtggcgacgcccgcgctgacatgcggagggagggacggcgcgggctccggcacatggaaggagaaggggtgccgagggagccgggcatcggcgctgactcggcacgcaaaaggagccggggcacggagggatggggcggcggtgctggctccggtgctcagagaaaggagggaggggatggcggcgccagcttggctccctctcctccaagcttgccgacttggctctgggaggcggcgctatcgctggagagtggcggcggatgggctggcccagcagtggaactcggtggcggcgatggccgagcagaagtggaactcagtagcggcgacgactaagcagcagcagcggaaccccgcggtcgcggcaatggccggcgacactccggcacgcgtggggagcggcagcgggagcagcggaacctag

SEQ ID NO: 23713 - DNA, 345 bp, Oryza sativa
  Clone ID: PAT_MRT4530_28767C.1
aaaaacacacactggcctggaagatcagcttaacttcagtgcaggtacaaaaatcttgcctttaggttcatgagcgtgccaattgatttgatcctgcaatcaacaagaaataaagacaggaaaatagtggttaaatctataaacgatagccgatcggccaggactcaatccgtgcgtggcaatccctatgaagcatattaactcaacccgacaacgtgtaccgagtcacattgtcggaatcggctcaatcagctacctagttcgactcgaactctgctgatcctgatcgtagccgatttagactttagccgattcttgctctatttccggaacaatctctatctt

SEQ ID NO: 23714 - DNA, 732 bp, Oryza sativa
  unsure (1)..(732): unsure at all n locations
  Clone ID: PAT_MRT4530_28768C.1
ccacgcgtccgcgacggcaaaatctaggtgggcatctccatcgtcggtggctggtttgctgatcgccaccacgagcggcgtacccctcgtcgactctccacgacgtgcaggatcatggtcggggcaacgagacatcaggcgctggtgacatcctggcactgcttgtagcagaggcaacgggagttcaccccgatcgcagatcagagcagcccatccaagcggtggagaaattataagtagtgagggcaactccccacaattgtctcgatgatggtaagaacaagactttccagtccgatatttcatttcatattcatcaatggcggcgacgacaacacggcatcgatcgatttgcgaagcctatgcatcacggcatcatggtggcggcgacggcaccgccgcagcaatcgaaggagcagagaggcggctgcaccacagtgcgccgctacgactcctcgctaccgatgtggaagaagaatgatgaagctcctaattaactagttctttgctccatacagatgcatgacaaatacaccatntgatggtggccaacaccggngcagtattcgcatagttgcatcgattagctgatgtagatgcagaaaaggtggatttggcagtatgaaaattctgtccaaagcagcttgtgcaggtcaagatttggggtgtactgtacattcatttttcttctttttcagatggctaaatatgtatgaatccatatactgcctg

SEQ ID NO: 23715 - DNA, 792 bp, Oryza sativa
  Clone ID: PAT_MRT4530_28769C.1
atggcgcctcctcctatctcctcctccctctcgctcatggcctccaacccaatcccgtcgcctccggtcgccaaaccgggcaggccgctcaccgtcgcggcgtgcagcaacagcagcagcagctcctcctcctcctccccgtcgtcgacctcgtgctcggctgcctggagtctcccggtggcgacgtcggccggcaggagggggctgctcgcgctgggcgcggggttcctggcttcccctgggcttctgtgccccgccggcgacgccggagcgacgcgcatcgagtactacgcgacggtgggggacaagctgtgcgacatgaacgtcgtcaagtcggggctcggctactgcgacgtcgaagtcggcaccggcgcccagcccccgcgcggccagctcataaatgtacactacactgcaagatttactgacgggatagtgttcgacagcacctacaagcgaggacggccactgacaatgcgccttggcgcaggcaagatcctccgagggcttgaacagggaatcagtggtggcggtggtgtgccacccatgctcgttggtggaaagcgcaagcttatgatacctgcaactttggcatacggacctgaaccagcaggttgcttctcagattttcgagtaaattttggcgtttcatacaagaggcgggactacggacagatgaagagaaagggtgcgacatgcctaagcccagacgccgaaagcaaatgcgtcaccggagctccttgggtctccaatacgcagagtactacatttgcaatctgtaccaagaagtga

SEQ ID NO: 23716 - DNA, 2685 bp, Oryza sativa
  Clone ID: PAT_MRT4530_2876C.1
atgtcgtactacgtagatgctcgtaccagcgtaccccaataccctctatatccggtctacgggtacccgccgtcgacagtggcgcgccaggtaggggaacttggtgctcaaggttgtactactatgacatcaagcttcgtcgacaacggcgtcaacaccggccccatccaaggagtccctacttcaacaatgctggtgtggactcaagtcggcaaaattgtcttcccggtttacaccacggtaccaatctcggctggtccatcaatgaccggaaacgagaacgccgtggctataaccccggacgatcccgtgtcgaaggatcctcccgccgtagcggagaacagaacatcgacgtcatacgagcccgagaaggttcctagtgcggccaaaccttgtccttccgacaagaactgtgagccgacaaggacaactcccgaggtaacaaagccctggtgtcctatccacaaatccaggaagcacaacttgcaagcttgctgggtttttctcaacgtacaagctgaaattcatgcttgcaaggagcgtggaatccagcgtacttctccaactcgtgatgtctattgtcctattcacaagacgaagaatcatgacttctcaagctgcaaggtctttctccgcgccatgaaaacatcgcttcctaaggtccagcagtcaggaatctctcttaaggatgcagacaaggaacaaggagcgacgttgacctcggatcgattcgttggagtaatcgacatcgatccccacgagccatcagtcctacacttgctcgaagactatggctcgtcatcttccagtaaacgacgcgacgtgtttaccatcggtgggactagcacgtctgcgcacgctaacgcagatgcggagaaccaagcggtcacgccggcccaacacctcggcaccgtcaacgcaatactgagagaagctccctatgaccccgtctactccacggtactatacgctgctggagcagacgacaacgcgttagcaaactatttgccaatggcgttgaaaggttttgcgcgttcgtggctgatgcacctcccgccctactcgatttcttcatgggcaaatttgtggcagcaattcgtcgctaacttccaaggaacttacaagcgccatgcgatcgaagacgatttacacgcgttaacacagaatccggggaaatctttgagggactacgttcggctctttaatgagtgcagaaatacgatccctgatattaccgacgcctttgtgattcgcgctttcaaaaccggtgtcagagatcgctacactacccaggagttggcaacaaggcgaatcacaactactcgaagacattctccggaggagtgcctcatcttcaaaaagtcgctagaaaagcaactagctttggagaagggcaaacgagcacgtgtagtcgagaaggccgcagaggcaaccactcaggactcggactcggcgtacccagatttcgatcttcatgtctcgcacatcttcggaggttccacagcgtactcttcaaagcgagaatacaaaaaagtggagcgcgaggtttgttcgacatggcaaggggttacacccaagatgaagtggtctgaacagaagatcgagttctcagatgaggaccaccccaaggctgctgttatcccaggacgatatccgatcgtggtcgaacccactattcggaatatcaaggtagcgcgagtcctcatcgatggcggcagttccatcaactttctcttcgccagcaccttggacgcaatggggattcctcgaagcgagttgacaccaaccgatcaaccttttcatggaatcactccccagtcttcgtccaaaccattgggcaagatcacgcttcctgtgactttcagccaagcgagcaacttccgaacagagcagataacatttgatgttgctgagtttgacacagcatacaatgccatcatcggaagaaccgcactcgcgaagttcatggccgcatctcactacgcgtatcaggtactcaagatgcccgggccgaagggaacaatcactattcaagggaacacaaagctggcggtccaatgcgacaagcggaacctcgacatggtcgagcacacgcccagcccaccggccacagccgagccacccaagaaagaactcgcgctcatcaccttcctccgcgacaatgcggacgtattttcttggcaaccgtccgacatgccgggggtccccagggaggtgattgagcacaaaatcatggtgcgacccaacgccaagccagtaaaacaaaaactgcggagatttgcaccagatcggaaacaggccatacgagaagagctcgacaagcttctcaatgctggtttcatcagagagatactccatccagagtggctagccaacctagtcatggtgcggaaggccaacgggaagtggaggatgtgcgtcgacttcaccgacctcaacaaggcgtgccccaaggatcacttcctccctcgaatagaccaactagtggactcaacagctggttgtgagctattaagcttccttgacgcttactctagctaccaccaaatcagcatggtaaaagaggatgaggagaagacagcatttatcatgccgctcggtgtattctgctacgttaaaatgccgtttggactgataaccgcaggaaataccttccagcgtacgatcctaggcacgttcggttag

SEQ ID NO: 23717 - DNA, 335 bp, Oryza sativa
  unsure (1)..(335): unsure at all n locations
  Clone ID: PAT_MRT4530_28770C.1
ccttgatacaatacataacctcaaagncccnatgcggtggcncacttggcagccagccctggccgtcacattcatatgcatccattgatgttaatccgatcccattaagattggccttttccnccatttattttatattatccaaaaaggtntgtaaagtttagcagaaaaaaaggctgttgtgaatttacctgtatacctgtagtcattatttgctgtttaggtgggttataaagagcctatatgtatgagntgactagataaagtggttgtggancgcaaaatttnncttccanccgtttcaaaaaaaaaaaaaaaaaaaaaaaaaaaaaaaa

SEQ ID NO: 23718 - DNA, 506 bp, Oryza sativa
  Clone ID: PAT_MRT4530_28771C.1
gtgggcgagcgcgcggccgccagcagagtggagtagagcggcgggagagggggagaggaggccaagcatgacattgtctttctttcttgtccgacaaggacttgtatcaacccatgggtataaatatgtacacccggggtctatgtaatctatcttcacgatcaatacaattcggcacatcgccaccttttaccttttctactttattttatcgttcggcgggacttggcacctgacgcggggctgcatcagtgttcgatctccggctaaggggtaagtccaatgttccgtcggtccaggcaattgtctcatctacatcggcgtcgtttaaggctgcatcagtacattagacctcttggatcgctccggtttggatgatatatttgtctacctatttatcatatgcctctgttaatatagtcttagcatatcaatttacctctatcggctgcttctcgctttagggtttctgccggtatcagctaaatcgtgttgctagattagaa

SEQ ID NO: 23719 - DNA, 542 bp, Oryza sativa
  Clone ID: PAT_MRT4530_28772C.1
ggcggccgtgaaggccaaggacgtgacgctctccaccggcgcgacggtggcgcagaaggccaaggaggtgaccgccgacaccgcgcacaaggtggcggagtacgcgcgggagaaggcggagcaagggaaggaggccgcggcccgcgccgccgacggcgcggaggagccgagctccgggacggcggacaaggccggcgacatggccggacaaaccaaagacacgacgtgctggaggcggtgggcgcgacggtgtacgggatagcgaagcacacgaaggggatcgtcgccggcgaggaggagctcgtccccgtcaccaaggaagaagacaagggcaagctcgagtgagcgagcgagcttgtttcactgtagtggcaagctccccgactgtgtcacgtactgcgtactttagttgattaggagtttaagtatatagtgtttgcgaataatgtttcctgtatttagtgttaatcacggatccacggctgtgtatatatatgttacaatccgcagatgtgtgaaataaacttgataattagtctatc

SEQ ID NO: 23720 - DNA, 484 bp, Oryza sativa
  Clone ID: PAT_MRT4530_28773C.1
ttaaggctcgcgagcagctcgcgagccggctcgagctggctcgtaatctctaataatttctttcttgtccgacaaggacttgtatcaactcatgggtataaatatgtatacccggggtctatgtaatctatcgttacgatcaatacaattcggcgcatcaccaccctttttacttctacttttgtttttacgttccggcggaacttggcatccgacgcggggctgcatcgtcttcgatctctggcgaagggataaatccaatgttccgccggtccaagcaattgtatcgtctacgtcggtgttgttcaaggttgcatcaggacattcaacctcttggattactctggtttggataatatatttgcttggctatttattatatgtctatgttaatctagtcctaacatctcaatttagctctatcggctgtttctcgctttagggtttctgccggtatcagctaattcgccttgctagattagat

SEQ ID NO: 23721 - DNA, 353 bp, Oryza sativa
  unsure (1)..(353): unsure at all n locations
  Clone ID: PAT_MRT4530_28774C.1
cgggtgcagagcgcgcagaatgcaagtgctgcagctgcttgccacaacatcaacgcccctttcccctgtcaagatgaggccggcggcggcggcaatggcgacgaagagcgagtaccggaggatggaggcggaggaggaggaggagctggacaaggaggagtgggcgcgcagggcggaggcgcacgccgcaggtcagggagcggcgggagatacgtcttcacctgcggcgctcttcgcgtcgctcaacgccatcctcctcggttacggtcagtctccctctcctgctcgatcgatctcacctcctccttgttcttctttctcctggctcctgccatgattncaagctttcaact

SEQ ID NO: 23722 - DNA, 506 bp, Oryza sativa
  Clone ID: PAT_MRT4530_28775C.1
gcacaccactccgccgctgtactggcccctgctcgccgaactgcggaagggggggaaagagagataggagggagagagagctttcttgtccgacaaggacttgtatcaacccatgggtataaatatgtacacttggggtctatgtaatctatctctacgatcaatacaattcggcgcatcaccaccctttttacttttacttttgtttctacgttccggcggaacttggcacctgacgcggggctgcatcggtgttcgatctccggctaaggggtaagtccaatgttccgtcggcccaggcaattatatcgtctacgtcggcgtcgttcaaggctgcatcaggacattcgacttcttggattgctctggtttggatgatatacttgcctacctatttatcatatgtctctgttaatctagtcttagcatatcaatttagctctatcggctgcttcttgttttagggtttctgccggtatcggctaaatcgccttgctagattagat

SEQ ID NO: 23723 - DNA, 502 bp, Oryza sativa
  Clone ID: PAT_MRT4530_28776C.1
cggtccaatccccgtgccccggcccgagccggatcgtctgcgcgccaaagcccaaaacgacccttgggtgaggaaagtttctttcttgtccgacaaggaattgtatcaacccgtgggtataaatatatacacctggggtctatgtaatctatcttcacgatcaatacaattcggcgcatcgccaccttttaccttttctactttattttatcgtccggcgggacttgacacttgacgcggggctgcatcggtgttcgatctctggctaaagggtaagtccaatgttccgccggcccgggcaattgtatcgtttacgtcggcgtcgttcaaggctgcatcagtacattcgacctcttggattgctctggtttggatgatatatttgctacctatttatcatgtctctgttaatctagtcttagcatatcaatttagctctatcggctgtctctcgctttagggtttctgccggtatcggctaaatcgccttgctagattagat

SEQ ID NO: 23724 - DNA, 504 bp, Oryza sativa
  Clone ID: PAT_MRT4530_28777C.1
ctccctaaaggcatcgcgtccggcgagtagcggcgctgaccagatcagccgagtgcctgcctaatgtggctgaaagtttctttcttgtccgacaaggacttgtatcaacccacaggtataaatatgtacactcgtggtctatgtaatttatcttcacgatcaatacaattcggcgcatcgccaccttttatcttttctactttattttatcgtccgacgggacttggcacctgacatggggctgcatcggtgttcgatctctggctaaggggtaagtccaatgatccgccggcccaggcaattgtatcatttacgttgacgtcgttcaaggctgcatcagtacattcgacctcttggattgctctggtttggatgatatatttgcctacctatttatcatatgtctctgttaatctagtcttagcatatcaatttagctttatcggctgcttctcgttttaggatttctgccggtatcgactaaatcgcgttgctagattagat

SEQ ID NO: 23725 - DNA, 450 bp, Oryza sativa
  Clone ID: PAT_MRT4530_28778C.1
aaaaaaaacaacgataacgcccttcccctttttaaaacggaaacaaacggggggggggtgcttttgtttaaaaaaaggaacagggcccaaggacggggcaacagcacccccatttggcgggaccaaagatctaaacaaatctggggggggaacttttaaaaagaggggaaaaggccccggggccctaaacaaaagggcaaaacagcaagctaaaaaaattttaagggaacccttgtatattaaactagggatgggttaggctttttcaaaaaactcaagctggaaagaaggcttttttccccccccctggggaaccaggggggaggactttaaaaacgttgaaccctccagtttttagaaaaggcccgccctggccaaggaagacaggggccccttttttaacccggaaccatggaaaaatgggacctggaagggtggaggccctttttt

SEQ ID NO: 23726 - DNA, 504 bp, Oryza sativa
  Clone ID: PAT_MRT4530_28779C.1
acggaaacagggtatgaatcggcttcggaaccgcatcggctacagtgtgcatcggcagttaccgaatcggacaagacaagccgatttgtccgacaaggacttgtatcaacccatgggtataaatatgtacacccggggtctatgtaatctatctccacgatcaatacaattcggcgcatcgccaccctttttatttctacttttgtttttacgttccggcggaacttggcacccgacgcggggctgcatcgtcttcgatctccggcgaagggataagtccaatgttccgccggcccaggcaattatatcgtttacgtcggcatgttcaaggctgcatcagtacattcgacctcttggattgatctggtttggatgatatacttgtctacctatttatcatatatctctgttaatctagtcttagcatatcaatttagctctatcggctgcttctcgttttagggtttctgcaggcatcggctaaatcgcgttgctagattagat

SEQ ID NO: 23727 - DNA, 4871 bp, Oryza sativa
  Clone ID: PAT_MRT4530_2877C.1
ctaattctgtactcgtgtactttgatgtcgtagctcggtggggagcatggcctctgagccgtacacgaggaagaagggtatttccttgttagacgttgtcggtgtggtacgcactgcccatagtactaatggaagttcttcgacccacttcttgtcatgtgacaagagcctatcatagacgcgggtcttgattccttgtagtactatgccgtttgccctctcgacctgtccgttgctctgagagtgagaaaccgaggcgaagcagatcttgactcccagcccgatacagtaatcctggaagtcggtgctaatgaactgggagccgttgtcggttatgatgcgatgcggcagtccatatctgcagaatatccctttgatgaatttgatggcgttgtcggccttgatttcccccgtgggtgtcgcttcgatccacttagtgaatttatcgatcgccacgaataggaacctgtagccgcccatgtcgcaagcgcctttgagggtggttgaccataaaaacccttgtcgaaaggcttttccgaccaatgtgcgaccggctgcgtgtgacccacagatcccttcatgtatgtcgaggaggagatgtctaccgtcattggatgagatgcatttgagaagtaccccatttggcactttcttgtatagatcgttgccgatcatacagtagaattttgctttacgggttattttctcggcttctgcgtcgtcctcgggcaactcttcgctacctatgaatttaatcagtggggtgcgccagtcgtctatggtctcgatatcaacaatggcgcgctctgcctctgtagcccccgagctgatgtcgggggcgactgggctatcttcgctgcttgcctctttgactgatggcattgtctggacgtccagaaaagttccgggttcaagtagttctcgtctggacgcacgccgtgctatatcatctggctcgatgttgtccttgtggtatacgtgtcggacctcgatcccatcgaaccttttttccaccttcctgacctctgcaagatacttggataactcgggattagagcaattgtaatctttgtgcacctggttcgcgactagttcggaatcccctttcacgaccagtcgcttaactccgagtgcagctgcggctcttatctcggcgagtagtccttcgtactcggctgtgttattggttgccctgaagttgaggtgaattgcatgcttgaattgatctcccgaaggagatgtcaagacgaatcctgcccttgctccttggctgttgagtgcgctgtcgaacgccattgtccacgtttcgttgtcgatttggttgtctaacctgttatcaggtatagtccaatcggctacgaagtcggcgagtacctgggacttgatgattgttcgtggcacaaagtggacatcaaactggcttagctcgactacccattttgcaatgcggccgaccacgtctttgtttctcacgacttcaccgagagggaaggaggagacaactgtgaccctgtgggcttggatgtagtggcgtaactttcgtgatgtcatgattaccacgtagagcagtttttggatctgtggatatattgtctttgcgtcgtggagagcttcgttgacgtagtagactggctgttgcaccttctctctctcgacaacgatgacagtgctgcttagtgccgccatgcatccagttagcttctgtacttgcatgagtcttgtgggcgacttcatgttctcgattgccttgatcttctcgggatttgcttttattcctcttccagatacgaggaaaccgagcagcttgcccgatggtactccgaacgtgcacttctctgggttgagcattaggcgatatcgtcggaggttgtcgaacgtttcctgcagatcgtcaatcaatgagtcgcttgtcttggtcttgacaacaatgtcatcgacgtaggcctcgacattgtttccaagttggtcgctaagtgcaccttggactgtgcactggaaagtgtttcctgcggttatctgtccaaacggcatcttaacgtagcagaataccccgaacggcgtgatgaatgttgtcttctcctcgtcctctttcgccttgctgatttggtggtagccggagtaagcgtcgagaaagctcaacaactcacacccggctgttgagtccaccaattggtctattcgaggaagagggaagtgatccttgggacacgccttgttgaggtcggtgaaatcgacgcacgttctccatttcccgttggccttccgcaccatgactggattggctagccactctggatggagtacctctctgatgaaaccagctttgagaagtttgtcgagctcttctcgtatggcttgttttcgatctggtgcaaatctccacagtttttgctttactggcttggcgtcgggtcgcaccatgagtttgtgctcaatcacctccctggggacccccggtatgtcggacagtttcttgggtggctcagctgtggcgggtaggctgggcgtgtgctcgaccatgtcgaggctccgcttgtcgcattgtactgccagctttgtgtttccttgaatagtgattgttcccttcggtcctggcatcttgagcacccggaaggtgatttgctccgttcggaagttatttgcttggccgaaagtcacaggcaacgtaattttgcccaatggtttggacgatgactggggagtgattccatggaagggttgatcggtgggtgtcaactcgcttcgtgggatccccatcgcatccaaagtgctggcgaagagaaggttgattgagctgccaccgtcgatcagaactcgcgcaactttgatattccgaatactgggttcgaccaagatcggatatcgtcctgggataacggcagtcttggggtggtcttcttccgagaattctatcttctgttcggaccacttcatcttgggtgcagccccctgccacgtcgaacagacttcacgttccactttcttgtattctcgctttgaggagtatgccgtggaacctccgaagatgtgcgagacatggagatcggagtctaggtatgttgagtccgattcctgagtagccgcctcagcgtccttctcaaccacacgtactcgcttgcctttttccgatgccatgtgctttgcgagcgactttttgaagacgaggcaatcttccaaagaatgtgcttgagctttccttttcccactcttacaatttttctttttgcttgactcaggtgcgtccttcgctggtttcttctctcctccggtcttcggcttgtcgttcttgcgtctcagtacgtcgtccgcgtgggcgcatcgatcgacaatctcgaataatctccgagtagtcgtgatgcgcctcgttgccaactcttgggtagtatagcgatctctgacactggacttgaaagcgcggattacagaagcgtcggtgatttcagggattgtatttctgcactcattaaagcgccgaacataatccctcaaggattcacccgggttctgtgtcaacacatgtaggtcgtcttcgatcgcgtggcgcttgtaagttccttggaagttggcgacgaactgctgccacaggtctgcccacgaagaaaacaagtagggcgggagatgcatcagccatgaatgcgcagagcctttcaatgcagttggcaaataattcgccaacacgttgtcatctactccggcagcgtagagtaccgtggagtagacctgtaggaattcttccgggtcggtactcccatcgtacttctctattgctcctggtcggaatctttcaggccatcggacatcacgtagcgaacgactgaaagctctacaccaagcgttgggggcggtgggttgtcggcgatcatacgtccttcgcggatgtctatcggtgccgtgaggtggaggggtggctcgatgaggcgattcctgctgttcagggttttcgccattagcaccgccaaattgtggctgttccaggtgcgctgcagcggcggcctcttcgaacgcgttgctgaggttggtcactgattcccgtagccgttctgtccagcgtgcgagattgtcattcagaacggggtcatagggggtttccctcagtatcactgacggtccagcattagcgccatcagggctgatgtgctgatgtgcagtacttgtcgcctcggaagttatcctcgtcggctcatgattcttgtcgaaaagacaaggtttggccgcactaagatccttctcaggctcggatgtcgtcgacgttccgttctccgcttcggcgggaggatccttcgacatggagtcgtcttgggttgtagccaccgtgttctcgcttccggtcattgatggaccagctgagatcggcaccgtggtgtaaaccgggaagacgatttcgctgacttgagtccacaccagcattgtcgaagtaggaactccttggttgaggttggtgttagcgctgttgtcgacgaaactggatgacatattagtagatccttgagcaccaagtccccctacctggcgcgccactgttgacgggggatacccgtagaccggatatagagggtattggggtacactggtaccgacgagaccgtagtcgagtcgactagatcacccggcgacttggctcctgtaggctccggcttcgtaggctatggtggttgtctcggatgtgagattcgatgccttaggtcctcccggggggggtcccttttataccgcaggtcaggtggtttccaagtaggactcggagacatcggaccctacatgatacagttacgacccagtcctatccgggtaggaatcttttcatctatggactccgcgatgaattaccttagcgcatacaaagaacgtccgtatacgcgcagatataccac

SEQ ID NO: 23728 - DNA, 433 bp, Oryza sativa
  Clone ID: PAT_MRT4530_28780C.1
gaaagcttctttcttgtccgacaaggacttgtatcaacccatgggtataaatatgtatacccggggtctatgtaatttatcgctacgatcaatacaattcggcgcatcgccaccctttttacttctacttttgtttttacgttccggcggaacttggcacccgacgcggggctgcttcgttttcgatctctggcgaagggataagtccaatgttccgtcggtccaggcaattgtatcgtctacgtcggcgtcgttcaaggctacatcagtacatttgacctcttggattgctctggtttggatgatatatttgcctacctatttatcatatgtctctgttaatctagtcttagcatatcaatttagcaatatcggctgcttctcgttttagggtttctgccggtatcggctaaatcgcgttgctagattagat

SEQ ID NO: 23729 - DNA, 268 bp, Oryza sativa
  Clone ID: PAT_MRT4530_28781C.1
gtcgtaaatggctcctccgctgcaccgaggagcgttcagcaacggcttccagctctgcgtcggcatcggcgccgtcactgcccgcctcaccaacttcttcacgcagaagatcaggcaaggctggggatggcgcgtctcgctcgccgtcgccgccgtccccggcgggttgctcaccctcggcgcgctcttcctcccggagacgcccaacagcctactgcagcaaggcagagacaagcgcagagtcagggtgcttctcaccaggatccga

SEQ ID NO: 23730 - DNA, 508 bp, Oryza sativa
  Clone ID: PAT_MRT4530_28782C.1
ataggccgaatgggctgcggggagaaaagagggagggggagggagatgggccgagccggcccaatagggagaggggaaagtttctttcttgtccgataaggacttgaatcaacccatgggtataaatatgtacacccggggtctatgtaatctatcttcacgatcaatataattcggcgcatcgccaccttttaccttttctactttattttatcgtccggcgggacttggcatctgacgcagggctgcatcggtgttcgatctccggtgaaggggtacgtccaatgttccgccgacccaggcaattgtatcgtttacgtcggtgtcgttcaaggctacatcagtacatttgacctcttagattgcttcggtttggatgatatatttgtctacctatttattatatgtctctgttaatctagtcttagcatatcaatttagctctatcggctgcttctcgttttagggtttctgccggtatcggctaaatcgcgttgctagatttgat

SEQ ID NO: 23731 - DNA, 777 bp, Oryza sativa
  Clone ID: PAT_MRT4530_28783C.1
atggaagagaggattccttgtgatgtggtgaggggacaacgctggactttggagctgctgctggtgaagccatggatatgcacagccgccgagggtcttcttgtcaccggtgaagaaggggatttgccgttgctggaccgcccctctagctatgctcgttactcgctgtggctgaggctgaggctatcgccgtcaggggaaggcagtggtcggcaaggatttcattggcagatctggtcttcttgctcccacattgctttaccttgtccaattgtccttgctgtcggcgacagctcttctagtgagtgcggccgcactgggaaggaagaagaaaggctgaagaggttagtttctttcttgtccgacaaggacttgtatcaacccatgggtataaatatgtacacccagggtctatgtaatttatcttcacgatcaatacaatttggcgcatcgccaccttttaccttttctactttattttatcgtccggcgggacttggcacctgacgtgaggctgcatcgatgttcgatctccgactaaggggtaagtccaatgttccgccatcccaggcaattgtatcgtttacgtcggcgtcgttcaaggctgcatcagtacattcgacctcttggattgctctggtttggatgatatatttgcctacctatttatcatatgtctctgttaatctagtcttagcatatcaatttagctctatcggctgcttctcgttttagggtttctgccggtattggctaaatcgcattgctagattagat

SEQ ID NO: 23732 - DNA, 520 bp, Oryza sativa
  Clone ID: PAT_MRT4530_28784C.1
tccagaagagaccaagttcaaataggatacggcatggcaagttatctattaattaggaatagtttgttagtttccttttatctttaggaaagtttctttcttgtccgacaaggacttgtatcaacccataggtataaatatgtacacccggggtctatgtaatctatcgctatgatcgatacaattcggtgcatcgccaccatttttacttctacttttgtttttacgttccggcggaacttggcacccgacgcggggctgcatcgtcttcgatctccggcgaagggataagtccaatgtttcaccggtccaggcaattgtatcgtctacatcggcgtcgttcaaggctgcatcaggacattcgacctcttggattactctggtttggataatatatttgcctacctatttatcatatatctatgttaatctagtcttagcatatcaatttagctctatcggctgcttctcgttttagggtttatgccggtatcggctaaatcgtgttgctagattagat

SEQ ID NO: 23733 - DNA, 624 bp, Oryza sativa
  Clone ID: PAT_MRT4530_28785C.1
cgcgcttcccctcgcgtctgtgtaccccatggaacccgctcgcgtgccgcccaaggaggtggtggctggcggcgtcagcgccgtcaaggagtacatggccaggcagtggcgcgacgcccgcgccgaggaggcgcgccggggcagcgtcgtcgccaagagccccaaggtgtcgatgcccaagaggtggcttgtgcgcagcatgtcattgatgggtagatgggtgtccgacgtcacgaggtacaacaccgggtaggcggcgagagaggagctgtgcgcgagcctctgccggtgaaggagtggcacgcaagtggtggggagcagctgcgcgcgggggtgggtcgcacttcttctgcccatggcgaggggatagcgtggagagccgccgcccatggcaaggacgccatcaaggttgaagggcggcgcaaagatggaggagacggggaagagcaagatgtggcgcgcgtcctcctccttctcctcgaacccgtcgacatcatcgtcgtcgtccaccactgccccgctccgcgccgccagcttcgcgtgccaccgccttgcaggcctacctgccttccccagcccaccaccgcctcgccggcttcgtgcgccactgctacgcctcgccat

SEQ ID NO: 23734 - DNA, 519 bp, Oryza sativa
  Clone ID: PAT_MRT4530_28786C.1
gcgagaatcattgaggtgcatcatttattcaccgtctgcttatactgcttcctgacccgtgacagcgctagtcattctggagcccctcaatgtcattcacgcagctccgcttcagttgcctagggacctgtttttggggccctaggctaacctaccctggagcagacaccacctgtcccattggggatgtccacgttgcagaacgccgggaggctcgccgtcgtgcgcttcaagttccctgttcggtacccggggatcacctcggccttggggtgcccatcctcgggggcgccgcgctccctggagatgcctcctgccatgtggttgaccgccgagctcctgctccagcttgcgtgcgaccgcggggagctgccggtggtatgcctgccggagttgctcgtccacggggccgccggttgcgccgtggcccgcgcgctggccctcctccaccgcccggtttcgtggggtgctgtccatcgggtatcccattcctggttgtccgcgcttcgcgaggctgtg

SEQ ID NO: 23735 - DNA, 804 bp, Oryza sativa
  Clone ID: PAT_MRT4530_28787C.1
atggagttgacggcttttggcaaggctggcgagtggctggctttggaggaaagcaccggaagtcagagcattcggttggaccagagcgcccccgcccctgctccccggccccacagagatggtcgggtgaaaaccatcacccgtcaagtcgctgcaaggacccgtgggtgcgtggggccaggcaccacccggctgacgattgacgagcgaggagccgaggagcagcgacgaagccaacgccaacgagggacaacgacagacaggtggctgaggactgggcgtcactgccaccgccgctgcggatgcgcctccctggccgccgccgccgtggatgcggtgctagcccttgccattgccgtcgcggatgcgccgctaacgccaacacggatggtcgtgcccctggtcgtcgacgccgcgactcacaagaagccgccaccgcctgctgcttccgctgtccgcgcgtgtccaccgtcgctggctcgccacccatccgtgcgtcttccgctgtccgcgtgtgatggccccgtgggggcgacggcacgccgcagttctggcggcgggagttcctggtggagatcggagacggtgcagagaaaaccggcgacgagcggcggagtggtgcgcgacggcggactggcggtgttcggcggggaagttaggtttagggtttggagagcgatggaggaggcgggaggagcgagaggcagagggggcggggcggcggcgcggtggggagagcaatgcccgcgttgcggtgctgggggaggagagcggaaggatttcgggggtatgggagcggagtga

SEQ ID NO: 23736 - DNA, 342 bp, Oryza sativa
  Clone ID: PAT_MRT4530_28788C.1
atggtggatacgaggaggagcgcggcggcgaagcgcccggtggcggaggaggaccagggaggaggagaaggcggcggcgccggctgctgttgtggcgggggagagggcgggggcggcgacggccccgtcggtggggtgcaggccggcgaagcgcggcaagtggcgccaccccttctccccccatcgccaccgctgtcctcccccatcaacgccgtcatcttccttccccgtcgcaacatgccccagcacgctcgccaccgtcgcgcgctcgcctccagcagtggcggcacccatggcgtgcggtggcggcggcgcgttcgcgtgcgccacgcgtgcccatag

SEQ ID NO: 23737 - DNA, 451 bp, Oryza sativa
  Clone ID: PAT_MRT4530_28789C.1
ataaaaaaaataaaataaaataaaaaaaaaataaaaaaaaaaaaaaaaaaaaaaaaaaaaaaaaaaaaaaaaaaaaaaaaaaaaaacataaaaaagaagaaaaaaaaaaaaaaaaaaaaaaaaaaaaaaaaaaaaaaaaagggggtgaaaattatttgtaaaaaaaaaaaaaataaaaaaaaaaaaaaaaaaaaaaaaattaagcccaagaaaaaaaaaaaaaaaaggaaaaaattagaagggtttacaacagaaggaagaaaacacgttgatttcaaaaataaataaaaagaggggaagccctcccctcaagaaaaccaagcctgaaggaaccctaaaaatattggggcgagaataaagaggaggaaaacccgagagggggggaccataaaggggaacaaatcttgctagaaaaaaagagagaaaaacattcagaggggctgtcccaaaa

SEQ ID NO: 23738 - DNA, 571 bp, Oryza sativa
  Clone ID: PAT_MRT4530_2878C.1
ttgtcggtgatatgggaccgggagtatcgtgaccagaggcttgaggcagacacaatcgcccacgtggcctggcaccttcggggacgtcgggcccgagggtgaggtgtccgccctcctcctgatttccccgagggggggtcgggtgactcctgccccggccccgagggccgaggcgccccgaccccggtcagatcacgggttaggtggcgactggcggtctgacgcacgccttgccccatcccgtcaagacgaaagcctctaggcactcgtctcaagccggagctagcgtgtaatctcttagagatggcacgttagccctggttagatttataccaggcttcatcccaaccattacaggcaagatgctatatgaagaagggcaaaaatgcacgttgctaagctgacacgtggtggacaaggatgactgatctgtgaccggtctgacactggtcgcgtcatcaacagacagccataatcccacgtcgcacctgtttccggcggaagtgggggtagatatgggccgtcccgtcagaagggcactcggacagcagccgtaccgatctccgtccat

SEQ ID NO: 23739 - DNA, 498 bp, Oryza sativa
  Clone ID: PAT_MRT4530_28790C.1
ttttgttttttttttttttttttttttttttttttttttttttttttttttttttttttttttttttttttgggagaaaaggggaaaagggaaagggaaaactttttacaatttccaagccaagctgggccatggccaaaaccccagggggaccggaaaaagggtgggcatgggccttggaaaacccaaagggacatgttttttatgccccgggaaagcaccggggtttattcataaaattcccccctccaggggggcccggaccctgttttaggggcaaaaaatgggacccccggaggggtctgttttaagccgatgattcaaaacccggaccaagatctatggccctttaggggggggggtcccccaggggcttgaaaacccggagccgcttgaagttttccaacgccctttcccacaccttggccttgccccgattattgggccccccgggttccttcaccttgcggggggggggggggaagaaaaagggaaaaa

SEQ ID NO: 23740 - DNA, 686 bp, Oryza sativa
  Clone ID: PAT_MRT4530_28791C.1
aagaggcacgaggcacaaccaaagaaagaaagaaaagcgagatgccaccgcttactctcgattccctcttgcgcggcggcggcggcgagccggaggacgagtgcgaagacgagttctccggttccgacgacgacggcgaggacggtggcggtggttctgaggaatggggcggcgacgttgatggcgagtatgacccgtactccccagcggagtcgctgtggctcaggatcggggaggacatcgactggagcgaggtcggggcggtgctggagcgggaggactccaccaagggcgcctccaaccccaagtcggccgcggcctgcagctgcgccggcgcgccggcggcgaggatgccgacgtgcgccggcggaggcgggacggcgaaggcggtcgtcatcgcggggctgcccgcggcggcgcggaaggcctcgcgggagcacgagcggcggcggcggctcggccgcgcccgagcccgcgcgcgggtgttcgccggggacgccgtggaggtggcggagcccgggtcgcccaaggtgtcctgcctcggcggcgtccggtcgcgggcgcgggcgcagcagccgtgctgtcccgccgcggcagctgcggggaggcggcggtggtggtgcgcgccatggttggtgatcgccacgtgccaccggtgctggagcgccccgccaccgcgcgtgtag

SEQ ID NO: 23741 - DNA, 538 bp, Oryza sativa
  Clone ID: PAT_MRT4530_28792C.1
aaagaaaactgaatacggagtagcatatatttaggattcagcaatcctgaataaataattttttaacctaaggagatgaaattaaactcctattataaatgcatcaacgagaactcgattataagtgcataagtgcaagaacattaagactaagcacatggacatatagccttcactattacatcatactaactttggagcggcagtacacagtgccaggcaaaatggtgatgttcatccatcacactaactacgaacatgtactgcaagagtaagctcatcatcagagtcatcttggcagcttcggcatcaaccaaatgattccagcggcggcggcggccaaactctctacgatctggcggtgttgctctgtagccccaggatctggcggttcctctccgttctccaggccacgacttccgcagcgggcgaatctcaccgccgttgcgccgttgacagcaccagccgctcccttgttgcggcagaatcgcctccattgctcaagggtagcacgaccagattgggggtgttggggggg

SEQ ID NO: 23742 - DNA, 246 bp, Oryza sativa
  Clone ID: PAT_MRT4530_28793C.1
tctacaggccctcctccacgtccaactcggggtagaaaccaaaggaaacccgaaacatgccttcccgagtaaggaaacttcgaaacccaacgaaacacagtcggactcgaacctgccggtcagaccggccacacaccgccggtctgaccggccctcaaccggcggtctgaccgcccaacacacggtggtcagaccggcccactcggaggaaaccatgccactggcgttgttgtattcacgggaacc

SEQ ID NO: 23743 - DNA, 261 bp, Oryza sativa
  Clone ID: PAT_MRT4530_28794C.1
ttgccgtccggccgccgaagaagaagaagaagccgacgaggaggcgcaatgagggctaagtggaagaagaagcgctgaggaggctgaagaggaagcgcctaagatgaggcagagatctcagtagctcgggttggcgttcttgtgatgctgttgcagtgatcctgtcttcggctgccgtcgttgttttgtcagctgcttggcgtggtgtcctacgctgtgttggttttctgtgctgtttatattttacgttgcaggttgcca

SEQ ID NO: 23744 - DNA, 2173 bp, Oryza sativa
  Clone ID: PAT_MRT4530_28795C.1
catcattgcttaaacagatctacaattttcaagtataaatgacgagccctagtgcgtgaaatcacctagtgtattagtataatactgctagagaaacaaaacatgagtgctcatcgcagaatgttaatcacaaaacgcatttccaagagcgtaaataacttatctataagactactccgttactgccaatcaattcaatggccatacacagtaagaaaatacaaaaggtggttactacattacaagaagctcattagctacaggaacgaaagcttcctaaagaatccactgctgctttgctgttcctctcgcagcagcacaaaagctctgttgtgaagactagcaatcgccgtatataacaactcaagctaagttggttctgaccattagctcttctcattcaactagagacttagctacaactgggctgcaaggatctcattccatgtatctggtagtccaggaaggcaccagtgcaagcaatcttgaactccctgcgtggctttgatactgtaccgcgatatatgcccttcatctctcaatcgtgatagtgcagtttatatccaaaagcttcacccttggttcccatcacggctccctcggcatcggcgtcatcggaatgattttgggaaatgccacttcccttggccaaaggacttgtattatcacagcgacccccggtgttccaatctccattgaagaaatgccgaggagatattgacctgtagaacaccttcagttgtgggtggtgaggaagttgggtatccaaccacttaataacagtgtggatggtgatatttttggccttccagatgacagcagtattcctgttagtgtttggtgctcccccaagatacatttcccacttgtttgcccttagcttccctcggttccagtggtgaccagtgttaagaaccagaacatggagcctgtgaaggttattcttcagaaaagcaggtggacgatcaaggtgcatggcataactggtggctggatctgatggatccagaggctccaaatcacagagtgtcgacgaccaatggtataaaatggttgtattagttcttgggaatcggtaggcccagccatctggtctttttgcacccggagctaagaaaaaaccatactctgcaccaacgtcttccacatctagtctctcctttccaccagtgaccatacacatcattgattgaaacatttgcctccctaaagaatcacccacataagcaatggttttatcctgcattctcgtcaagaactgtgaggcctcaaattctggcatctcacaaccttcaggttgccatctaaatttttcataagcaaaatctgtgcgctgggttagtctgcaggcccagctctcggaaagccattgtttacagccgaaaccggagtatagtggtctgttgttgtcagaaacccattttccagttccgtagttacaatctttcttcccagaaggcggtggttccctttcatccgcaacatcagcagaatcacttgctatggacatcggtggtggtgcatcacttacttgctgttctactttaactactgattgtgtcaatgtatctgcattcggaaagtcttcttcggatgatgtatgctgatctacaaactttgagttagctacaaaaatttggaacaaaatgagaataaatataggtgtaacatgaaaaggatggagtcaaaatatttcagtatgcgtaaaacgacctggatgagccaaaatcaatgaatctggccggaggatttcagtagtgtagtatgttcctctctcccatttccagagaagaaacatcatgaaaaaagcaagaatgccaagtttaagctgcttgccccccagcccatttatggcttcctagtctcatcccttttttatgttcttgaccacccttttttcttctcttgaaatccagtatgaccctgaccggctgcccgggggcccactatagtggcaccgatgctgagagcctggaccacggcgtggtcgacgttctccttgggcaagaggcggcgagagggggaatcgtgctaggatatcgaaattctgaacatcaacaatccaacatactgctatacaaatagttgaaccaccaggatcccctcccctccgctgcgatggagatcgccgcccggccctccacctgttcagccgcgactcgtcttgcctcgt

SEQ ID NO: 23745 - DNA, 1140 bp, Oryza sativa
  Clone ID: PAT_MRT4530_28796C.1
cagcagcaggagcagaggcatcaggagcagcagcagcagctgctctggtaccgcgcgtcggcgcccgcccaccgccgcgtcagggagagccccctcagctccgacgccatcttccgccagagccatgcaggccttctgaacctatgcattgttgtgctggttgctgtgaacagcagacttattattgagaatttaatgaagtatggcctactaattagagctggattttggtttagtggaacatcgctggcagattggcctcttctcatgtgctgtctcactttaccaactttcccgcttgctgcacttatggttgagaagttggctcaaagaaaacttattagtaaacatgtggttattcttctccatatcgttattacaacatctgtccttgtctatccagttgttgtgattctaaagtgtgattcggcagtattatctggatttgtgttgatgtttcttgcaagcattatttggttgaagcttgtttcttttgctcatacaaattatgatataagaatgctgtccaaaagtattgaaaagggcgtgacacatgacatttctatagatccggagaacattaaatggccaacctttaaaaggctatcctacttcatgttggccccaacactttgttaccagtacataaatccaattgtgaagaattcgaagcatccattgaaagggaatttcttgaatgctatagagagagtattgaaattatcagtgccaacattatatgtctggctttgcatgttctactgttttttccatctctggttgaatattcttgctgagctcctctgttttggtgatcgtgaattctacaaggactggtggaatgccaaaacagttgaagagcctgttcacaagtgggtcattcgacatatatattttccatgcataaggaatggtttttcaaagggtgttgctatcctaatctcgttcctggtttcagctgcatttcatgagctatgtgttgctgttccatgccacatttttaaattctgggcatttattgggatcatgtttcaggctgatgttgttagtgtctgtcctgctcagattcccctggtattcttgacgaaataccttcaagataaattcaataacacaatggcaacaagcccaaacaaatag

SEQ ID NO: 23746 - DNA, 480 bp, Oryza sativa
  Clone ID: PAT_MRT4530_28797C.1
atggcgacaatccccggcctccttctgatctgcttgctgatgattcttcctgtgctttcgacgaaccgatcggagaggggtggtgcagagcttgttcacagatcaaactgggtgcagccattgaaccgtgctgctgttgacagcgaggctgttcacatggtagggtatataacacaaccaaaagaagatggctactatggatttatagtaacgatggatgtttatggcttcaatttaagccccggccaattgaacagttatgccggagtttgggttctaccaggcgatgaacgccctgtgttttacctcgctcgtacgatgtccgctgctggtgcaccaacaacaggtgtagacgtatactgccctggctttcaacctaagaaggacgcatccacacgacccggcgacgttatccctagcatctccgagctaaacggaacaaggcaatacatcgcactcaatgtattcaaggttagctaa

SEQ ID NO: 23747 - DNA, 500 bp, Oryza sativa
  unsure (1)..(500): unsure at all n locations
  Clone ID: PAT_MRT4530_28798C.1
tttttttttttttttttttttttttttttttacaccaaacatctgaaaattgcatagcaatacaattgacaagtaatataccattatgttatagctttatgcgacctaataagccaaggaaattgccactgtaaggnatttaggaagcttcctagcactagcaggtggtgatggtatgcacgtatgtacatacttacatatgctgtgtgccagccaagatcccagatgcggtgcaacgtcagctaatctgaatttcattgaaacaacaattcttgagtcggatgactcaccctcacctggtaaatctctctattcttgggctgaatcgaataagaatattgatgggcatattatgttccatgcaatgcagttagcctgagcaatcaagccccccatcaacattcctttattctcttttcccctctttttgcaggctaataaatattcttaagactattactactacagtatatatctcctttcatatggtcgagtgcttg

SEQ ID NO: 23748 - DNA, 2062 bp, Oryza sativa
  Clone ID: PAT_MRT4530_28799C.1
tttttttttttttttttttggagcgaattaacagactactaagatttagatttaacgcataacccccaaaatccaaggacacagactaacagcagtagttctgccacaagcaaacgtcgatatgaagcaaaaacgcagccgaatgacctggatgtacatgaatcagatgacagtgatcttggctttgctagacgccctcgggagagccagtaacttggtaagacccttgcaaatgcacatgtattcatcgttaacgttcttggccctgaatatcttcagatcctctaaagcaggtgaccagctcagtagcagtccaacaagagcaacctcgcagttgagccccacgaaatcgtttatggccactgtcacgaggtgatgcaaggtaggctcttcaatctccgtctgatcttgatcccatattgtcttacgcctataagcttctggacgtgggaagctccatatctcaagttctctgaaagtaggggcattctgaaatattgaacaagcacccaagacctctgtccagttccaaaagcacttctcaatacaaatcttcttcagatgatcaaacacacctgggagttgcatcgacaagcaccctttggatagatactgcgtcaagaatgagccacttatagtaagttcttctatactagttaggctgacaaaagcttgcttcatgtagtttttcatgtcacctacaactgccacagactgttgggcttctgttttgtcgagtgtaatatacacatgggacagattaggtgcattcagatgaaagtcctcaaatttcccttcaacctctacaatctgcagtacctggccttcaatacggagacaactgataccatcgaaatgtttcaaacgcaatgtattcaaccaagggcatgaggagaccagagtatttatatcatggtctgttgaggagaaatatttcagattcaagacaaatagctgcttgaaaccttcaaactcctgaggcaaggcaatgatgcatcttttcataacaagtcttactatgctagttaggctgaccatagcttgcttcagataatttttcctgttgccttcaactacaacagattgttgggcttctgttttgtcaagtgaaacatctaaattggacagattaggtgcatgcagatgaaaatcttgaaagttccctttaacctctaaatcctgcagtgctggagcttgaatactgagacaagtgataccctcgaaatatttcaaacataatgtactcagcaaggggcatgaggagatcagattatttatgtcactgtctgttgaggagaaatatttcagattcaggacagttagccgcttgaaaccttcaaactcctgaggcaaaccgatgatgcatctttttatctgcagatattccaaatcactgagagagaagaggtttgacgggatcttatagttatgcccagagtaaaacttgattgtaatggaccttggttttttccttgacagcatgtacatccacctatcaaatacatcatggtatcttttgaaccctagaattgaaaaggaagcaagaggtccattgtggagcaaaagggccagatcgacgagcgtaataaagttggagcgttgtgtcgtttcagaggaaccccagctgagatacaaatcacaaagatatatttctggcaaagtagtccacacattcctccaagcactggataggatgctggctctaatagcatctaaggaattcagcttggagaggatggtgacctttatctcttgaggtaggctgctgaatttgtctgacctcaacgcagatgatggttccacctttgcctttttagcacgatgcatcgctccagagacgattatagtgacctcgcaattgtcgaacatctagggtttctggagagttggagcggacgggcacggggagcagcgggtcgccacgacgctcctcccccttccgccgccgtgacggtgtcgatctttagggcttcgctcgtcctgcaatggcggcgcttgacaagcgccgctaccagtgaggcagggaacgaaccctcgtgccgaattcctgcagcccggggat

SEQ ID NO: 23749 - DNA, 5145 bp, Oryza sativa
  Clone ID: PAT_MRT4530_2879C.1
atgtcatccagctttgtcgacaacaatgtcaacaccagcctcagccaagcgctccctgcttcaacaatgctggtatggactcaagtcggcgaaatcgtcttcccggtttacaccacgacgccgatctcaaccggtcctccaatgaccgaaaacgagaacgcagtggctacaaaccaaggcgactccatgtcgaaaaatccacccgtcgaaatggagaatggatcatcgacgacatccaagctcgggaaggattctgatacggccaaaccttgtccttccgacatgaaccacgagccggcaaagatgacttccgaagccacaaggtcttggtgtcctatccacaaaaccaagaaacacaccctgcaagattgttgggaactcaacgtccgtgttgaaattcgcgcctgcaaagaacgtggaattcagcgtacttctccaactcgggatgtctattgtcctattcacaagacaaagaatcatgacctctcgagctgcaaagtcttcctcggcgccatgaaagctccgtctcctaagtcatacgtctccgtcagggataacggcaaggaacaaggagcgactccagccttagatcgattcattggggtaatcgatatcgatcatcacgaaccatcggtcttacatcttctcgaagactatgggtcatcgacaacgagcgtgccgcgggaggtattggctatcgatgacgttggcacgtcagcgcaagccaacgcagaagtggcgaatcaatcgactactccaacccaacacatcagggccgttcaagctatactgagggaaactccttacgatcccgttctgaacgatgacctcgagcgttggacagaacgactacgggaatcggtgaccaacctcagcaacgcgtttgaagaagccgctaccgcaacgcatcaagatcagccgccaactggcgacgccaatggtgaagatccggaatggagggaatcacctcaacgagccactcctccacctcgcggcgctgggttctgcacgttcatggctgatgcatcttcctccctactcaatctcttcgtgggcagacaattcgtcgccaatttccaaggaacgtacaagcgccacgcgatcgaagacgacctacatgcgttgacacagaactcaggtgaatcattgagggaatatgttcgacgctttaacgaatgcagaaacacaattcctgaaatcaccgacgcttttgtaatctgcaccttcaaatccggtgtcagagatcgctacactacccaggaattggcgacaagacgcatcacagccactcggaggttattcgagatcgttgagcgatgcacccatgtggacgatgcgctaagacgcaagaacgacaagctgaagaccgggggagagaagaaatcagccacagaggcatctgagtcaagcaagaagaaaaatcgcaaaaatgggaaaaggaaagctcaagcgaaagtcctcgcagcagaatacgcgaaccgtcccaagcacccagactcacaagacagcgacacaaagaaatcttggtgccccatacacaagacggacatacattctctagaagattgccttgttttcaaaaagtcgctcgagaagcacatggcgtttgaaaaaggcaagcgagtatgcgttgtcgagaagaacgaagagacggctcctcacgaatcggattctgcgtatccagactccgacctccacatctcacacattttctgcagctccacaacgtactcctccaagcgagaatacaagaaagtggaacgtgaagtctgttcgacatggcggggagctgcacccaagatgaagtggtctgagcagaaaatagagttctcggaagaagaccaccccaagaccgtcgttatcccaggacgatatccgatcgtggtcgaacccactattcggaacatcaaggtagcgcgagttctcatcgatggtggtagctcgatcaatctttttttcgccagtactctggacgcaatgggaattccacaaacttataacgccaacatcgggagaactgcacttgcgaagttcatggccgcatctcactacgcgtatcaagtgctcaagatgccgggaccgaagggaacaatcactattcaggggaacgcaaagctggcggtgcagtgcgacaagcggagcctcgacatagtcgagcaaacgcccagcccacccgccacgactgagccacccaagaaaccgtccgacatgccgggggtccccagggaggtgattgagcacaaactaatggtgcgacccgatgccaagccagtaaagcaaagactgcggagatttgcaccagaccggaaacaagccatacgagaagagctcgacaaacttctcaaagctggcttcatcagagaagtacttcatccagagtggctagccaatccagtcatggtgcggaaggccaacggaaaatggagaatgtgtgtcaacttcaccgacctcaacaaggcgtgtcccaaggatcactttcctctccctcgaatagatcaattggtggattcaacagccggttgcgagctattgagcttcctcgatgcttactctggctaccaccaaatcaggatggcaaaagaggacgaagagaagacagcattcatcacgccgttcgggggcgcacttagcaaccagcttggcaacaatgtcgaggcttacgttgacgacatcgttgtcaaaaccaagacaagcgactcattgattgacgatctgcgggaaacattcgacaacctccgacgatatcgcctcatgctcaatcctgagaagtgcacgttcggagtaccgtcgggcaagctactcggattccttgtctttggcagaggaatagaggcaaatcccgagaagatcaaagcaatcgagaacaagaagtcgcccacgagactcaaggaggaagccgaagaggcatttattgcactcaagcgctacctatcaaacccccctgtactttttgctccccaacctaatgaagaattattcctctatattgccgccacgccatattccgttagcactgtcattgttgtcgagagagagaaagtacagcgactagtttattacgtcagcgaagctctctatgacgcaaagacaagatacccacagatccaaaaactgctttacgcagtcatcatgacatcaaggaagctgcgccactactttcaagctcacagagtcacagttgtatcctccttcccccttggaaaagttgtgagaaacaaagacgttgtcggccgcattgcgaaatgggtaatcgagctaagccaatttgatgtccactttgtgccgcggacagccatcaaatcccaggtactcgccgacttcgttgccgattggactatgccagacaacaaatcagacaaccaaggcgacaacgaaacatggacaatggcgttcgatggcgcactcaacagccaaggagcatgggcaggatttatcttgatgtctccctccggagatcaattcaagcacgcaatccacctcaacttcagggcgaccaataacactgcagaatacgaaggactactcgccgagatacgagctgcagccgcacttggggccaagcgactaatcgtcaaaggggactccgagctagtcgcgaaccaggtgcacaaagactataaacgctctaaccccgagttatccaagtatctcgtagaagtcaggaagctagagaagagattcgatgggatcgaggtccgacacgtctatcgcaaggacaacgtcgagccagacgacctagcacgacgcgcgtccagacgagaaccgctcgaacccagcacctttctcgatatcctgacgaagccatcggtgaaagaagttagcggcgaagttagcccgaacacacccgacatcagctcggaggtcatcgaggcagaacgcgccgttgctgacatcgaaaccacagacgactggcgcatcccatcaatcaaattcatcagcagtgaggagttgcccgaggacgatacagaggccgagaaaataacccgtaaagcaaagatctactgtatggtcggtaatgatttatacaaaaaagcgctaaacggtgtacttctcaaatgcgtctctaccgatgatggcagacacctcctcctcgacatacatgaaggcatatgtgggtcacatgccgccggtcggacattggtcggcaaagcttttcgacaaggctttttctggccaaccgcccttaaagatgcatgcgacatggtccagcgatgtgaagcctgtcaattccacagtaaacacacaaagctactcgtgcaagcgctccagactatccctctgacttggccgttctcgtgctgggggctagatatacttgggccattcccacgaggacagggcggctacagattcctatttgtggcgatcgacaaattcaccaaatggatagaagaagtgcccacgggggaaatcaaggccgacaacgccatcaaattcatcagagggatattctgcagatacggactaccgcaccgcatcataaccgacaacagctcccaattcatcagcgccgacttccaagattactgcatcgggttgggagtcaaaatatgtttcgcctcggtctctcaccctcaaagcaatggacaagtcgaaagggcaaacagcatagtactacaagggatgaaaacccgcgtctacgacaggctcatgtcacaagataaaaagtgggttgaagaactcccattagtactatgggccgtacgcaccacaccgacaacgtccaataaggaaacacccttcttcctcgtgtacggctccgaggccatgctccccagcgagctacgacatcagagtacacgagtacagaagtattccgacgagaaccaggaggaacaccgagacatcgatgtaaatcttctcaaggagcatcgtgagcgagttgccgtccaagcagccagctatcaacagtccctctgccgttatcacgagaagcgcatccgagcacgcatactttcgatcggcgactatgtccttcgacgagttcaaacccaagcagggcgaaacaaactctcaccaaaatgggaaggaccttacatgatcacacaagtcttgcggccaggcgcattcaaaatcgcagacggcgacggtcgcgaattagcaaattcttggaacattgaccaactacgtaaattctatgtatga

SEQ ID NO: 23750 - DNA, 387 bp, Oryza sativa
  Clone ID: PAT_MRT4530_287C.1
atgccgatgtgtgccaccacgaagcttgctgtcttgagctgccccttgatccgcagcacctggagcggcaacgaatgggatctggacgggggtggtcagagggagaaggagaaggtgagcgagagagtgaggcgaggaggggacgtggacggtcaaatccgcctgccccgaccacatggagatcggatccggacatcggccgtcggagacggcctgaggcaacgcgaggcagaggtagaggtggcgcgctcggtggtgacgacgacaacgtgccacgaggggaaggcgcttggcaacggtggaggcggcgcccagtggcggcacgagacggagacagagagagtaggacgagtgggagaaggggacgtgggtggcggcggcggctag

SEQ ID NO: 23751 - DNA, 1880 bp, Oryza sativa
  Clone ID: PAT_MRT4530_28800C.1
ctcgcagaagtgagggaaaaccaagaaaaaaaaacatttcctgcttccaaattttgtcggaattttgaagggaagaggaaggattcggaggtggtgatggcttccgctaccgcttccatctcgtcccactccgtcgccctccgcgacctcaaagctgcgaggattggagccgtgaagcagcaggtggccgcggccccggcggcgggcacggcggcggcgagggcccagcgcgcgagggcggtgcgcccgctgcgcgcggcggagccggcgaggcagcccgtctccgcctccgcggcggcggcgccggccgccgcgcccgtggcggaggacgccgccgccgccgccgtcgacgcccctgctccggccgtggactacgaggccctggcccaggagctgcagggcgcgtcgccgctggagatcatggatcgggcactcgccatgttcggatccgacatcgccatcgccttcagcggggcggaggacgtggcgctgatcgagtacgcgaagctgacggggcgtccgttccgcgtgttcagcctggacacggggcggctgaacccggagacgtaccagctgttcgacaaggtggagaagcactacgggatccggatcgagtacatgttcccggacgccggcgaggtgcaggcgctggtgcgcgccaagggcctcttctccttctacgaggacggccaccaggagtgctgccgcgcccgcaaggtgcgcccgctccgccgcgcgctccgcggcctcagggcctggatcaccggccagcgcaaggaccagtccccgggcacccgcgccgccatccccgtcgtccaggtcgacccctccttcgagggcctcgctggcggcgccggcagcctcgtcaagtggaaccccgtcgccaacgtcgacggcaaggacgtgtggaccttcctccgcgccatggatgtccccgtcaacgccctgcacgcccaggggtacgtctcgatcgggtgcgagccgtgcaccaggcccgtgcttcccggccagcacgagcgggaagggcggtggtggtgggaggacgccaaggccaaggagtgcggcctccacaaggggaacatcgacgaccagggtggggcggcggcggcggcggcgcacaaggccggcggcgccaacggcaacgggtcggccggcgcgccggacatcttcgagagcagcggcgtggtgagcctcacccgcgccggcgtcgagaacctgctccgcctggagagccgcgcggagccgtggctggtggtgctgtacgcgccgtggtgccccttctgccaggccatggaggcgtcctacctggagctcgccgagaggctgggcggcgcgggcggcggcgtgaaggtgggcaagttccgcgccgacggcgagcagaaggcgttcgcgcagcaggagctgcagctgcagagcttcccgaccatcctcctcttcccgagccgcaccgcgaggccgatcaagtacccgtcggagaagcgggacgtcgactcgctcctcgccttcgtcaacagcctccgatgagggagagacccgatcggcacagccatcatttgttcttggcatccaatggcaatcgacttggcgacgaccatgatccggtgtattagtattagggtgagatgggttaagttgggaatcggggaggtcagaggaaggggtcggggtcagggttcagatgcagttgctgcatctatagcttttgctgctactgcgggttaatcctggaaagcttctcttctttcggaggaagagggtaatttgggtcgtcgtgtgtacttgtagctagtaataacagaggattgtaagggtaaatttaaataaaaaattttggttatggagctaaaaaacaaaaaaaaaaaaaaaaaaaaaaaaaaaaa

SEQ ID NO: 23752 - DNA, 1155 bp, Oryza sativa
  Clone ID: PAT_MRT4530_28801C.1
atctcatcccgcggccgatagggagcgccgccgtcccgctgctcccatccgatctccatcccatcccatcccgatcgttgatttcaggtgggaatgacggagcaggagcaccgtgcgtatgcacgcgtcgggctcctcggcaatccgagcgacatgtatggcggcaagacgctctccttcaccatttccaacttctgggccactgtccatctagctccatccgacgatggtggcccccttgtgatccggccgcacccacgacacgatctcgtcgattttgcgtccctcccacaacttgtgactcgcttgcaaaatgaaggatataatgggggtgttcggctgctcatggccatctgtaaagttttctatagccactgtatccaacatggtatcgcactaaaggagcaaaatttcaccttatcatatgatactaatattcctcggcaggctgggctttctggttcaagcgctattatttgtgccgctctaagctgccttcttgatttttacaacgtcagacatttaataaaagtcgaaatcagacctaatattattcttgatgccgagaaagagcttggaattgttgctggtcttcaggatcgggtggcacaggtttatggtgggctagtctatatggattttggcaaggagcatatggacacattgggtcatggcgtgtacacacctttggatatcaatcttctccctcctctacatctgatctatgcagataatccgagtgattctggcaaggtccacagcaccgttagacaaagatggcttgatggagaggagtttataatatcatctatggaagaagtagcgcggctggcccttgatggccgcaaggctctgttggacaagaattatagggagctcgcgaggcttatgaacaggaacttcgacctgcggaggcaaatgtttggagacgatgtgattggtacggtgaacataaagatggtggaggctgcgaggagcgtgggcgcggccgccaagttcaccggcagcgggggcgcggtggtggccctgtgcccggacggcgaagcgcaggtgctgctcctggagaaggcgtgccgggatgctggctttcttgtgcagcgaatccaagtcgcgccatcaccgctaccgctcacggagggtaatcctcctttctaa

SEQ ID NO: 23753 - DNA, 1092 bp, Oryza sativa
  Clone ID: PAT_MRT4530_28802C.1
gtggaggcgctgctcgcgaggctccgcccggacgtcgtgctcttcgacttcgccacgccgtgggtcgccgacgtcgccaggcagctcggcgctagggcggcgcacttctccgtcttcaccgcggtcaccagcgcgtacctgacggtccccgcgcgccgtcgtctccaccacggggcggcgtcgtgcccgaccgtcgacgacctcgccacggcgcccgtggggttcccgccgtcgtcgtcgctggccaccgtgccgacctaccaggccgccgacttcacctacgtgttcaccagcttccacggcatgcccagcgcgtacgaccgcgtcgccgcctgcgacaaggccagcgacgtcctcgtcttcaagacctgcgccgagatggaaggcccctacatcgaatacgtcgccacgcaatacgacaagcccattctcgtcacgggtcccctcgtgccggagccgccgcatggcgagctggaggagcggtgggagacatggctctcctccttcccggacaacgccgtcgtcttcgcctccttcggcagcgagacgttccttccaaccgccgccgcgacggagctcctcctcggactggaggccaccggccagccgttcgtcgccgtgctcaacttccctaggagcgtggacgccgaggcggaggtgaagaagtgcatggcgccggggttcgaggagagggtgaaggggaggggtgtcgtccactcggggtgggtgcagcagcagcacatcctgcggcaccgcagcgtcggctgctacgtcaaccacgccggtttcagctccgtcgtggaggggctcgtcgccggctgccggctggttctgctgccgatgaagagcgaccagttcttcaacgccgcgctgctcgcgcgcgagctccgcgtgggtaccgaggttgcgcggcgagatggcgacggatggtttggccatgacgcggtgcgtgacgcggtgaacgcggcggtcgccgacgccggtggaggggacgacgacgagaggaagtggcgggagttcttgacggatgacgccgtgcaaaggagattcgtggaggagttcgtcagggagctgagaaaactcgtcctctga

SEQ ID NO: 23754 - DNA, 359 bp, Oryza sativa
  Clone ID: PAT_MRT4530_28803C.1
ctcacgatcaccaagtcgcagtagctggacacgccggcagccgacgggttcaatggcgcacgatgattcggatggtggtgctcaggggatggatgagcacttacggcacactgatgttaaggcgctggatgctttctgctacatgcctgtatagaagagggatccatggaacgaataccaggaggacaatatccctgttgcgctgatattccacatacatggcataagcgacctgacaactgatttgccacacatgctgtcatcacaagacgctttaacagccgcagtccttgcactaggaataaaaaaccatgaggaattcattagcgatgatagaaggggatctaccagagcaccta

SEQ ID NO: 23755 - DNA, 531 bp, Oryza sativa
  Clone ID: PAT_MRT4530_28804C.1
ggggaggggtggcgccggcggagagaggtggttcgcgtggctacggcgctacggaggtggagaggggaaatggagcggagtgaggcgcggagtgtggcggacggcggaggcagcaagtcacgcaagtgctgcccgctgcggcggtcgcggaaggggtgcatgaaggggaagggcgggccggagaaccagcgttgccccttccgcggcgtccggcagcgcacctggggcaagtgggtggccgagatccgcgagcccaaccgcggcgcccgcctctggctcggcaccttcaacaccgccctcgacgccgcccgcgcctacgactccgccgccagggccctctacggcgactgcgcccgcctcaacctactcctcgccggaatatgttgttgacaattaatacacacattcatgtatatgcatgtggtgtatgtgcgcatcgcatctgtaatactcctacgtgtcatgtgatatactctttccatctctaaatatttaacgccgttaatttctttaatatatttaaccgttcat

SEQ ID NO: 23756 - DNA, 447 bp, Oryza sativa
  Clone ID: PAT_MRT4530_28805C.1
cttttatgtttaggaaagtttctttcttgtccgacaaggacttgtatcaacccatgggtataaatatctacacccgaggtctatgtgatctatctctacgatcaatacaattcagcgcatcgccaccctttttacttctacttttgttttttacgttccggcggaacttggcacccgacgcggggctgcatcgtcttcgatcttcggcgaagggataagtccaatgttccgtaggcctaggcaattctatcgtttacgtcggcgtcgttcaaggctgcatcagtacattcgacctcttggattgctctggtttggatgatatttttgtctacctatttatcatatgtctatgttaatctagtcttagcaaatcaatttatctctatcggctgcttctcgttttagggtttctgccggtataggctaaatcgtgttgttagattagat

SEQ ID NO: 23757 - DNA, 261 bp, Oryza sativa
  Clone ID: PAT_MRT4530_28806C.1
gtgccgccgcgccgtcgcctcgaagccgccgcgccgcgccgagtgccgcgccgtgcgtcgccgccttgcgccgccgtcgccaccgccgccgtcggtaagccgccgcctcctccccttgctcagtcgccgtcgccagagaaccgagagagaggcaagtcatcactattccttgaacatgttgatcctaattgcgaaattattttgtttataaataaaattgcatgcaatgatgaacatcctacttgtgattatgccatgcct

SEQ ID NO: 23758 - DNA, 505 bp, Oryza sativa
  Clone ID: PAT_MRT4530_28807C.1
agggcccgccccgctgctcgccgcggcgagggggagtggccacgcgcggggcactgggctagcgaggccagcggtcgtttctttcttgtccgacaaagacttgtatcaacccatgggtataaatatgtacacttggggtctatgtaatctatcttcacgatgaatacaattcggcgcatcgccaccttttaccttttctactttattttatcgtccggcgggacttggcacctgacgcggggctgcatcggtgtttgatctccggctaaagggtaagtccaatgttccaccggcccgggcaattgtatcgtttacgttggcgtcgttcaaggctgcatcagtacattcgacctcttggattgctctggtttggatgatatatttgcctacctatttatcatatgtctctattaatctagtcttagcatatcaatttagctctatcggctgcttctcgttttaggatttatgccggtatcggctaaatcgcgttgctagattagat

SEQ ID NO: 23759 - DNA, 506 bp, Oryza sativa
  Clone ID: PAT_MRT4530_28808C.1
atgtgtgaaggggtcgagatggattggtggggaggaggctgagaagtagtggagagagacgggaaaaaagaggaggggaggattttcttgtccgacaaggacttgtatcaacccatgggtataaatatgtgcacccggggtctatgtaatctatcttcacgatcaatacaattcggcgcatcgccaccttttaccttttctactttattttatcgcccagtgggacttggcacccgacgtgcggctgcatcgtcttcgatctccggcgaaggggtaagtccaatgttccgtcggcccaggcaattgtatcgtctacatcggcgtcgttcaaggctgcatcagtacattcgacctcttggattgctctggtttggatgatatatttgcctagctatttatcatatgtctctattaatctagtcttagcatatcaatttagctctatcggctgcttctcgctttagggtttctgccggtatcggctaaattgcgttgctagattagat

SEQ ID NO: 23760 - DNA, 507 bp, Oryza sativa
  Clone ID: PAT_MRT4530_28809C.1
atggcgccggcctccggttttttggagctcaaactagattattcggcgaccaacgcctacgccgtcggcgacatgctcacctccgacgtcttctcggccggtgggttcacctggagtgtagactattacccgcgtggttacgagaaggagggcaacaatggtgattacttatcgctcttcctaaaacggcggggatgggacgacggacgtctccttcgtcgtcgacggcgagagcatctgctcgccatggctgacaggtacgcgctcgacaggcttaagctcatgtgtggccagaggctgttgcacagcatgacgtcggattcagtcgccggaatcttggcttgcgccgagacatacgattgcccggagctgaagaacaagtgcatcgacttctttgccgtcgaggagaatttcaggagagccgtgttcaccgatggttttgcgatgctggtgcagaaattcccgctcatagctgctgagctgaagaagaggattgtgaaaccgtag

SEQ ID NO: 23761 - DNA, 5194 bp, Oryza sativa
  Clone ID: PAT_MRT4530_2880C.1
attccaacgttcccggagagtccgaatttgcaggagaatattttgaggaatttcaaggccagcaaggcaactcctggtttggaatagtatattcctggtttggagatagaactgtgcagccgggattggttgttcagaatggttgggcctatgcaacaggattaggcgtagccctggtcaagctgcctatggagtggagtcatttgttcaggagttgcgtacgatgtccttcctcataggatttgagactgcccctttgtatgcccagattcctcatgatcgtgatgaagagaagtgtcgtgtcaaagtcaccttgaacagtaatcgtgaagatatcccatcggtgatgttcgaggctggagagggaagctacaatcatgcttgttaggaggtggcaaggatcgccataggagagctccgcgaaagctacaatgatcggttggccgacaccgagtaccgctaccatcctcgtcaaccccagggaagtgaccgtggcagttaccttgaacctgcagggattgagaatgatgctaccacaaggcatttggttgagatgctgtgggccatggatgagacccgcgctaaaattgtgatagcagctcaagatcgtgaagaccggaatcgcggaaagatttgcaagctggaggacaaggtggatcgtttggagaaggagctagccgcattaaaaggagaagcgccaccgcagaaggccagggttcgtcttaccgcaaggaagagagctctatttgtccctcgctaccagttggcgccaaagatggtgcttactcgcagcaacgggaatggccccaaccccaacaacaacaacaacaatgcagagaatcccacgcttgctcaagtcctggctcaacaggcacagcttatgaatctgatgatgcagcaactccagaaccagcagaaccagggaaacaaccatgcacctcccccgaataagctggcagaatttcttcgcgtgaggccgcctactttctctagcaccaccaatcctgttgaagctggtgattgcctgcacgccatagagaagaagttggacctgcttcagtgcacagatcaagagaaggtttcttttgcttcacaccagctgcatggccctgcctctgagtggtgggatcacttccgtctcaacaggactactgctgaacctatctcttggcttgagttcaccgctgctttccggaagacgcacataccatcgggagtggtgtctctcaagaagaaggagttcagggcgctcattcagggatctcgctctgtcaccgaatacttgcatgaattcaatcgtctggcccgttgtgctccagaagatgtgcgcactgatgaagagcgtcaggagaagttcttcgaaggtctgaatgatgagctttcttacccattaatgactggggattatcatgatttccagaagttagtggataaggctattcgccaggaggacaagtacaactgcatggagcagaagaaacgccgaattgctcacttcaaggctcagcaggggaatagtcagagacagcgtcttgctatgggacctcagtcaatgctagagggaggttcttagtctgttgttcgtccgcagcgtcagttcttcaacaacaatgctggcaacaacaaccgcaaccaagctccacgtcctgttgcagctctgacatagaatcagctagccaagagggagcaaggcagcaagcccggagtgtgcttcaattgtggtgacctaggacattacgctgacaagtgtccgaagccccgccgcgcgaaggttgtccctgctcagaacaactcctccgcaccagcgacaaaggctcgtgtcaatcatgttgctgctgcagaagctcaaggtgctccagatgtgattttgggtacattccctgttaactcagttcctacaacagtgcttttcgattctggtgctacgcattcctttttatctttgagttttgcgggaaatcatgggatggaagtagaagatcttagacgtcctttgatggttagtactccgagtaaccaagcactctcatcacaacgtagcccctctgtcagaacagagattcaaggagtaccatttctggccaaccttattctgttagaatccaaagatcttgatgtcatcctaggaatggactggttagccagatataaaggtgtgatagattgtgccaatagaaaagtaactctcaccagcaatgatggtcaagttgtaactgttcatgcattgccctctgaacttttaaggtcgagtctgaaccaaataactttggaagagattcctatagtacgggagtaccccgatgtgttccctgatgatttacctggtatgccgcctaaaagggatatagaattcagaatagatctggtaccaggaacaactccgatccataagagaccttatagaatggcagccaatgaattagcagaagtcaagaggcaagtagatgatttgcttcagaaaggatacatcagaccgagttcgtctccatggggagctccagtcatctttgtggaaaagaaagatcatacccagaggatgtgtgtggactatcgtgcactaaatgatgtcactatcaagaataagtacccgctgcccagaattgatgatttatttgatcagcttaaaggtgccaccgttttctccaagatcgatcttcgatcagggtatcatcagttgaggattaaagaggaggatatacctaagacggcttttaccactaagtatgggttgtttgaatgtactgttatgtcttttggacttaccaatgcccccgctttcttcatgaacttgatgaacaaggtgtttatagaatacctagacaagttcgtggtcgtctttattgatgatattctcatctattcccgaaccaatgaagagcatgaagaacatcttcgtcttgcactagagaagctgcgagaacatcagttgtatgccaaatttagcaaatgtgaattttggttgtctgaagtgaagttccttggtcacatcatctcagccggaggagttgccgttgatcctagtaatgtggaatccgtaaccaactggaaacaaccgaagacagtttcagagattcgtagttttctgggtctcgcaggttattaccggaggttcatagagaatttttccaagattgccaagcccatgacacgactgcttcagaaagatgtgaagtacaagtggtcagaagagtgcgagcagagttttcaagagttgaaaagtcgcttaatatcagctcccattttgattttgcatgatcctaagaagggtttccaagtgtattgtgatgcatctaagcttgggttaggttgtgttctgatgcaagatgggaaggtggttgcctatgcatctcgttagttacgtccgcatgagaagaactaccctactcatgatcttgagttagctgcagtggttcatgcgttgaagatttggcgtcactatctttttggtactcgtacggaggtgtacactgatcacaaaagtttgaagtatatttttatctagtcggatctaaacatgagacaacagagatggttggaactgattaaggactatgatatgggaattcattatcacccaggaaaggccaatgttgtagcagatgctctcagcaggaaaggctattgcaatgctacggaaggacgacagttgccattgaagttatgcaaggaatttgaaagattaaatttggaaattgtcagtagaggtttcgttgcagccttagaagcgaagcccactctcattgatcaagttagagaagcccaaattaatgatcctgatattcatgagatcaagaagaatatgagaagaggaaaagctatcggtttcttggaagatgagcaaggaactgtatggttgggtgagagaatctgtgtcccagacaacaaagatttgaaagatgcaatactgaaggaagctcatgatactttatactccattcaccctggtagtactaagatgtaccaagacctcaaggaaagattttggtgggcaagtatgaagcgtgagatagcagagtatgtagctgtgtgtgatgtctgttagtgagtcgaggcagaacatcagaaacccgtaggtttgttgcagcctttgaagataccagaatggaagtgggaggaaatcggcatggatttcatcactggtctacccagaacatcatcgggccatcactctatttgggtgatagtcgacaaacttaccaaaatggctcatttcatcctggtgaggacaacatattctggaagccgtttggcggaattgtatatggcaaggattgtgtgtttgcatggtgttcctaagaaaatagtatccgatcgaagtagccagtttacttcaaagttttggaagaaactttaggaagagatgggttccaagttgaacttcagtaccgcttaccatccgcagacagacggacaaactgaaagggtaaatcagattttggaagacatgttgagagcttgtgctttagacttcggtggatgttgggataagaatctgctttacgcggaattctcgtacaacaacagttatcaagctagtcttcaaatggctccttatgaagcactgtatggtcggaagtgccgcactccgcttttgtgggatcaaatgggagaacgtcaggtttttgggactgatatcctaagggaagcagaagagaaggtaaagatcattcaagaaagattgcgtgtggctcattctcgtcataagagttatgccaacaatcgccgcagagatttaagttttgaggaaggagatcatgtgtaccttcgtgtcacgcctcttcaaggggttcatcgttttcacactaaaggaaaattggcaccgcgttttgtgggaccttataagattgtcagtagaagaggagaggtcgcttatcagttggagttacctcaatccttggcaggtgtccataatgttttccatgtgtcacagttgaaaaagtgtttaagggtacccaccgaagaagctaatctggaacagatagtggtccaagaggatctgacatatattgagaaaccaatccgtatcttagagacagatgagagaagaaccaagaatcgagttatccgtttctataaggttcaatggagtaatcactcagaggaagaatctacttgggaacgagaagatgaattaaagtcagctcatccgcatcttttcgctagttcttccaaatctcgaggacgagattctgtt

SEQ ID NO: 23762 - DNA, 407 bp, Oryza sativa
  unsure (1)..(407): unsure at all n locations
  Clone ID: PAT_MRT4530_28810C.1
gacgcgtgcgcccacgcctacgcccgtctccttgctagattatccgctgttagaacctttttgaagctctactccatcatccatggcagagacaatagtgtgcatgaaggcacgccacatcttcgacaacaagagcaaccccaccgctctaaggtggtgtgtgcccgctcgatggaaccaccaccaggctttgacataccagaggtgcatctgcctgggcctattaatcttctgcttccaccgactgctgaactgattactcgtcaaagggcgctgtcaacgctggtgacaatgccaacgcaggccttgcaccagctnttatttggaaggaccctacctcacaggctaacggtcataacttatgcctgagcagccatattgaaacgaaaataagtggtggtggggca

SEQ ID NO: 23763 - DNA, 504 bp, Oryza sativa
  Clone ID: PAT_MRT4530_28811C.1
acatcaaggactaaactgagcctcagatgagacttggaggaccactttggctattcaccctttatctttaggaaagtttctttcttgtcgtacaaggactagtatctacccatgggtataaatatgtacacctggggtctatgtaatttatcttcacgatcaatataattcggcgcatcgccaccttttaccttttctactttattttatcgtccgacgggacttgacacctgacacgggggtgcatcggtgttcgatctctggctaaagggtaagtccaatgttccgtcggcccaggcaattgtattgtttacgtcggcgttgtttaaggctgcatcaatacattcgacctcttggattgctctagtttggatgacacatttgcctacctatttatcatatgtctatgttaatctagtcttagcatatcaatttaactctatcggctgcttctcgttttagggtttctgccggtatcggctaaatcgtgttgctagattagat

SEQ ID NO: 23764 - DNA, 440 bp, Oryza sativa
  Clone ID: PAT_MRT4530_28812C.1
tttgtgtttttattattttttttttttcatgatttttgttttttacaaatttttttgttacactggggagaaaagccgaaatgacttatcaaaaccgaaaaggaaccgagaaccgttcaagaaaggcatagaacggggggggggagtccccccggatgggggaagggggagtacccaccaaacccaaaatacccttgaattacctttttttattcccgcatcccacgcattgagggaggggaaattcttttcttaaccttctaagatttcgagcttgcatttttttaaatgcaaaaaaaaaagccaaaggcgggggggtccccacaaggtcagaaacggggggccccggacaaatccaccaccggggcccactggttaaaactcattttaaccggttccggggagttccccgggaagagggcggccatggggcttccgag

SEQ ID NO: 23765 - DNA, 505 bp, Oryza sativa
  Clone ID: PAT_MRT4530_28813C.1
ccaaggagaggagcgacggaacaccgccgccgccgtccgtcaaggactcaagagagccgatactaggctttcgctcattgctttcttgtctgacaaggacttgtatcaacccataggtataaatatgtacacccggggtctatgtaatctatcctcacgatcaatacaattcggtgcatcgccaccttttaccttttctactttattttatcgaccggcaggacttggcacctgacgtggggctacatcgttgttcgatctccggcgaagggataagtccaatgttccgtcggcccaggcaattgtctcatctacatcggcgtcgttcaaggctgcatcagtatattcgacctcttggattgctctggtttggatgatatatttgcctacctatttatcatatgtctatgttaatctagtcttagcatatcaatttagctctatcggctgcttctcgttttagggtttctgccggtatcggctaaatcgcgttgctatattagat

SEQ ID NO: 23766 - DNA, 1504 bp, Oryza sativa
  Clone ID: PAT_MRT4530_28814C.1
atggggctggagcggcggcgggcggggctcgagtgctggcgtcggactaggggcagcagcagcagagtagaggcatatttgcaacgaagcgatcgttctgcagcagcccgaggtaggtagcgatctagcgagggccatggacacgaggggcgtcatccgcaccttcgaggagtacgacgccgccgtcgagtggagccgcagcgccgaggccgacgccgtcaagatctccctcccagggttcaagatggaggagatacgggtgctggtggacaaccacggccacctccggacgcgcggcgagcggcccgtcgcccggcaacaggtggagccgcttccagaaggacttccagctccccgccgactgcaacgtcgacggcatccgcgccaagttcgagaacgaggcgctcaccatcacgctccccaagaagaccccctcgccactgcctcagtcgcccaggtggtcgcgggtggcgcctggcaatgtggcgttctacaagagaaaaacaatgcagccgggcagccgattggtcacttgtccacagaggaagccatctccgatccatccaagaatggcattcttctccgctggagcgtgcctatcactgatgactatatagacatcggccacaagaggtcatcgtcatcaagcattcccatatcgatcagcagcagcagcagagtagaggcatatttgcaacgaagcgatcgttctgcagcagcccgagggttcaagagggaggagatacgggtgctggtggacaaccacggccacctccggacgcgcggcgagcggcccgtcgccggcaacaggtggagccgcttgcagaaggacttccagctccccgccgactgcaacgtcgacggcatccgcgccaagttcgagaacgaggcgctcaccatcacgctccccaagaagaccccctcgccgctgacgccgtcgcccacgccgtcgccggtgacgccgccgccgcagcagccgccccagcccgagcccaggaggccgcccgccgcgccgcttcccggggtgcggacgccgccgtcgccgcctcgcagagcgccagcaccggcgccggcgccgctgacgcctgctctttcccagaggttcctggcggagcgcagaccagcgccggtgccggagccggtgacccggaagaggtccgacctgggcaccctcatgaaacccaaggaggacaaggtggaagagaccacgaagcctctgccgccgccggctgcagcggcggcggcggcggaggaggaggaggagaggatggcaagggaggcaagagggaagatggaagaagacaagaagaaggccaacgaggaggtgacggacatggcgcagctgaggaggccggcctcggcgagccgccggcagctggtgaacgtggcggtggcggccgtggtcctcctcggcatcaccctctacgtgtggaacaccctgaggaacgccgcaaccggcggcggcggcaacggccatggcgcgagctacagcgacgagatgtga

SEQ ID NO: 23767 - DNA, 442 bp, Oryza sativa
  Clone ID: PAT_MRT4530_28815C.1
ttgtgtcttgtgggtacagtttttttgtccgacaaggacttgtatcaacccatgggtataaatatgtacacccgggctctatgtaatctatcgtcacgatcaatacaattcggcgcatcgccaccttttatcttttctactttattttatcgtccggcgggacttgacacctgatgcggggctgcatcggtgttcgatctccggcgaaggggtaagtccaatgttccgtcgccccaggcaattgtatcgtttacgtcggcgtcgttcaaggctgcatcagtacattcgacctcttggattgctctagtttggatgatatatttgcctacctatttattatgtctctgttaatctagtcttagcatatcaatttagctctatcggctgtctctcgctttagggtttctgccggtatcggctaaatcgcgttgctagattagat

SEQ ID NO: 23768 - DNA, 608 bp, Oryza sativa
  unsure (1)..(608): unsure at all n locations
  Clone ID: PAT_MRT4530_28816C.1
atcgatcagcagcagcagcagagtagaggcatatttgcaacgaagcgatcgttctgcagcagcccgaggtaggtagcgatctagcgagggccatggacacgaggggcgtcatccgcaccttcgaggagtacgacgccgccgtcgagtggagccgcagcgccgaggccgacgccgtcaagatctccctcccagggttcaagagggaggagatacgggtgctggtggacaaccacggccacctccggacgcgcggcgagcggcccgtcgccggcaacaggtggagccgcttccagaaggacttccagctccccgccgactgcaacgtcgacggcatccgcgccaagttcgagaacgaggcgctcaccatcacgctccccaagaagaccccctcgccgctgacgccggcgccgctgacgcctgctctttcccagaggttcctggcggagcgcagaccagcgccggtgccggagccggtgacccggaagaggtccgacctgngcaccctcatgaaacccaaggaggacaaggtggaagagaccacgaagcctctgccgccgccggctgcagcggcggcggcggcggaggaggaggaggagaggatggcaagg

SEQ ID NO: 23769 - DNA, 507 bp, Oryza sativa
  Clone ID: PAT_MRT4530_28817C.1
ctccgaaaagaggcggcggcggcgatttcgcggcggagggggcgcgcagcatgaggcggcggcggcacgcgcgtgttagtttctttcttgtctgacaaggacttgtatcaacccatgggtataaatatgtacacccggggtctatgtaatctatcttcacgatcaatacaatttggcgcatcgccaccctttttacttctacttttgttttttacgtttcggcggaacttggcacctgacgcggggctgcatcggtgttcgatctccggcgaaagggtaagtccaatgttccgtcggcccaggcaattgtatcatttacgtcggcgtcgttcaaggctgcatcagtacattcgacctcttggactgctctggtttggatgatatatttgccttcctatttatcatgtctctgctaatctagtcttagcatatcaatttagctctatcggctgtctcttgctttagtgttcctgccggtatcggctaaatcgcgttgctagattagat

SEQ ID NO: 23770 - DNA, 407 bp, Oryza sativa
  Clone ID: PAT_MRT4530_28818C.1
aagtgctcattctttcaccatcttatttcatcaaattgatccaccaaagcaaaagaacatgtcttttgcaagtcgtaacaccaccgcgtgattaaattaacaatccacacacatatatactttagctttgtcccttcccagacgaagcacgcattaaacatttaaactcgatcggcgacacctccaacactttcgcgccctttttttttctcttttcttttcacatctcgtcgctgtagctcgcgccatggccgttgccgccgccgccggttgcggcgttcctcagggtgttccacacgtagagggtgatgccgaggaggaccacggccgccaccgccacgttcaccagatgacggcggatcgccgaggccgccctcctcagctgcgccatgttcgtcacctcctcg

SEQ ID NO: 23771 - DNA, 505 bp, Oryza sativa
  Clone ID: PAT_MRT4530_28819C.1
ttgcttggggcccgggctgcggcgaggggtgctcgacgagctcctccttcggctcgaaccggaacccgagggggaccttcttttcttgtccggcaagaacttgtatcaacacatgggtataaatatgtacacccggggtctatgtaatctatcttcacgatcaatacaattcggcgcatcgccaccttttaccttttctactttattttatcgtccggcggaacttggcacctgacgcggggctgcatcggtgttcgatctccggctaaggggtaagtccaatgtttcgctggcccgggcaattgtatcatttacgtcggcgtcgttcaaggctgcatcagtacattcgacctctttgattgctctggtttggatgatatatttgcctacctatttatcatatgtctatgttaatctagtcttagcatatcaatttagctctatcgactgcttctctttttagggtttctgccggtatcggctaaatcgcgttgttagattagat

SEQ ID NO: 23772 - DNA, 794 bp, Oryza sativa
  Clone ID: PAT_MRT4530_2881C.1
gtggaggtggagatggaggaggtgagccacaaagcttgcgcgtctcaacttcgcgcgcgcgaggggggactatgttgatactcctattttcttttcttggtttcaggtactcctgccaatgtttcctagactacaccatcatttgagaagacatctaatgcagtcgcggagctgaaaaccacacgggctatatatgagcaagtgttatcttgagaattaatgtcaaaagaccaagatgctttcgagaggaacttctatcaactcaaagccttttacatggatacacgtggcataataccaccctcccctgatgagtaccctattttgggccttaatcttctgagacttttggctcagaacaaaattgctgaattccacgtggagctggaacttctgtccctaaaagcttgactatccttgcatcaagttatgccctgaaccttgagttttccttcatggaaggtgcttacagccaattattcaatgctcgtcaaactgttccacatgaggcttatgacttctttatagatcttcttgctgaaactatcagagatgaaatagctgattgcagtgctcaggcatatgactacttgtcaatatcttatgcaaagaaaatgctattgttttcttgtgaccaacagcttcttaagttcatatcagaggcaaaacatgaatgggatgtccaaaattgtttagtcctttttgacatggcaaaatccaaacctcctgccataccctcgcttcagcaaaacaagagaagtattagctacgtgaaggagctggactagccacaa

SEQ ID NO: 23773 - DNA, 516 bp, Oryza sativa
  Clone ID: PAT_MRT4530_28820C.1
gacgtccgatcggtagctctccccagagtttagggttggaagaagaggaagaactcgggaggaagaagcagtagagagacaagaaagtttctttcttttccgacaaggacttgtatcaacccatgggtataaatatgtacacccggggtctatgtaatctatcgctacgatcaatacaattcggcgcatcgccacccttttttacttctacttttgtttttacgttccgacggaacttggcacccgacgcggggctgcatcgtcttcgatctccagcgaagggataagtccaatgttccgccggtccaggcaattgtatcgtctacgtcggcgtcgttcaaggctgcatcaggacattcgacctcttggattactctggtttggataatatatttgcctggctatttatcatatgtctatgttaatctagtcctagcatctcaatttagctctatcagctgtctctcgctttagggtttatgtcggtatcggctaaatcgccttgctagattagat

SEQ ID NO: 23774 - DNA, 505 bp, Oryza sativa
  Clone ID: PAT_MRT4530_28821C.1
gaggagaaggcggtggagtcggcgtcggcgtcggcacggtcggagctggagaagcagtagcgtcggcggcggttagtttctttcttgtccgacaaggacttgtatcaacccatgggtataaatatgtacacccgatgtctatgtaatttatctctacgatcaatacaattcggcacatcgccaccttttttacttctacttttgttttttacgttccggcggaacttggcacccgacgcggggctgcgtcgtcttcgatctccggcgaagggataagtccaatgttccgtcggcccaggcaattgtctcatctacatcggcgtcgttcaaggctgcatcagtacattcgacctcttggattgctctagtttggatgatatatttgcctacctatttatcatatgtctctattaatctagtcctagcatatcaatttagctatatcggctgcttctcgttttagggtttctgccgatatcggctaaatcgcgttgctagattagat

SEQ ID NO: 23775 - DNA, 1457 bp, Oryza sativa
  Clone ID: PAT_MRT4530_28822C.1
ccctcctttattccccgtctcctccgcgtgagctcgccggagcaccgccggccgatcccccccacccccgccacgcgagcagcgccgctcgcgcggcctgctgcccccgcctcaccctcgccggtgaacggcgcatgcccccccgacgttaggtgtcgcgcctggagacgcggagatggatccgatggatatcgtggggaagtccaaggaggacgtctccctccccaaatcaacaatgtttaagattataaaggagatgttgccccctgatgttcgagtggcaagagatgcacaagatcttcttgtggaatgctgtgtagagttcatcaacctcctatcttctgaatccaatgaagtttgcagccgagaggacaagaaaactattgctcctgagcatgttcttagagctctgcaggatcttggctttagggagtacattgaagaggttcaagcggcctacgaacaccataagcatgataccctggattctccaaaagcaagcaaattcactggtgtggagatgacagaggaacaagctgtagctgagcaacagaggatgtttgctgaggcccgagcaaggatgaacaatggtgccgccaaaccgaaggagccagaacctgaagcgcagcaacaaacacaacagccaccacagcctcagctgcaccctcaaccacagcaacccctgcagcctcaacttcagctccatcctcaaccacaacaacagccctcacagctacatcctcaacagctgctgcatcctcaatcgcagcaaactccgcagcctcaacctcaggtccaccctcaaccacagcagcctccacagctgcaaccgcaacctcagcttctccagcaaccgcagctgccccaacagctgcagccgcaatctcagctccccccacaaccgcagcagcccccacagctgcagctgcaatctcagctccacccacaaccgcagcagcccccacagctgcagccgcaacctcagctccatcagcaaccgcagccgcaggcagagctgcaatcacagtcacaaccacaaacagaacatggcttggacagttcatgattcagattccatgttgtgtagcctcagtataaggaaaagttggtgtacttccgctggcatttactaggactctgtgtgccccttgatagctttaggtttccatgcttcatgtacaatgtaaatccagtgtgatttcagttaccatgttgctaataatctgaagctctcttttgtcactgatgttattacttttccaaacaccctttctctgactctatgactgtagtagtatcatggcatgtatgatgccttgtcaaaagggactccattagcagtgtaacttgactttttccggtggcggttgtggtttccgtggcttttttaaaaaaaaaaaaaaaaaaaaaaaaaaaaaaaaaaaaaaaaaaaaaaaaaaaaaaaataaaaaaaaaaa

SEQ ID NO: 23776 - DNA, 739 bp, Oryza sativa
  unsure (1)..(739): unsure at all n locations
  Clone ID: PAT_MRT4530_28823C.1
ttcccgttcgacccagcgttcgcaaactcaaacggtataaggagtgcggggggggcgagctcatagctataaagatctttgtcatcctctctctcctcgccctcgcagcgagcagcgcctcagcacagtttgatgcttgcacctatgggcaaagccaacagcagccgttcatgcaaccgatcatgaactcgtgcaatgggggggggaggcgacagtgcagcccagtgagcctgccttgggagcagtcacacaggctaaaactgagcagctgccaggtgatgcgacaacaatgctgtcggcggatgaggctgatggcgcagcaatatcgctgccaggctattttcaccatggtgcaggcgatcatgcaacaggtgcaattagatgctagcttatttggtgtgccccaagctcaggcccaggcccaggtggctctcaacttaccctccatgtgtggtgtctaccctaggtactgcaacactccgtgtatcgttgctactagtcgttgcggttcttggtagtgtgtactagcatatatactttgataaataaagtgtcgcacattatcgtgtgtgtcacgtaatggaaatttggaatagtgtttggttgttcgtatgaataaatgaaaataacatggacatttgaatgaaaaaaaaaaaaaaaaaactcgagggggggcccggtacccaattcgccctatagtgagtcgtattacaatcnnnnnnncttttttttttntccc

SEQ ID NO: 23777 - DNA, 191 bp, Oryza sativa
  Clone ID: PAT_MRT4530_28824C.1
tttttagtgggggagaattttgtcagccaggggatgggttatcttcaagctctgtggcacacggggacaatggaccataaactagtgacacatagaacaattcttggtgggggatttgcgggcctcgcaacccacgaaaagaaaaactccaatttaattttttgcaacctcccaacgggttcagtgggggg

SEQ ID NO: 23778 - DNA, 224 bp, Oryza sativa
  Clone ID: PAT_MRT4530_28825C.1
aattatgaaacagcgaaccataaaccatccgatattatatgaggcgggggtgaacaaaaaaatcactgattatgaccctgggcagaaaacgtatgcaggtctgggccgcagaacactacacgatggaaactaaaaactgcacatcccccaatcaacctgagaggccgccgatccacttataaaatgctgtagagacaggtcgaagtgaagacagagttgggggc

SEQ ID NO: 23779 - DNA, 1036 bp, Oryza sativa
  Clone ID: PAT_MRT4530_28826C.1
atgacggcggggtccaagggcggcggcggcggcgtggcagcggcgagggcggcggcggcggggccgaggacggtgctcatcacgggggtcagcagggggctgggccgcgcgctcgcgctggagctcgcgcggcggggccacgccgtcgtcggctgcggccgctccgccgaccacgtccgctccctcgaggccgagatcgccaccccggcccgccacttcctcaccgtcgccgacgtgaggtctgacagcaacatggccgagttggcaaaggcagttgtggaaaagaaacaagttcctgatatcatagtaaacaacgctggtacaataaacaagaataacaagacatggagcgttccagcggaagagtttgatacagtggttgatacaaatattaagggaaccgcaaatgtactccgtcatttcataccccttatgatagagaagaaacatgggattatagtcaatttgtcctctggttggggtaggtctgctgctgcagaggttgccccatattgtgcttcaaagtgggcaattgaaggtttaacacgctccttagcaaaggagctgcctcctggattggcagcaattgcccttagccctggtgttgtgaatactgacatgcttaattcatgcttcggaagctcggcctcattataccaatcaactgaacaatgggcacccaaggcagctacgatgatactaagccttggcctagacgacaatggctcatcgctcaccgtatgatgctgtagcaaatctatatgccgaactaatctctgatgtattgagttgtagtccttaactttgaactgttgtgcaacattatgttgtagttagatcgaatcgacagtgcgctaatggctgtagctgtgcgtactgctggttcgctatctcacagtgattctgtaccgtatattgatgatgatgatgaaactgtgaatgagtatggatggcacgcgttatttctcccaaaaaaaacattctgatgttggaaaaaaaaaaaaaaaaaaaaaaaaaaaaaaaaaaaaaaaaaaaa

SEQ ID NO: 23780 - DNA, 135 bp, Oryza sativa
  Clone ID: PAT_MRT4530_28827C.1
cgaatggaattctcgacccaagcgacccgtttggttatagacataggcttaccccgcgtggcctcgccgatggattgagctcacgccgccgctgtcgcctcgtcgcggattccaaggttcaatgagaggaggagg

SEQ ID NO: 23781 - DNA, 1808 bp, Oryza sativa
  Clone ID: PAT_MRT4530_28828C.1
ctagatcgcgagcggtgttcttttttttttttttttttttttacagcaaggtcaccattcactcttggataccgaaatacacagattaaacttgtttcgacatctcatgcatccttacagataaaatactatctggtagcgattacaaaagttattttcaatcacttccacgcagctttggatcaagaggtgcacaaaactcttgtcctggttccttagaaacaaatatatattgtaatccaggtgcatatactcttcgacctgaaagaaaccacaggtcacaaaaaaaggccgccatggatcattcatttctttgaggaacggaagcctccgaaacccatcatggcagcaacatcagggtctatgtcctcctcaggttcattctgggcagccagctctttctttttctctttcttcttttctttgcgttggcgcttcctctcctcatcctcttgctgctgtttcaatattctctcatccaaatcttgttcactaaagctacctgggtctttcctcttcttaagtgactcaaaccttttctgaacctgagtcttgccaagacgggactcaaggtcaacttcatagtccctatgcttcaaaggttgcctttgcacaggagggcccttttccttgcctttccgcgcttcttccttctcctcccgctccctctgccgagctcgttccaagtactcctccttgtcaaatttcctccggaaagtgttatcgacaccaaccggcttggtcaccttctcccactgaccatctgatgcctccttccacagtgtgatatcgccggagccggccgccacggacagtatgtttccggtcagtgaccaggacaccctccatgccggagcctcgaagtcatgcatcaccttcccttcccatttgtcgccctctttccccttggtccagatgacaaccttaccgtcttcagaggcactggcgattgtaaactttgcgaggcccaaaacaggtgcccaggatacatctctaacgcagtccgtgtgcatgtcggagggcagaacgctatccagcttccagctgccattgacaaaagcccacaccttgacaacacagtcgaagccaccagagacgagcttctggacaagttcccctgagccaacaatggaaccgagtgcggttgctggagcccatgagactgccatcaccccaacagggtgtgcttgctcaattgttgtggagtcccatcctccatccgggcgcatggtcatgacagagatgctcccgtcggaagagccacaggcaaggcaaaggccaagctcatacggagcccaagcaatggagttgagtgaagacttgtggttgtcgaatacgtgagcctgagaccattgcccagctgcaccctccttccaaactacgacacggccatcgtagccgcaggatgcaagaatcgaaccaaacttgggatgggcccatgcaacacgccacacaggtccatagtgtccgctgagggttgcaagcagctgggatggcgcggatgcacctccaatgctgctgatctgcacggtggagtctgaggaggctgtggcaaggctcttcccgtagtagtcgatggcagaatcatggaccatgtccttgtggtcaagctctatcttgtttgacgacatgccggcgaagagcgaagatgctagatccaggctcctccttggattccccaaccagctccccagaggactactcatttctttgtacacgagttcatccaccatccactcctcagcaaccttcagatcagtcatctccgcatagatttcttcagctgtgagcttcttcagaattgccat

SEQ ID NO: 23782 - DNA, 551 bp, Oryza sativa
  Clone ID: PAT_MRT4530_28829C.1
cacgaggatgacaatcctcaaacttctatgcagtgatagaggtgttttatactgtagctgcttctagcagtaagttcaggtgtagtgcaagtgcttttcatgtcattggaatgatatatcattaaagtatgtggtcgagctatgagtatgtttctgatatttggtatgtagatggataaacaagcatagtagaggcaaacaattagcccctacctgaagcaataagagcatattagcagcaagttggtagtgccaatttctaaggtagtatagatacagagaagtctgtgatactacttgatgaatgaaatacaggtagaaaccatagagtagaatactccaggcatttggcaagcaaaataatcatccttcctcgtacatttcctttctgtacaggttggatgcgatgccatttccttttagagcatgtccaagtggggccttttgaatcaactgcctggctgcctgagaaatggcagagacatcgactgattttgcttgatgggctgacgatttccaatcttgaagcatttgacacagaaagcaagcat

SEQ ID NO: 23783 - DNA, 2808 bp, Oryza sativa
  Clone ID: PAT_MRT4530_2882C.1
atggacatccaccactacatcccgcggatccggccacccgccggcgccggtgcaccggtgttcgcggcgctgcgtgccctgaccatccgctgctccaccttcgactcgctcgagatggaacgacgcctcgtctcgtcgctgtgcccccgcggctgcaggatctcacggtcatcacctacttcctcgaggtctccgacggtccgacctcaccgtgcgctccgggtcgctggagcgcgcgactggacgttcgcggccgcgtcaacggccggctcaccgtcaaggcgccgccagaggctcaacacggcgagcgtcgccgccccgaacctcggcgacgtgccgtggcgagacatctacgaccctcgccgccacctgttcgtccaggccccgcgccatgtccggaagctgaaggagctgggcgtcgaggcgtcgtcggcggcggccgcgtcctcctccatccacgctccacaccgaacccgaacctcgttgccggcagccgcgtcctcccccgtccacggtccacatcgaagctcgtcgccgacgactgtgtcctccgtcgggagctcgtcactggtgaccgtgcccgtcgtccacgcctcagccggcggccgcgtccttcacgccggagctcgtcgccggcgccgccgccatcaccccgcaggatcctccgccgtccatgccccacgccagagctcgtcgccggcgccgtctctatcaccacgtaggatcctccgccgtccatgcgaccatgccccacgccgtagctcgccggtggccgcgttctccacggcggagctcgtcatcggtgtcactaccatcaccacgtcgggatatcttgctacatcgaacgagcaagttgagaggttcgtccagggaggaatctcagcagccagccacgaagaccacgactgtccatgctctcagccggagaaccagctgagatcacggatcgatggcatcgtcctggattcgcttcaagaggtagagatgagaaatttcacaggagcaaccgatgatttaggcacggtgaagctgctgctcaggtgcaagccgattcccaagagggtgtccttccatctctcgcatcaaatcaggaacaacgctgatcttctagttaatggatgccgttccatgtacactccgttcaacgacgacgcatgggagaagatacgcgacaggcccgtgttgttcccccaccctgcctccaatcttttgtctccggtggctctggtggccagatccgctaacgcgaccccacctgtcgccctcctacatcctcatggctccggcgtcgccaccagtgtgcccacccaccacccgtcttccaccttcttggtcattcctcagaagctatctttgctatctctaatcccgaaacccttatctgaaggaatctggccgaagttcgggtgtcgtctgcgtggaagcttgaagaggatgtcgccgccacgttgccgcgctcgtaattccggcgacggcggtgagggcgtcgaccgcatcagccacctcccggaggagctcatccagaacatcctcgtccgcctcccgtccgtcgacgcggcggcgcgcaccagcgtcctctcccggcgatggcgccgagtctggacccgcctcccgtccctctccttccagtgtgattccgagaagccgggcgccatcgacgccgcgctcgccgcctactccgcgccggcgctgaaccgcctcgccctctccgcggcccacgccctcgaggccgccaccgtcgcgccgtggctggagttcgcgtcgcgtcgcgtcgccggcaacctcacgctcaacttctcggtggccggcggcctcgagctgcccgcctgcgagcgggcgacgagcatcaacctccacgtcgggcacctccgcctcccgccggccggctcattcgcggcgctggcctccctggccatcgtcggcgcccgcatgcagggcggcgacttcgaggccgtgtgctcgccgcggtgccctcgcctccggcggctcgccgtgcgcagcgtcacgctcgtcggaggcgccgccgacgtctctgtgcgctccggctcgctggagtggctggtcttcatggcgcagggcgtcggccggctggaggtcgccgccccgaggctccggtacttccgggcagaagccaaggccgccgccggcgacgtctcggatgtcagcgtcgcctccccggtgctcgaggacgtcgcttggtacggggagttcgacccgcgccgccaccggttcgcagaggccggccaccgcctgcggaagctgatggtcatggacatgccgacggcggcgctgatgcggcgcttctacatcgtcgacgagctcgtgcttagcttcggaatttcaccggggatcagagggtacaagacgtttctgaatgctacgagcatgattgcaaagtgtgaggttttggaggtgcaggtgacgacgagacggcacgccttttcatcagcagtgttgcatctcctcaggaaatcaggtgacgacgagacgaagcttctgattcgtctgcctcggatggggaacaaaagctgcacggagggctgtccttgctctctgacggatagctgcaacactgacaagattcagttagattcgctgaaagaggtagaaatattggagttccagggagaatttaatcagatgaaatttatcaacctgctgctcgattgccaagcgccaatccttaagaaggtatatgtcagaatcccaaaggatgtgaagtccatcagcaatacgaagagcaagaaaattcgcagcattattgatggtcatccggagattgatgttgaattcaagttatggtcgtga

SEQ ID NO: 23784 - DNA, 466 bp, Oryza sativa
  unsure (1)..(466): unsure at all n locations
  Clone ID: PAT_MRT4530_28830C.1
gtctcttcatccgtctcgcatccattcccccgcctcccgccatttcaacccgcccccaattccaaaaccctcgcctcctccaacaacgcgcccccaaaccctaaccctaggagagggcgcggcggcggcggcggcggggggcgagatgccgaaggctacggcggcggaggaggaggagttccgggcggaggtggaggagcggctgatcaacgaggagtacaagatctggaagaagaacaccccgttcctgtacgacctcgtcatcacccatgccctggagtggccgtccctcaccgtgcagtggctccccgaccgcgctgagcccgctgggaaggaccactccgtccagaagatggtgctcggcacccacacctncgacaacgagcccaactacctcatgctcgcccaggtacagctcccccttgacgacgccgaggccgacgcgcgccactacgacgacgaccac

SEQ ID NO: 23785 - DNA, 631 bp, Oryza sativa
  Clone ID: PAT_MRT4530_28831C.1
gcacgagggtttagcttagcacagtcgaacagcagcaatggtgacggcggcgaggctactccccctaatcctcttcctcactgcggtggccgtgggctgcagcgcgtgggagatgaacatccggttgccgacggagagaatggcctacggcggcggcgaggctgtggtggcgccgatcatacacgcgctacggccgctgctgggctccggccggcagctggcggcgcgcgccggcgtggcctgcgacagctggaggctgggcgtggaggcgcacaacgtgatcgactggaggacggtgccggccgagtgcgagggctacatcggccactacatgctaggcgaacactaccgccgcgacttcgtcgtcgtcgtcgacgaggccgtcgcctacgccgagaccctcaagctcgccggcaatggcaaggagatctgggtgttcgacatcgacgagacctctctctccaacctcccctactacgccaagcacggcttcggagcaacgccatacaacgcgacaagctttcacgagtacgtggcggaggggagcgcaccggcgctgccagagacgaggcgactgtaccaccggctgcttgagctcggcgtcaagccggtgttcctaacaggccgcacc

SEQ ID NO: 23786 - DNA, 134 bp, Oryza sativa
  Clone ID: PAT_MRT4530_28832C.1
atgtgtgatgcgtccttgactggtcgatcactcgggttgctggctcgatgcacggcgtggacaagtgcaatcttgggcgggctcgaggacgacacaagtaggaagcaggtcaaaggtcccagcatttccaagga

SEQ ID NO: 23787 - DNA, 2559 bp, Oryza sativa
  Clone ID: PAT_MRT4530_28833C.1
atggcggagctcgtggtcagctcggccaagggcgccgtgaggtcgctgctgggccgcatcagcaccatgctcgtcaacgaggcacagctgcttggccgcgtccgccgcgacatgcagttcatcaaggacgagatggagatgatggacgccttcctcctgctcctcctgcaccagcaggccggcaccctcgaccaccactaccacaaccaatgcacgccatggatcaggcaggcgatggagctcgcccgcgactgccaggactgcgtcgagcagtacgcgcagtgcatcgcagctgggccatcctccaagagcctcctcctcggccgcctccgccgggtgtcccggcttgtccggagcctccccgaacgccacaggctggccgtgcagatccaagacatcaaggtccggctgggcgaggtgagccaccggcggaaggcgtatgacatttgtgccaacctcaacagctaccgtccacctgagcaggacaacggcggtgaacaggaagatgaagctgcttggaggcgttatttggcttctgctgaaccaccggccgacctgaagaacactgtgaacgaacttgtcaggtggctcatggaggatcaacctgcagggcttagaatcatacctgtggtcggaatctgcgtggatacaagtgcgattattgctgagagagtctaccagcactcctctgtcaccagcctgtttgactgcaaggcttggatcactgtccgtgattgtcaatctcatcttcagattctcaaagatatactatgtcaacttgttctccctctgaacaagttcaggagtgagatgattggctggaacgaggagcagctggtggaaaagctgcgctgctatttgcgaggtaaaatcttcctcattgttcttcacgatgtccgtgatgaatcaatctggagtcatataaagcttgccttcccagatgattgttctgctggtagtgccatcataatcaccacagatgatgataaagtggccgagtctttctctgcgtataaaatcttcaacccagatagccccggttatgttctcgatttcttccttagtaaagctatagctctgcttaaacatgaaaatgaaaagcagctaaggaaaatcctaccgtgcatgctgatccatcttgaacctgaaaccttttttatgaagatgctccttcggtacctgtattatgggagatatgctacgttacgactgcgtgatgcactgcagcatacgtcatcgctgcatgattattggcctaagaatatgcatcaggaggaccagcttagcaagttcaggacctgcatagtacctgacttggttcacgatgctcttactgatctggtagccagaggaagcaacattacttctgtggacacagttttggcgccaccagagttggcccgtcatctttcaatccgcttcagcacgaagttgcacatgtctccatctgaaccaatcaatagtattctttcctttctcaagtccttgcattcatcatctcggcttgggctgcttaaagtgctagatttggatggctgcaaaggtttgaagagacgccacctgaagaacatatgtggcatatatttgctcaagtatttgagcctacgggatacagatgtcaccagactgcccaaggaaatagagaatctgatctacttggaaacacttgacatccgacagacgaagatcagtgtcttccccaggaaatctttagtgctccctatgctcaagcatttgttctcaggccatactgtctatccaagtgaagacattttcaggcagcaggaatcattctctgccatccacattcctcaccaaatcgggaggatgaaaaacatggagatattgtcccatgtcaaagtttcacatggtggaatgcagttgattgctgttggccagctactgaagctgaggaagttaggtgttgtcatccatgacacagataaagatggttttgacagtttgcttcatgtaattggcaaattgaacaaatgcctacgatctttgtcagtccagattagatcaccttctgctgctgatggaagcaatggctttgacatgagcatgatgtacagcacatacccgaggcttcttgagagcctgaccatctgtggcatcaaaagtggattgcctccctggattgaacatctccaccaacttactaaggttactctgcataatacctccctgacagagagtgctatccatgtcctgggcaagctcgtgggcttgtgctatcttaggctccgacacaggtcatacatccgaggcgacctcaccatctctacaagggaattcaaaaacctcaggttccttttcattgagggcccagacattgtcaacatcagtttcgatgagggtgcagctcctaggcttgagaggatggtctggcgtttcacgagaatggtttctcttgttgggattggtcacatcctaagcatcagggagctcgagcttgaaggagacagtgacctggagaagattggggtgattctccgtgacatcaaagcacaccccaatgaccccagtctgaagcacattccagcagcagggaactaa

SEQ ID NO: 23788 - DNA, 505 bp, Oryza sativa
  Clone ID: PAT_MRT4530_28834C.1
gttggtagccacgtgttaacagcgaaatttggtaatcggcaaagacgtcatcggcttagaatcattatcggctgcagtttctttcttgtccgacaaggacttgtatcgacccatgggtataaatatgtacacccggggtctatgtaatttatcttcacgatcaatacaattcggcgcatcgccaccttttaccttttctactttattttatcgtccggcgggacttggcacctgacgcggggctgcatcggtgttcgatctccggcgaaggggtaagtccaatgttccgtcggcccaggcaattgtatcgtttacgttggcgtcgttcaaggctgcatcagtacattcgatctcttggattactctggtttggatgatatatttgcctacctatttatcatatgtctatgttaatctagtcttaacatatcaatttagctctatcggttgcttctcgttttagggtttctgccggtatcggctaaatcgtgttgctagattagat

SEQ ID NO: 23789 - DNA, 562 bp, Oryza sativa
  Clone ID: PAT_MRT4530_28835C.1
tcccgtcgaccacgcgtccgcccacgcgtccgctgacgcgtggtgtcgatgcagcttatcaccgagaagagcgacttgtacagcttctgcgtggtgatgctggatatgctgactgttctataccctttttaccccacacttccactactttttcacttatatcactatttccttaatcactttcattttttttcataacatactaatttcttatttaatatatatattataatttttatatttttttctttaaattttattattatttttttatattatattcaaatttatttttttattattttttttcttttatattctttattctttattttttataattattatatatttattatttttttaaatattattattttcatttttaatttatttttatattatttttaatttcttattttttattatattttttaatttttattatatatttaaactattatttctaattttatatttaatttaattatttacttatatttattaatatttcatactttattatatattcttttattattaatattttatattatttata

SEQ ID NO: 23790 - DNA, 171 bp, Oryza sativa
  Clone ID: PAT_MRT4530_28836C.1
atgggccaggtcggcccagcccatggttcagccgaaccttgcgtggcgccgtcagatgcagcgtttggtgggacggctgggattgatcccaatgatggttggagggcgtttccgacctttccaaccgtcataagctgcctagaaaaggccttcacctcactccctccatga

SEQ ID NO: 23791 - DNA, 197 bp, Oryza sativa
  Clone ID: PAT_MRT4530_28837C.1
aagcttagtaggcagaggaaaagaaatcaaatcagagattcccctagtagcggcgagcgaagagggaagagcccaaaccactaatttattagtggggttgtaggactcatcacaaagactagcaaactttagcagaacatttctgggaagttaggcgacacaaggtgaaagccctgtatgcgaaaaaaaaaaagctt

SEQ ID NO: 23792 - DNA, 500 bp, Oryza sativa
  Clone ID: PAT_MRT4530_28838C.1
gggggggggggggggcattatttggggttgggggaaaaaaacccccacaaaactttgggaagggccccccatcaaaaaaggggggggaaaaaagacaaaaaaaaaaaaaaaaaaaaaaggggggaaaaggtctttttaatcttgggggggggagggccgctttgccctcccgaaaaaaaaaggccccccccccccccgggccctggaaaacaaaaaaaagggggggggaaaaaatccgggcgccaaaccgactttttgggggaaaaaaacccccccccctttttggaaaaggggagccccacctcccaagggggggaccttaaaaggcttttcacctttccaaaggggccggaattttcgcccacaaaaaagttgccccccgggcctaaaaacctggccacctccacccccaccgggaggacggggccccttttctttattttggaaaaaaaggggccggcggccaagagggccaatgtccccgggaaggggctgaaaga

SEQ ID NO: 23793 - DNA, 174 bp, Oryza sativa
  Clone ID: PAT_MRT4530_28839C.1
atggacggcatcaacgccgtagaggacggaggcggtagaccggcggcgctgggaatggaggcgacaggctggcgacgctcggagggaagaggcgccacaggggaggaaggagacggtgcagcgcagcgcctcgatgtcctcatgcggtcgctgcggactcgcggtctcgcgtag

SEQ ID NO: 23794 - DNA, 1583 bp, Oryza sativa
  unsure (1)..(1583): unsure at all n locations
  Clone ID: PAT_MRT4530_2883C.1
gcatgcgagccatcggcgccgccgccgccgccgcgaggcggcacgcgcacctccccacctcctactccgccgccttctcctccttctccggcatcggcggcggcgccgggcgcgggcgtgggcgcggcctcccgccctccgcgacgccgccgcgcgcccccggtagccccgtcccggacgacgacgacggcggcggcgcggatcccttctcctccccggcccccatcggccgcggccgcggggaggccgtgatcccgtcggtctcgtcgccgccgcttcccggcgccggccgcggccgtggatcgccgccgcccctcggtgaggtcgcccccaagcaaccggtccccgccaagctgttcgacgcgccggccgccgaggcctcgtcctccgagccaccgccaccgccgccgccgcgcacgctcccttccgctggcgctggccgcggcgtgccgcggatgcagcagccgccagtggagatgccgcaggaggagaaccgattcatccgacgccgcgaggagaagaagaaggccgcgtcggcggcgcgtcccgctcccagcgggcagccgaagctgtcgcccgaggacgccgtgaagcgcgccatggagctcctgggcggtggcggcgacgacgatggcgggcgtggcggcaggggtcgtggtgcccgtggtagggagcgcgggcgcggcaggggacgtgatggcggccgcggccgccgctctgctgatatggaggagaagcatgggatctacttgggggacaatgccgatggcgacagactccagaagcggctcggcgaggacaagatgaagatttttaacgaagcgtttgatgaggccgcagataacgcgctgccagacccgaagcaggatgcatatctggaggcttgtcacaccaataacatgatcgagtttgagccagagtatcatgtgaatttcaataatccagatatcgaagagaagccacctatgtcattggaggatatgctacagaaggtgaagccattcatagttgcgtatgagggcatccagaaccaggaggaatgggaggaagctgtgaaagatgtaatggcaagggcaccccatatgaaggagctgatagatatgtacagtggccctgatgttgtaactgcaaagcaacaagaagaagagctgcaaagagtggccaacactctcccaggaaatataccctcttcagtaaagcggtttactgataaaactctactgtctcttaagaacaatccaggctggggttttgacaagaaatgccaattcatggacaagtttgctcgtgaagtttcagagctatacaaatagaaaactcccatacactgttgtaagatctcacttagccccaggaagattttgtggtttattttttctattttgagaaaagtgaggttttctttagtctgtgcacttcttttcctttgtattggtatgctaattagataaataaaatcactgatacacaaaaaaaataaataaaaaaaaactcgagactggttctctctctctctctccctcgtgccgaatctccagcccggggatcnnnnnnnnnnnnnnnnnnnnnnnnnnnnnnaaann

SEQ ID NO: 23795 - DNA, 390 bp, Oryza sativa
  Clone ID: PAT_MRT4530_28840C.1
atggggtgggcgctggcagccggccgccgcgcacggcctttgggacgtcgtggggcagctgcaggacgccgcggcaaggtcgtccgcgtggagcggcggcagggctgtggcacaatgccgtggcaacatcgcacgggtggactggtggtgaggcagcggaacagcaccgtcgcgaggtcgcctcatcgtgcggctggccgcgagagatgtggggcagcgtggctggcgcacacgaggcgatacggacctagcctggagcgcccaacggtggatccgctcgcccctatgctcgcaatggtggatttggccgcccccgagtgcctcgtggcggatccgcccacccccgtgctcacggcggcggatccagccccatggtcatggcggcattga

SEQ ID NO: 23796 - DNA, 793 bp, Oryza sativa
  unsure (1)..(793): unsure at all n locations
  Clone ID: PAT_MRT4530_28841C.1
ctccgccagcagttccctgaccggcgccgcgacttctccgggccagtggaacgaagttgccgcatcggcgtcccctgcatcccaccgcatcgagaagggacagggttgctgagagcagcagcgccaccagcccaaccgtggtgatggcttcgtcgccggagaagaaggatcctcctagttgtggctctcgggattcccagcccatcccttgcacggacgatccccccttgtctgaatccccaacgacggacctaggctgccacgatccgcgcgacgaggacgccgaccacccggcaccacccatgggcaaaggtgacatcgacgaggatagtgatgatgatggttacgcagacgaggagacaacttgcccagggcagaacttcacgaaggagcaggcaaaggaaataattcgcaagtggctagaaacatacgacaagaggaatagagaattcatggtggcgtgcgaggagttccaaaagcagggaggggatgagacgagtgcttcttgtccagtatttcctttgaaaccgctcccggagacaacagatttctgtaccaccaagagtttgtgctatcaccgtgaatacaagaccaatgatacttctgagactgcatctactattggngtggcttgaacccaaggagatgctccagatcttctctttgaggttgtccagctccatgtcctatcctattagtgtttacggaatctttgcagtacgtgattacttggaccctttgaggaantatgtctttcaccgtaccagagatgatcctgtcatagttgaacagg

SEQ ID NO: 23797 - DNA, 1092 bp, Oryza sativa
  Clone ID: PAT_MRT4530_28842C.1
atggcgacgaaaccaagcgctgtcgcgcggcgcggaggcggcaacggcaggagctgcagcgtggatgtgatgacggcgaagcaccacagagctgcaacggcgaggattggcggctcgttgcagcgctccatctctatcaactcctcctgcccggccatgacactaggggtgaaaacggtggtcgatgcgcttgaggtgtcggcgcagccgccgtcgccgccagacctcaaggaggccgccgccctccgccagcagttccctgaccggcgccgcgacttctccgggccagtggaacgaagttgccgcatcggcgtcccctgcatcccaccgcatcgagaagattcagatgacgtctttgcctcagccaactcacacaatatgttgataggtgacatcgacgaggatagtgatgatgatggttacgcagacgaggagacaacttgcccagggcagaacttcacgaaggagcaggcaaaggaaataattcgcaagtggctagaaacatacgacaagaggaatagagaattcatggtggcgtgcgaggagttccaaaagcagggaggggatgagacgagtgcttcttgtccagtatttcctttgaaaccgctcccggagacaacagatttctgtaccaccaagagtttgtgctatcaccgtgaatacaagaccaatgatacttctgagactgcatctactattgggtggcttgaacccaaggagatgctccagatcttctctttgaggttgtccagctccatgtcctatcctattagtgtttacggaatctttgcagtacgtgattacttggaccctttgaggaattatgtcttcaaccgtaccagagatgatcctgtcatagttgaacaggattccttcacattacctctttgcagcccttgtcgaggaatgtatgtagtagaatatgcattgtttgaggttgatctttgggtgaaaatggaaggtggagtatctaatgacaagcaattagtatccgcagtattgaagctgtcatacaagtatccacagagattgacagtaacgatcctcgtcatggccgagattgttggaggcactgttcacaaggaggcttaa

SEQ ID NO: 23798 - DNA, 381 bp, Oryza sativa
  Clone ID: PAT_MRT4530_28843C.1
ggggggaaaatttggttcccattggattggattggttgggcagctgtttcaatgtccatgaatgaggaaggccggccggccaattgttgaagagaaaaaaagccttttaggagtaggggggaggggtcccccaaggacttcagctccggcagggggggggccgaaccgccaccgccgggagccggaaaccccccaacgcccaaaccagggggggaggagccccccaaggggcctgccccggctgaaaagggggaaggcaagccaccgtcgtcgtcggaagggttcggtctcgacgacctcatgaagggggcccagtccctgatggaaaaaaaaggccgcggggaggaaaacccccgcagcggcggcccccccggggggctg

SEQ ID NO: 23799 - DNA, 1875 bp, Oryza sativa
  Clone ID: PAT_MRT4530_28844C.1
ttattcaagataagcagctggagtaaggacatctgccagctcctcaggaaccaaagcttgaatttcgtgcagccgtgtcctaattgatccacagtcgaccaccaagctgtctaaagaggaagcttctagccgatgagagatatcttcaagcgttttctttacatcatcggataagggggctaaggctttgctcgaagtatcttcttctgcgtcatcaagataatctctaatatcaaaagagaagagatcagctaaaaccggtggagcctgtttgagaatcgttgctgctggtctctttttcacggcagctttcttcttctgcaaccttgaaaaatgggctagagccgaaggagtcggaggagtttgctggggcgaagccgatgatgtttcttcagtatcgctcaccttagctgcagcctgatcaacatcctcgccaatttcttcttcgtccagagcttgttcgatggatggatccaaggcaggcaggtcatcagtcggcttagttttcttggatttggcctttttctttggagctggagctaatgcgtccacagccgatgacctagttcttcttttcttgcctacatcggctggttctctgattaggccttggaggagagttgaagtcctgggggcatgatagccgatgacagggggagatagtccacctccattgggaatcagacctggagcatattcaatgtccctgccactgttgctttgacgtggaggagaagagtcgattgtctggggtatgacatcagggaatagatttgtcatgtacatcgaggccgattggggaaatagatgcagcttccattcaccccaccatctgtcaaagtttctgctcttgaatcctgccaactcaatgttttcagtactgcccagagggggtccttggaggttaagcagagttgagaagacttccctggtcttttggtatctttcatggttaatatcctcaaacctaaagtctgatgggagatcaaggtctgctgagtcctcatagggaaaccagactcgggcatctttctgaaagccctcataaaaactgcaaaaccaatccttgagcagttcagccgatagttttgctctagcatcggttggtgcggatgcgtattctccatatgacatgcatctacgatgagtacgttcctctccatcatcgtctacagtcggctccaaccttggaaattcagcttctgctccaactactgagccgacagctatcttggccgatgcattattcaacatttggtatagatagccgaggaggattttgcccaaaggaaattgtttctttgattctagggcttcggctacaaattgccaattggttgtaggatcagaactggatccacagaacaggaatttttctagccacattagcaagaaagctacatgctcccgaggggtgacaggcctttgacccatatatgctgctacatagccagaccaaccccatattcttttggtcctgaagtcaaattggtttttggtgttcatgctcatagggttagccgatgaagttacatctagtccggtgatcatggtgatgtcgatcaaagttggagtcatcggcccttggttgaacaggaaggaattgatggtgttggaccagaaataggtaacggcagccatcagaggctcatccttagctgagttggctgtggtaagggcaagcgcttggccgatcccgatctcatcccagtgaactttcttactagccgatacactgcttgtaccatgtggtccaattcttctcaggggtggttttctcgagagatggccaagacttaaaagtattcttccagtgacctcagcgtactcggccgacggtgtggtagatgggctggcggaggacgacatcaccat

SEQ ID NO: 23800 - DNA, 192 bp, Oryza sativa
  Clone ID: PAT_MRT4530_28845C.1
atggcggagcccaaaacagccatcgataaagagcttgttgaaagcgacacaaaggcttcgacttcgcgaggcaagtgttatcgttgccgagcttgtcgcctagcgacacaacagcttcgactccagagctatcacatcatcgttgccaaaggcatcgaagaaaacgagcaagacaccgaatgtccactttga

SEQ ID NO: 23801 - DNA, 1008 bp, Oryza sativa
  Clone ID: PAT_MRT4530_28846C.1
atgtcgtcctccgccagcccgtctaccacaccatcggccgagtacgctgagacctggttaaacctgatggtcatgaaagttgttaatcggccatctgtgatagaagctgaatttccgatgcaagagccgattgtggaagataatggagaagaacgcactcatcgcagatgcatgttatacggagaatatgcatccacaccaaccgatgctggagcaaagctatcggctgagctgctcaaggattggttctgcagcttctatgaaggctttcagaaagatgcccggacaatagactcctcccctccacgccaaagcaacagtagaagggacattgaatatgctccaggcctgattcctaatggaggtggaccatcttcccctgtcatcggctatcatgcccccaggactttaactctcctccaagatctaatcagggaaccagcagatgcaggcaagaaaagaaaaactaggtcatcggctgtggacgttttggctctagctccaaagaaaaaaaccaagtcgaagaaaactaagacgactgatgacctgcctgccttagatccatccattgaacaagctctggatgaagaagagattggtgaagatgttgaccaggctgcagccgaagtgagtgacacagaaaaaacaccaccagcttcacccaagaagacacctccaactccttctgcccccactcatttctcaagaaagaagaaaactgctgtgaagaagaagccagcagcaacaattctcaagtcggctccaccacctcctcctcctcctccttccgtacagcaatcgtcaagtgaccgaactccatcggctgtggggagtcatcatattgaggaggaagaacaaccagctgctcctactatcccacctcatgtccataaacaagtttataagcaggaacctggatcgatccatgacaagccatccgataagaccacaatgcttcagccaaccgagtatgccattgccgaggataatcagaaatctttcgcttaa

SEQ ID NO: 23802 - DNA, 2433 bp, Oryza sativa
  Clone ID: PAT_MRT4530_28847C.1
atgtgggcgcggaaggcgcgggtgcgagggcgacatggacgacgtggcccgggaggcgcggacgcgaggcacggcggcggttgcgggcgcggcggcgagcggctggaggttgggggaggacccgacaggtattttcttgagaccatttataacttcaatttaggcttgggaaagaacttcgggaaaaccacccctgagaagagttggaccacatggtaccagcgcgtatcggctagtaagaaagttcactgggatgagattgggatcggccaagcgcttgccctcaccatagccaattctgctaaggacaaacctctgatagctgccaccacctatttctggtctaacaccatcaatgccttcttgttcaaccaaggaccgatgactccaactttgatcgacattaccatgatcaccggtttagatgtaacttcatcggctaatcctatgagcatgaacaccaaaaaccagtttgattttagaaccaaaagcataggtggctggtctggttatgtggcagcatacatgggccaaggatctgttactcctcgagaacatgtggccttcttactcatgtggttagaaaaattcctcttctgtggatccagttgtggtcctacaaccaattggcaatttgaagccaaagccctagggtcaaagaaacaattttccttgggcaaaatcctcctcggctatctataccaaacgttgaacaatgtatcagccaagatagccgtcggctcagtagttggagcagaagctgaatttccattgccagagctgattgtggaagatgatggagaagaacgtactcatcgcagatgcatgtcatacggagaatatgcatccacaccaaccgatgctggagcaaagttattggctgagctgctcaaggattggttctgcagcttctatgaaggctttcagaaagatgctagggaagttctcatagtcgcaatcagcccgtgcatccttcctgtcggcattcatcagggaagaaacatccaagtctcctatgagttctatcacccaatgagttcaacaagacaacttggattgggccaactcccaatcggcttattctttgccgataagatccagtgccgaggagaaatcacatcaactctgatgatggatcagctgcttaacctcccagggccccctctaggcagcattgacaatatcgagttggcaggattcaagagcagaaacttcgacactttgacaaatggtgggacaatcgactcttcccctccacgccaaagcaatagtggcggggacattgaatatgctccaggcctgattcctaatggaggtggaccatctccccctgtcatcggctatcatgcccccaggactttaactctcctccaaggcctaatcagggaaccagccgatgcgggcaagaaaagaaaaactagatcatcggctgtgggcactttggctctagctccaaagaaaaaacccaattctaagaaaactaagccgactgatgacctgcctgccttggatccatccatcgaacaagctctggatgaagaagaaattggtgaggatgttgaccaagctgcagccgaaaagaagaaaactgctgtgaagaagaaaccagcagcaacaattgtcaagtcggctccaccaccaattctatataacacttgtctattttacagcctcctcctcctccttctccttccgtacagcaatcgtcaagtgactgaactccatcggctgtggggagtcatcatattgaggaagaagaacaaccagctgctcctgctatcccaagattatcttgatgaggcagaagaagatacttcgagcaaagctctagctcccttatctgatgatgtgaagaaaacacttgaagatatctctcgtcggctagaggcctcctctttagatagcttagtggtcgactgtggatcgattaggacccggctgcatgaagttcaagctctgatttccgaagaactggccgatgtccttactccagccacttatctcgagcaacatcaattcaagctggaaaaggctaagctaagactagccgaacgtcgggagcgtaaggagattgaagccacaatccaggtcaatcggcagcttgtgcatcaagaaaaggtcaaacttgatcagctatctgagggtccgattaagtccaatattgatcggctcgaagctcgcaagatcgagctcttagcacagcttgaagaatgcaatgctgaactggacctggagcacaaaaagctagctgatctcccaaaatctatcgaagagcagaaagcaagactcaaatcggctatcaacaatgttgctgacctgaccaagtccctaaaggtcatctctggaactgatgctcaagatgcccaagccattgaagaggtagaaaaaatcaggcaaagggctatttcgactattcagcaatacttgtcttaa

SEQ ID NO: 23803 - DNA, 2633 bp, Oryza sativa
  Clone ID: PAT_MRT4530_28848C.1
gtagtgatgtcgtcctcctccagcccatctaccacaccgtcggccgagtacgctgagcatccctccaatctgatagcgattcccagcctatcgcacgaaaaccattactttattggtccaatcggcaatcttgaccccattgattttatcatcggtgaaactaacagaatcccctttctaggtcattggaagaatatttttaataagaaagttcactgggatgagatcgggatcggccaagcgcttgcccttaccatagccaattccgctaaggacgaacctctgatggctgccgccacctatttctagtccaacaccatcaatgccttcttgttcaaccaagggctgatgactccaactttgatcgacattaccatgatcaccggattagatgtaacttcatcggctaattctatgagcatgaacaccaagaaccaatttgacttcaggaccaagagcataggtggttggtctggttatgtggcagcatatatgggccaaggatctgttactccttgagagcatgtggcctttttactcatgtggttgggaaagtttcttttctgtggatccagttgtggccctacaaccaattggcaatttgtagccgaaaccctaaaatcaaagaaacaacttcccttgggcaaaatcctcctcggctatctataccaaatattgaacaatgcatcggccaagatagtcgtcggctcagtagttggggcaggtggaccattgtggctgctgcaaacctagctaaatctgatagtcatgaaagttgtcaatcggccatccgtgacagaagctgaatttccaaggttggagccgattatagaagatgacggagaagaacgcacccatcgtaggtgcatgtcttatgaagaatatgcatccacaccaaccgttgccggagcaaaactatcggctgaactactcaaggattggttttgcagtttttatcagagctttcataaagatgcccgaatctggtttccctatgaggactcaatggacctagatctcccgtcagactttaggtttgaggacatcaatcatgaaaaataccaaatatccaaggaagttctcatagctgcaatcagcccatgcatccttcctgtcggcattcatcagggaataaacatccaagtctcttatgaattttaccacccaataagctcgactagacaacttggactgggtcaactcccaattggcttattctttaccgataagatccagtgccgaggagaaatctcatcatctttgatgatggatcggctgctaaacctccaaggaccccctctaggcagtattgataacattgaattggcaggattcaagagcagaaactttgacagatggtggggcgaatggaagctgcacctatttcatcaatcggcttcgatgtacatgatagatctattccctgatgtcataccccagacaatcgactcttcccctccacgccaaagcaacagtggcagagacattgaatatgctccaggtctaattcccaatggagggaaccagccgatgcaggcaggaaaagaagaactaggtcattggctatggacgcattagctccagctccaaagaaaagggccaaatccaagaaaaccaagtcgactgatgacctgccttctttggatccatccatcgagcaagctctagatgaagaagaaattgacgaggctgttgaccaggctcccgctgatgtaagtgatactgaggaaacaccatcggcttcacccaagcaaactcctccgactccttctgcgccagttcatttttcaagaaagaagaaaactgctatgaaaaagaagccagcagcaacaattttcaaaccggctcaaccacctcctcctccttctcctcctggacaacaatcatcaagtgaccgaactccatcggctgtggggagtcatcatgttgaggaagaagtacaaccaactgctcctgctatcccagttttagccgatctcttctcttttgacattagagattatcttgatgaggcagaggaagatacttcgagcaaagctctagcccccttatccgatgatgtaaagaaaacacttgaagatatctcccatcggctagaggcctcctctttagatagcttagtggtcgactgtgggtcgattaggacacgactgcatgaagttcaagctctgattcccgaagaactggccgacgtccttactccagccgcttatctcgagcagcatcaattcaagctggaaaaatccaagctaagactagccgaacgttggaagcgcaaggagattgaagccacaatccaagtcaatcgacagcttgtgcatgaagaaaaggtcaaacttgatcaactatttgagggtccgattaggtccaatattgaccggctcgaagctcgcaagatcgagctcttggcacaacttgaagaatgcaatgctgagctggacatagaacataaaaaaatagccgatctcccaaagtctgtcgaagagcagaaagcaaaactcaagaatgttgttgatctgaccaagtccctaaaggttatttctggaactgatgctcaagatgctcaagccattgaagaagtagaacaaattaggcaaagggctatttcagctatccagcaatacttgtcttgg

SEQ ID NO: 23804 - DNA, 201 bp, Oryza sativa
  Clone ID: PAT_MRT4530_28849C.1
tttgcctccgcctcgtccgccgcgtgccgctgttcgccaacatggacgagcgcctcctcgacgccatctgcgagcgcctcaagcccagcctgtgcacggaggccacctacatcctccgggaaggggaccccgtggacgagatgctgttcatcatccgggggaggctggagagctccaccacggacggcgggaggatggtgt

SEQ ID NO: 23805 - DNA, 246 bp, Oryza sativa
  Clone ID: PAT_MRT4530_2884C.1
atgacaccaatcaaaggtgatgaagtcacacagccgtggaagcgaagaaaccagtcgacagaagacaagtcagccagcaatgaagatgaaggcatccagcaacaacgacacaattatgcagccatggtggatgttgatgatgatgacgatgtcggtgacctagtcaatagaagtgtagcagccaatgataatgacgaagacgctcatcagcatttgcgtagtaggtcaaccatgaaggcgaaataa

SEQ ID NO: 23806 - DNA, 456 bp, Oryza sativa
  Clone ID: PAT_MRT4530_28850C.1
atgtacatgatagatctattccctgatgtcataccccagacaatcgactcttcccctccacgccaaagcaacagtggcagagacattgaatatgctccaggtctaattcccaatggaggtgggccatctccccctgtcatcggctatcatgcccccaggacttcaactctcctccaaggcctaatcagggaaccagccgatgcaggcaggaaaagaagaactaggtcattggctatggacgcattagctccagctccaaagaaaagggccaaatccaagaaaaccaagtcgactgatgacctgccttctttggatccatccatcgagcaagctctagatgaagaagaaattgacgaggctgttgaccaggctcccgctgatagtttattgttgcagaagaagaaaactgctatgaaaaagaagccagcagcaacaattttcaaaccggctcaacca

SEQ ID NO: 23807 - DNA, 468 bp, Oryza sativa
  Clone ID: PAT_MRT4530_28851C.1
atgacgtacagcagaggcaccgggtgccaggcgaacgatgccgggtgcgcctcctcgcacgagcgccgccagcgagcaggccgatcgtgcgctcgtgacgtagacgggatgggatatgacacagggagtatcccccgctttgcctcctcgcatgcacgccgctggcgacgcacggccgtcggagcttggctcccacttcgccgtggtagcctgccaagctcccccttcgccggcgtccccctttgtagagacccgccgccgcagctggtggcaccggcggcggagatggcgtgccgcagcggccccgccgaggttgccaaggcggctgtaagtctgacccggatgaaccggtcggccgaatttgagaccgcctccaccgccgatgacgccaagcccaccttcgcctgcgtcctccttccacttccgcctcccgtcctgccgaggctgccgatgtggctatatgtctga

SEQ ID NO: 23808 - DNA, 609 bp, Oryza sativa
  Clone ID: PAT_MRT4530_28852C.1
atgtcgtcctccgccagcccgtctaccacaccatcggccgagtacgctgagaatactttcaagtcttggccatctcttgagaaaaccacccctgagaagagttggaccacatggtacaaacgcgtatcggctagtaagaaagttcactgggatgagatcgggatcggccaagcgcttgcccttaccatagccaattccgctaaggacgaacctctaatggctgccgccacctatttttggtccaacaccatcaatgcctttttgttcaaccaagggctgatgactccaactttgatcgacatcaccatgatcaccggtttggatataacttcatcggctaatcctatgagcatgaacactaagaaccaatttgacttcaggaccaaaagcataggtggttggtctggttatgtggcagcatatatgggccaaggatctgctactcctcgagaacatgtggcctttttactcatgtggctagaaaaattcctcttctgtggatccagatatggccctacgacaaattggcaatttgtagccgaagccctagaatcaaagaaacaatttcccttgggcaaaatcctcctcggctatctataccaaatgtaa

SEQ ID NO: 23809 - DNA, 645 bp, Oryza sativa
  Clone ID: PAT_MRT4530_28853C.1
atggcgggcgggcagtactactacaggcagtgcggcggcgtcgcggaggaggacagtcggtcgccgtacggcggcggcggtgcggcggtggactgcacgctgtcgctcggcacgccgtccacgcggcgcgcggaggcgggcgcgtacggcggcgggctgcagccgtgggacgtgccgtcgtcggcgcgccctggcggcggcggcggcggcaagcaggacggcgccggcgtggctccttgcaacaaggaggcccccgccgccggccgcctgcctcgccgctgcgccaactgcgacacgatgtcgacgccgctctggcgaaatggtcccaggggacccaagtcgctgtgcaacgcgtgcgggatccggtacaagaaggaggagaggcgcgccgcggcggcggtggcgccgacgccgccgccgtcgctggacaccggcgccgggtacgcgtactgctactcgcgacagccgccgccgccaccggcgccgcagtggggatgctacggccaggccgcggcgaagtcggcgtcgtacgcgatgttcgacgcggcggacgacgggccctgcctgtcgtggcggctcaacatgatgccatcctcgccggcgttcgccgtcggcgagcggcccggcctgttccaatactattag

SEQ ID NO: 23810 - DNA, 144 bp, Oryza sativa
  unsure (1)..(144): unsure at all n locations
  Clone ID: PAT_MRT4530_28854C.1
tgaaacaaatatttgatgtataacaatgtaataggaaatccttgaattacactaattgctagatgttcagtacaatcaccggaaacacaccaaaactacagacaaaaatattngcacagtaacttgttcattggtacagccatt

SEQ ID NO: 23811 - DNA, 435 bp, Oryza sativa
  Clone ID: PAT_MRT4530_28855C.1
ttgctttttttttttagggtcaaaatttccataacatctttgcttgttcaatttgtggttacccagatttatctcctaaaaatacaaactattttccaccacgaaatagaagggagaaaactaagactaatgggtcgaactcaataaactatatattaacttgtccttcatagaaaaagagaatatcacaatatcaagataataatgctgtagatttatgtaatgcttgcttcttcaacttgttgcggaagctcctttttctgcctgaatgctttctctactggctgggccaactcctccgttgacggaccgctctcacaagatcacggtttgctctgtgtataggctagtcactatcccagattggccagctctggctgtgctgacccacctatggaaaaaatcaacacggacaggcagaaactccgctgaatg

SEQ ID NO: 23812 - DNA, 794 bp, Oryza sativa
  unsure (1)..(794): unsure at all n locations
  Clone ID: PAT_MRT4530_28856C.1
cgcgtccgctgatctggcctccttctacgctctcactattctggcccccgcgtccgcaagcttatcacgacgatggtgaagggaggaaagccggtgatgctggtggggatcgacgatagcgaccatagctactacgcgctcgagtggacgctcaaacacttcttcgccctgggccagccgcaacagtaccacctcgtcttgctcacctctaagccccccgcatccgccgtcatcggcattgccggtctaggtacgacggagctgttgccgactttagaattggatctgaagcgcggtgccgccagagtaattgagaaggcaaaggagatgtgctcccaggtgatcgatgcgagctatgaggtgttagagggagacgcgaggaacatcctctgtgaggcagttgaaaggcatcatgcagatatgctggttgtgggcagccatggctatggggcatggaaaagggctgttcttgggagcgtgagcgactactgcagccatcacgcgcactgcaccgtgatgatcgtgaagaggcccaagcataacacgcatagctgaaaaacggaatcacactcgtcatcaagaagatttagtgccatttttacatgttttcgagttttaattttatttttaaaatgggtattagttcgtgggtgggggtgaataaatcgtgacataaagtgacccccttattttgcaatttgcatattgcaatagaataattaatttatgaaaaaaaaaaaaaaaaaaaaannnnnnnnnnnnnnnnnnnnnnnnnnnnnnnnnnnnnnnnnnnn

SEQ ID NO: 23813 - DNA, 485 bp, Oryza sativa
  Clone ID: PAT_MRT4530_28857C.1
tttttttttttttttttttttttttttggagtgctacagtacagtgtcgacactgcttttcttttaaggctagacctggtgcatgcatgtatttcatcgagaatacaatcgggggttttctttaccacaaaaaagttggggctaatcatgtagaagggggtgaagggttatggacagcaaagtagggttagctgattacattgacaggtaaacctacaggtaataacaaaagaggatttaacctaaactagatgcaactttgtgggtgacttctactggcgtgcaacaaaagctcagtgtccgccaagatcacatgggtggggtgacgcacgtgccgtgccgccgtggcgcgccagagcggccgagaggttgggggaagacgacgacgacgacgaggagcttggccacgcgcgacgcgggccaggctggctctcaggacaacaggacatggagcgaggcgttctttgtggccgggaaaaccggca

SEQ ID NO: 23814 - DNA, 275 bp, Oryza sativa
  Clone ID: PAT_MRT4530_28858C.1
atggaccgcaaggattcggaaacgtgcacaccacagtttgccaaacgggcttgctttgggctggaggggattggggccaatttgatctggtaatgcattggtttgtgtgtcggcaaaataagacgcaggcaggaaaggtcaatttgaattgttcaacagacaagcaaactacatattttggaggactgcttccactctgttggacgattgtacaagagtttaacttaggcttcttcctgaatatcattttgccataccccccaaaaaaaaaaaaa

SEQ ID NO: 23815 - DNA, 420 bp, Oryza sativa
  Clone ID: PAT_MRT4530_28859C.1
tcccactccgccccctctaatgcggcgcccggtccgacccgtgcagccgacgacgtgggcgggccgttcgggatgggcgcagttaggggctccctcttccacttcctcaagggcacctacaactcccccaacggcgagcgcctcgttggcggcgcgcaggccgtgcggatgaacgcggcgggtgggcgacagcttcgcggtgtggggcgacctcttctccgccttcgactgcaccatggtcttcatgcaccagaaggaggatctgtggaactccatcatcgccggcgccgccactagcggcttcctctccatgcgccaggcccccgccgccgccgcccgctccgcgctcatgggcgggatgctcctcgccctcatcgagggcgccgggctcatgctcaaccgcgtcctcgcctctccccg

SEQ ID NO: 23816 - DNA, 2905 bp, Oryza sativa
  Clone ID: PAT_MRT4530_2885C.1
atgagcacatatgatcgtcagatctatactacacccggcagattcaaatccccaaacaggagtctcgtgtgctaccccgttttattattgccaaattcatgtttcgacatttggcgcattaggtaggggtgcgtcgagtttcccgtcgaaaagtgtgatggaatcaacttgatgaggcacggacgcctgaccttgccgatctccccgatgcccatgcgcacgtgacccgcgcatgacgcccaagcgcgagcgtcgcctctgtgccatgcatggcttatggctgggagatccaatccttacactatagaccatggcaacatggccgaccaatgaggtgaagacacatcatcgccaggctataggaccatacaacaccttgcaacaggatcttggctaggagtgctttgcacgccttaattttttcatctacacatatacatatgctttaatctatgattgcttataagattgatttctccttttttgcatgtacactcggggaacggcgccgcacgcccgggggcttcatcctttgcgtggctgacgcggcccgactacccccgtggcacatgcgtccaaggcatcacgtcgcatgcccgggggcttcaccaaccggcttgctttcaccgccaccgactggtgttttcgcctatatggttggcggacttcgccgccgctgttgggcgtctacgacttcaccgccggtctgcctccgtcgccgccgactggtgtcctcgcctatatggttggttggtcacaccaccgttcatgggcgccatatcttcaccgaccagctggcctttagcgccgccaactggtgttttcgcttgcacggctggcctattatgccgacactgttgggcgtctacgacttcaccgccagcctgcctctgtcgccgccgactggtgtcctcgcctatacggttggttggtcacaccaccgttcatgggcgtccacatcttcaccgaccgactggccttcaccgccgccaactggtgttttcgcttgcacggctggtctattatgccgctgctgttgggcgtctacgatttcaccgccggcctgcctccgtcgccgccgactggtgtcctcgcctatacggttggttggtcacaccaccgttcatgggcgtccacatcttcaccgaccggctggccttcaccgccgccaactggtgttttcgcttgcacggctggcctattatgccgccgctgttgggcgtctacgacttcaccgccggcctgcctccgtcgccgccgactggtgtcctcgcctatacggttggttggtcacaccaccgttcataggcgtccacatcttcaccgaccggctggccttcgccaccgccgactggtgtttccgcctgtacggctggcctattatgccaccgttgttgggcgtctacgacttcaccgccgaccgcctaggctgcctccacggcgggtgtttttattgccattgatggatgaccttctccccacatcggctacttatgccatcaccaaggagaatattacaaagctaatccatcaactggttctccgttgagttgttagtcgggggctatagacgttatgtcatattttttcaacaattttcataatatttatcttgatttgctcgcgacataatctgagtacaaaagtgcctatcgagttatggagttccatcttcctatgctttccgtttggtttgccaatggatagttgcctttgggccgattcctagcacccggaggctctgcctaggccgactcccgatgcttgggggctatgactagtcggacagagtgtttaaacgtaaggagtcatccgctcggggaaatcaaaattgacaaaagaagaaatacatatttataaggattcatggctttaagcttatctcttacgctccaggaatggatcagtcagaacatcaccaccggcttgccgtcgtcgccgccgactggtgtcttcgcctatatagttggttgatcacaccatcgttgttatgtgtctacatcttcaccgccggcttgccttcgtcgccgccaactggtgtcttcgcctatacggttggttggtcacaccaccattgttaggcgtctacatcttcaccgccggcttgccttcgccgccactgactcgtgtcatcgcctgcacggctggcctattatgccgccgttgttgggtgtctacatcttcaccgccggcttgccttcgtcgccaccgactggtgtcttcgcctatacggttggttggtcacaccaccgttgttaggcgtctacatctttactgccggtttgccttcgccgccgccgactggtgtcaccgcctgcacggctggcctattatgccgctgttgttgggtgtctatgtcttcaccaaccggccgccttgtccgccgccgactagtgtctccgtctgcacggctggcctattatgccgccgttgtcggacgtctacatcttcaccgaccggccgcttcatatgacgccaattgatgctatcgtcttcacggctggccacgttgccgccaccacaaataggcgtcatcaccttcaactcaagttgtctatgtctgcagccgactggtttcttcacttccttgaatgcatgattctgccactagttattggccttattgtcttcaccgccggtcgtctcgtctgctgttgactgctgtgcaactttgtcaccatggtggagctacttcatatttattattttcgacatcggcaaactctatagcctatactttgcatgatttgccacttcaccaaccacgatgtctacaagagcgagcatctcggcatgtgtcacgaaatattatgccgtgttattttactacaacaagtggtgttccaatctccaatatttctactcggacatcttcaacacgtatcttcactcaagcaatgactat

SEQ ID NO: 23817 - DNA, 1348 bp, Oryza sativa
  Clone ID: PAT_MRT4530_28860C.1
acgactacttataggcgaaatctgggacgcgtgccggtaccgccgcggacacgcaccaagctcgctttgacgaagccctcctcctcccatttctcctccccgagctagggtttcgccgccgccgccgccgactagccggagttgccatggggacgccggagacgtcgagggagccgtgcccggaccggatcctggacgacgtgggcggggcgttcgggatgggcgcggtggggggctccctcttccacttcctcaagggcacctacaactcccccaacggcgagcgcctcgtcggcggcgcgcaggcggtgcggatgaacgcgccccgcgtcggcggcagcttcgcggtgtggggcggcctcttctccgccttcgactgcaccatggtcttcatgcgccagaaggaggacccctggaactccatcatcgccggcgccgccaccggcggcttcctctccatgcgccagggccccggcgccgccggccgctccgcgctcatgggcgggatgctgctcgccctcatcgagggcgcgggcctcatgctcaaccgcgtcctcgccacgcccccgccgctccccgtcgatgaccccaacctccccgccgtcatgggcggcggcggcgggatccccgggatcccgcaggtccccgtggcgccacctgaggtcgcgagctccagcggcggtgggagtggatggttcgggagcctgttcggcaagaaggaggaggagaagaaggcgagcccgaagcggcggcaagtcggatatgttggagagctttcgacacgccgaagcactccgatcccaaccttcaagtgcaagtgaagaagaagaatcgcaggatggctgagtgcactgaagctcaggcagagattttgggtagtctggaaaaaaaagctacttcagagcgagatggaatgcttatttgacgaactcatgcggtgcgcacgacttgtttctagggctataaacctcccacagaggaaggtcttggcccctggctcttatatgtattaataatgtcataatgtatgtgaggctgtgatccgttttaatttaccatggtatgttttgcaactttgcaaatgatgtagcagtagcagtaataacctatagcattcttgtcattcagtgtactgggctcttaaaaagcctcaacttatgcttcaagctggcttataaagttttgacacttttgagttaggatgtggaagttatgcatcctgtcttcccactgatccgcttctcgatcagcaggtgcaaaaacaagaagtgtgcactgcaaacttgtttgtggactatacaagtgtacctgaggcttttgttcagaacatgaatatatttttctgtgt

SEQ ID NO: 23818 - DNA, 228 bp, Oryza sativa
  Clone ID: PAT_MRT4530_28861C.1
atgaggatcctgttctcattgccgaggagagaggcgaactcgagattcctatgtcgacgctggccatcccagggggttggttcgaagttgaacatgggagagggaagcttccccaacatctccaaggggcagcgtgcaatctacaggaaggaaggaggagggttggacaagtcaggaaggatggcggcggctgccgaggctcagcctcagcgcgatggcacggattag

SEQ ID NO: 23819 - DNA, 291 bp, Oryza sativa
  unsure (1)..(291): unsure at all n locations
  Clone ID: PAT_MRT4530_28862C.1
gactttttntnaatcgacctcattctgtntttcctagaaaatcctccacccacaatcaaaaatctatgcttccaacctcaaagaacaagttgatggcggctgcaggtaactccttcctnaaccaagatccgacgatgatgggatctgggatgcngcatatgtactttgcaagctctagccatggcaccggtgcccactaccaaagtcctggtggtgctcccatcaccatggcagtcccggacatggggttttttgtttgcaagggataggnataagctccatctagctttt

SEQ ID NO: 23820 - DNA, 618 bp, Oryza sativa
  unsure (1)..(618): unsure at all n locations
  Clone ID: PAT_MRT4530_28863C.1
ggaattgtaatacgaatcactatagggngaattgggtnccggggcccccctcnanttttttttttttttttttttaacctcaacattacggngttaaacggaataatagttcancatcaagcaacagtgntcaaactaaggaagtttcncctcgctaanttctgttctaactgnataaataaggnnatcctcattttcnctcnatgtttttcatcnaaagctcccggnanaatntganccggngtncaaaacttgangaaagcttaccgangccattggtgtnttgaacanccttctctcatctaccgangccctccanttctcctaaccgctggaacttgntcttcctcntcagantcnacatcaccatactgncanatntgnagcctttccttcnttgctttctcctggaactgttccagantctgganancagctttctctccctaatatcccatctcttgnttctttcaagccgaacaagccctcctccaacatggtacattgagcnggttctgtttctgcttcaacatnntacaacaaanattccgtgcctgtcctngaattccncaaaatncanccctcacatgccgttgtttggggtaaacacatcnaaaa

SEQ ID NO: 23821 - DNA, 1575 bp, Oryza sativa
  Clone ID: PAT_MRT4530_28864C.1
ctatgatgctatcacttgtgggttgcttggagcaacacgtgtaaccgggcacataattaggctactgcgtttacctacaagtattccaggtgcatcctgcatgtcaacatcttcaggcatcattccatcaggcaacttccaatcaaaatgatacagaaggctagctaaggggagctctacatttgcaatgccaaggttcatagccgcacacattctacggcccgatccaaatggaaggaattcaaagttacttcctttaaagtcgatacttttgttctcaaacctctctggttgaaactcttcggcatcatcccaatattttgggtctctgcatattgcccatgcattcacaaatacagttgtgtctttcggtatgtcgtagcccataactttgcatgtctctcggcatttacgagggcctaaaaggggcactgggcagtgcatcctcaatgactccttaatcaccattttgagataggtcaactcgtttacaccgtcatcctctgtgatggtgttctttccttggaaagcttgccgcacttcaacatgagcctttgccattacttttggttttctgatgagttctgccattgtccagattaatgtggaagatgatgtctcgctgccccctgaaaacatgtcaaataaaagcacgacgatgacttcgttagtaattgggattggtgtgttgccatccttctgaagcctcagcaggacatccaagaagcactcgctcgtgttcatcgcctcgccgtcgccgtcgccgccatggctgctcctgtccatgatcctctttcgttcttgaatgatctgctccaagatgtgctctatcttcttccggctggcgagcgccttgcgcggcgccgtgccgagcatccgcgcgagcttgctcgacgggaagacgtcggccacggtgagccatgtcgtctggtccaacgcggtgcggagggcgtcgaggaactcgtcgcggtgctcgctccggccgccgacgcagcacctcacgacgacgtcgttgatgagcttcgcgatcctgccgctcaggttcacggcctcgccggcggcggcggacgcggcgaggtcccggaccaggcgcgccacctcctcctcgcggatgcgccggaacgacctcacccgcgcggcggacaggagctccagcgtgcacagcttccggagctgccgccaccgctcgccgtagggcgcgaaggccatgtcgttgccgccgaaggtgatcaccccgatggtggtgctgaggaagcggtcggcgaacgtgacgtcctggttcctgaggatctcctccgccgcctccggcgacgacacgaccacggcgaacacctcgccgagcgatatctgcatgaggtggtggcgcccgtgcttctcggcgagcgcgcgcatcgaccggtggatggcgtggctccccacgaggtggtggaggctgccgatcaccggcagcttccatggccccggcggcaggttgagccttggcttggtggcatatgataccagcttggagatgacgacggcgatgagcacggacactgacagtacggtcagagccagcggcagcttgtcctccat

SEQ ID NO: 23822 - DNA, 305 bp, Oryza sativa
  Clone ID: PAT_MRT4530_28865C.1
gtttttgtttttttgttgtttttttttattttttttttttttaccggttcttgggaaacaaatggaactcttctaaataggtgcttataaataaggtgacataatgaattcccatgtcaagaccaattaagaaaaatccgttaagaatttcatggcacattcaacacccacacattacaattaaaatggtgtaaaaaattctgagcacaccaattataaagccttttaaggacctgtgggcccaaccaaatggaacggtttaatttaacccatgcagaaattatataaacatggatcagtgcaaa

SEQ ID NO: 23823 - DNA, 937 bp, Oryza sativa
  Clone ID: PAT_MRT4530_28866C.1
gcacatgtggcgcgcggccgcctaccacctcctcctcctccgccgcgccgcgcatcctcctccctctccggcaaccgccacaggggcggcctgcgcgctccgccacgtgcgcctcttctccccgcctccgcatccgccgtcgtcgcggcccacggaggccgaggcggaggtgacggcggcggaggcgcggaggctggtgcggctggtgggcgtggaggcgctcaagcggcggctgagggacgggcgggaggaggtggtcgggtacggggagctcctggacgcctgcgtcgaggccggcgcggcgcgcacgcggcgtgacgcggaggcgctcgcccgggccatggacgaggccggcgtcgtgctgctgttccgcgacaaggcctacctccaccccgagaaggtggttgagcttgttagaagagctgttccgcttgcactctcaccggagaacgattcaagaaaagaagagctgaagaagctccaggagaagaaggaagagatcgacaagctggcgcacaagcaagtccggcgcatcctgtggtctggactaggtttcttcatgtgccaagttgggctcttcttccgccttactttctgggaattttcatgggatgtgatggagccaattgccttcttcacaactgcatctggcctgctcgttggttacgcatatttcctcattacctcaagggatccaacatatgaggacttcatggaaaggctgtatttgtcaagacacagaaagctttgtgccaagaatagttttgatatggcaaagtacctcgagttgcagaagcattgcaagtgtcctctggaaggtcattatccccccggtccgatgcctcagggcttgtcaaacatcgtttttctgcctataaagatgtcaacgcaccgaaaaatagccaggcttgccattggtaaagaattggatgaataa

SEQ ID NO: 23824 - DNA, 509 bp, Oryza sativa
  Clone ID: PAT_MRT4530_28867C.1
caggcgcaagtgggagcgagcagtacagctataatttgtaatggttgtggagttgtacgctgcaagctgcaatttgaggcgctaacaccacaagggctgtgtggacaacctgtgtgaatgggctgtggcacacggctgcagttgatggtgtgcgtggtggggaaatttggtgggatcgcacgggataaaccaatatgtgtgcaacaacaaggggataacaagcttatgggacacaatggattgacagcacaaagctgcttaatgacgactgcaacctgatgagggaaagctgggtaaccaccactgacaggtgacccagttgccaggaattgcccaggtcagacaccacagcagtccaggaaaaatgaaagtgcatggcatcatcgtgttgacaagttgaaacatcggggtgatacaaatctgaataaaaatgtcaccaaatttaaacataagccctcggtaaggatcaatctagtacatggttgaaattaatgtaaaaaaaaaaaaaa

SEQ ID NO: 23825 - DNA, 129 bp, Oryza sativa
  Clone ID: PAT_MRT4530_28868C.1
gagctgccaccgacacagccaatagagcttggctctgttggtgacctggtggcacataggaggcataggttcgacaaattcaagatcggtggtaaagggagctcggagcagcgaccagtggagccctaa

SEQ ID NO: 23826 - DNA, 411 bp, Oryza sativa
  Clone ID: PAT_MRT4530_28869C.1
atggtgacaacgtccaaggtccatggcgatcacagcggcgaggagctagtgctgctgggtccccaccccacggcgacggagctgcagctgctacaacaacccatcctgccaactggtggaacaggcttaccccacgccgcctactcgagctcagctgcggtttgggctgggcgcgccggccagcccgagaaggcggtgaccaccgccggcgatggtgagagacacggggagcggcggctggcacaggaagtggcactgcacgcgaaaggcgccggcgagggcgaaaaaagggaaacaaggagagagggggagggtgatctcatcggcaaacatcggcgggcggtgcaggagaggacggcaacgacgatgaccttgcgagcgaaggggcggacaagcggcggcgacaactaa

SEQ ID NO: 23827 - DNA, 2779 bp, Oryza sativa
  Clone ID: PAT_MRT4530_2886C.1
catgagacatatgatcgtcagatctatactacacccggcggattcaaatccccaaacaggagtctcgtgcgctaccccccttttcatattgccgaaaatttgttttgacagttggcgcgccaggtaggggttgcgtcgaattacctgtcgaaaagtgcgatggaatcaacttcagaagaagcccggagatcaatctcatcaatttcgacggctcaaatctttaatcgggtttatctcgagttagcagttagctgccggggcttatacatgttgcatggcgcgtcgccggctatcactcacgatccagcctcactgctcgacttgagtttttcgtttcaatttgttatcaataatcaatatatattagattgatttctaatctcagattaatttcttgctattttttgttgttgttcgcatataattacgcggcactactgaggcgaacgatgttggtcatggactcaaggcatctcagctttccggtcaatcggccgcgagtccactccgccggcttgtcctcgccaccgccattgctgatatcaacaacgacttcaccgccggcttgcctccatcgccgccgactggtgtctccgcctacacggctggcctattatgccgccgttgttgggcgtttacgacttcaccaccggcttgccaccgtcacggccgactggtgtctccgcctacacggctggcctattatgccgccgttgttgggcgtctacgacttcacagtcggcttgcctccgtagccgccgactagtgatctcgcctatacggttggttggtcacaccgctgttcatgggcgtccacgtcttcaccgactggcctacttccgtcgccgccgactggtgtcctcgcctatacgattggttggtcacaccgccgttcttgggcatccacgtcttcaccgaccggccgccacgtctgccgccgactggtgctttcgccttcacagctggcctattatgccgctgttgatgggcgtctacgtcatcaccaccggcctgcctctgtcgccgccgactggtgtcctcgcctatacggtcggttggtcacaccaccgttgatgggcatcgtcatctacaccgccggcctgcctccgtcgccgccgactggtgtccccgcctatacggtcggttggtcacaccaccgttgatgggcatcgtcatctacaccgccggcctgcctccgtcgccgccgactggtgtccccgcctatatggtcggttggtcacaccaccgttgatgggcatcgccatctacaccgctggcctgcctccgttgccgccgactggtgttctcgcttataaggttggtcggtcacaccaccgttcatgggcgtccacgtcttcaccaactggcatgcctttgccgccgccaactggagtctctacctacatggctggcctattatgccgccgttggtgggcatcttcgctttcaccatcgaccgctttcgtcgccgccgactggtgtcttcattgttattgatggacaactttgttcccacattgggagtattatatttacatcagatactactcatcctatatgtttgttctgcaggatccaaatccagatatgcataaaagggattcatggctttaagcttatctcttacgctctaggaatggatcagtcagaacatcaccatcggcttgccttcgccgccaccgactggtgtctctgcctgcatggctggcttattatgccgccgttgttgggcgtctacgccttcatcgaccggcttgccttcgtcaccgccgactcgtgtttccgcctgcacggctggcctattatgccgccgttgttgggcatctacgtcttcaccgaccggccgcctcgtccgccgccgactggtgtttccgcctgcacggctggcctactatgccgccgttgttgggcgtctacgacttcatcaccggcatgcctccgtcgcagccgactggtgtcctcgcctatacggttggttggtcacaccaccgttcatgggcgtccacgtcttcaccgaccggtttccctttgccaccgactggtgtcttcgcctatacggttgtttggtcacaccaccgttgttgggcatctacgtcttcaccgaccggcttgccttcgccgccaccgactggtgtctccgcctgcacggctggcctattatgccgccgttgttgggcgtctacgtcttcaccgaccggccgcctcgtccgccgacaactggtgtttcctcctgcacggctggcctattatgccgccgttgttgggcgtctacgtcatcaccgaccggctgcctcgtacaccaccgactggtgtttccgcctgcacagctggcctgttatgacgccaactgatgctatcttcttcacggctggctacgtcgccgtcaccgctaatagccgtcatcatcttcaacgcaaactgtctacgtctgccgccgactggtgcttttatcttcacaactgcgcgtcttcactaccggttcacttcatcacggcaacacaactttgtcatcatggtggagcgacttcatctttattatcttcggaaccagcaaactctattgctgctacttcacaagttttgctacatcaccaaccatgacgttgttgtgaatctcgacatctcggcatgcgatgccgtgttattttactacaacaagtggctctccaatattcaggatttctacttggacatcttcaacacatatcttcaatcaagcaatgactactcgacgacaagaagctataattctcgactctatgttcagttgtttcccaac

SEQ ID NO: 23828 - DNA, 1597 bp, Oryza sativa
  Clone ID: PAT_MRT4530_28870C.1
gcacgaggctccttcttccgcgcgcatattcgcatcgcataaatcgcaccaaccgcgcggcgagaggagagggaggaggaagccgacctagcgggctagcaggcagggcgtcgagcgggttggagggtttcttgagcgggttcgccagctcgagctgtttgcttggggggttcttgtttttcttttccgggatctttgggtgatggctgctgctgcggcggcggagacgtcggaggcgtccacggccgggctcgcgctcgcggaggccaacatcaactggcagaggttggacaagaccaggttccatgtcattggagctatcctatttactgctcagcaaggtgttctgcaccctacggccgttgtgaagaccagaatgcaggttgcagaaggagggctttcacacatgtctggcttttctgttttcagaaggatattgagaagtgatggcatccctggtgctttcagaggctttggcacctcagcagttggagcactgcctggccgggtctttgctctgacttcattagaggtgtccaaagaaatggcattcaaatactctgaacattttgatatgtcagaggcatcaaggattgctgtagctaatggtatagcaggtctagtgtcaagtatattctcaagcgcatattttgtgccattagatgtgatttgccaaaggctcatggctcaaggactaccagggatggccacatacagaggcccatttgatgtgataagcaaggttgtcaggactgaggggctccggggcctttaccgcggttttggaatcaccatgttgactcaatctccagcctctgccctttggtggagttcatatggtggtgctcaacatgccatatggaggagcttgggttatggaattgattcacaaaagaaaccatctcaatcagaactagttgtcgttcaagcaactgctggaacaatagctggtgcttgctcatcaataatcacgacaccaatcgataccattaagacacgacttcaggtgatggataactatggtaggggcaggccatctgtcatgaaaaccaccagggtgctgctagaggaagatggctggagaggtttctacagggggtttggaccgcggtttctcaacatgtccctgtggggtacatccatgattgtaacttacgagctaataaagaggctctccgtcaagccggagtgatgagccttttggcttctgttccaaatagatggtgtaatcttgaagacccacaatccttatctgtgatgggctgacggctatctagtgagttcttctcaagaaagggatttggaaagtaacaaaatccaatcaagaagttttagtgatggaaactgttttataactacaggggaagtattagcaagttagtagcttaacaagttcctcctatacactgtaaatatttactagggttctgtatgaagttcttctgaaggtgcttcatccaggatgtaatagcctgaggcttgccctggctactgggggcaacatgtacgcggctcataaaaccctaaaaattttggcaatgagcttttgtatctcttcccatgaggcaacaaattcccacggtacctcgcttggttt

SEQ ID NO: 23829 - DNA, 396 bp, Oryza sativa
  Clone ID: PAT_MRT4530_28871C.1
atttgtacatacttggaacttgtttgctatgtggttcttctttcgatgactactcgccccgttgtcgttgcagccattgtagaatgctggtgctagtgtgctccacatgtcaggattccactaaggattatgtttgcgagttgtgccaaaagaacggaaagcaatgctgccaaacgtcaccaaggcaaggttgcaaaacagagtcagagctaatagattcttctgactttggaataccaatgattattaattaaagtgcaacttcaaccattcccaggagtaatggtagtgagcagcttaagaagctaaagatcctctgcttgcatggttttcgtcaaaatgtcttaaattttaagggcagaacatcatctcttgccaagaagtttaagtactttt

SEQ ID NO: 23830 - DNA, 1663 bp, Oryza sativa
  Clone ID: PAT_MRT4530_28872C.1
gcacgaggcttcctcttcggtcgtctccgccggcttggagttgggagaagaagctcaaacgcggaggccaccacgaccaccacaacaccaccacctcttctcctagtcaaacccacccttcccttgtaatcttcgcaacaacagcaggacggcaagttcgtagctttcccctccgctttatacacccgcatctccaaatctgaggagagaggggagaagataaagaaagaaaagcgcgcattttggtgtccggggaagggaaaagggcggttcttggcgtcggtggcgggttttgttttttgggggtggaagcggttggtttggggatgagcagcggccaggaagccggatcgagctccggtggatccggcgatggcggcgcggcggcgcccaggaggaacaccaggaagcccaagtattccaagtttactcagcaggagctcccagcttgcaagccgattcttactccaaaatgggtcatttcagttttcgttcttgtcggagtcatttttgtcccaatcgggcttgtttcgttgaaggcttcacgaaaggttgttgagattgttgatcgatacgatgatgcatgtgtcccagctaatacaactgacaagcttgcttacatccagaacccaacaataagcaaaaactgcagaaggactcttaaggttccaaaggatatggatgcaccaatctttgtgtattaccagctggataacttttatcagaatcataggagatatgtcaagagccggagtgatgcacagctaagagatcccaaaaaggcaaatgacacctccacttgtgatcccgagggtacagcaaatggaatggcaattgttccttgtggtctgattgcatggagcatattcaatgatacatatggctttgttcgcaacagtaagaacctgccagtggacaagaaaaacatctcttggaagagtgacagggagcacaaatttggacgtgatgtctttccaaagaacttccagaatggttctcttataggtggaaaaacacttgatccaaataaatcgttgagtaaacaagaagaccttattgtttggatgagaactgctgcacttccaacattcagaaagctgtatggtaggatacacactgacctcaagaaaggtgacaccattacggtgacattggagaacaactacaacacatatagctttagtggcaaaaagaagttggtactttctacctcgacatggctcggtggaaagaatgattttcttggtctagcatatctcagtgttggtggactctgcttcttcctggcatttgcattcaccttgctgtacttgataaaaccaaggaaaatgggtgacaacaactacttgtcatggaacagaaaccctgcaggccgttaataagctcttcaaacttttaagttgcaaattcaacatgaagcaagttggattatggattcaaatgtatcttgtactagatagcggttttatttgttagccgtgctggagtgccaatacggcttataccaattagggcagcgtttatgagcaacactgatgtacattatgttgcaaagaaaaatatatatatatacagccttcttttgttgaaaattttaaatatcccagaagttaaatggaatgatttttataaaaaaaaaaaaaaaaaaaaaaaaaaaaaaaaa

SEQ ID NO: 23831 - DNA, 1587 bp, Oryza sativa
  Clone ID: PAT_MRT4530_28873C.1
ttgtaattattgcttatgcagggaggatgtattctgtcatatcaagtgtgtcacttggtatgcccgtaacaagtttatacgacgcattttgcaaatacacacagtaaacgatcttacctacacttcaaaatcaatgattgatactcctagtcccgttaacaaatttcaaggtggaatggttcttttcctagtggaagtaccattttaaagctaatcacagtgagtgcacacctgtatgttgtatcctgtataaccgcaaaatgagatctaatatagaatccactccctcagtcagaaactgatgctacctccggaggtaaatcttcctcgctagtgattttcgatgagattggttctctgtaccactcgttctcattacgagtgaggaagcaggcctctgacacaaaagtatccttgtagtcatcatcatcatacacaaatgcaggcggatctggtgaaccaatcccaacaattgtgcttccacttcctgacataaaaacagcatcataatctccccggttagcagcaattatacgtttcttcaacctctttagtgatggcaacacctcaaatgctggaggttctagatcattaacacaggcatcctgtgatatcccattttcagtaatttccttgagcaataccaagggatcagtttgacttgtgtgctctaacctgagccgcttgtaaacttcagctgttgagcatgcttcaggtggctttactagtaccatcggcaaatttgctggcaatggattccgaatatcttcaacaatctctcctctaccggtacaatacgctgctccttgtgaaaagaagaagggaatatccgatcctatctctccagaccactcctgaagctccttttctgaagcaatgcagccactaaactggttggcggcccacagcgcagttgcagcattactgcttccaccaccaagaccagcaccagtagggaccttcttatcaagatgaatccaaaaaaagttgtcagttccagttttcttgcggtaaagattgagtgccttgatgatcaaattgctttcatcaactgggacacctgctacattggttgacaagcgatctttgctcttacttggtgacaatgagaatttgatagtatcacccaaacttatcacatgaaacagagaagccaggtcatggaacccatctggtctcttacccgttatcctcaagaacacattaattttgcaaggtgagaataggttcagccgtgtaatcccagcattctggtcaatttggtccgctagcttgttgaactttgcttgtagatcatactcaacctccacttgcctcctcccttgctccgccgacgcggcgactctcaggcccagcgcccggcggcgactggtgccggagccgagcctcacactgggagaagcctggaaccggaggtgcccgcgcgcggctgccgggttagcgcggttgagcgggtagaggctctgggacaggaggtgggtggagcaagccatggctgctctgcggatgctgctgctgctgcttaccagaggcgaagaggagcgcaatgggtgaaggctcttggagatgacggggattgagcgccgc

SEQ ID NO: 23832 - DNA, 1169 bp, Oryza sativa
  Clone ID: PAT_MRT4530_28874C.1
cggaattccccccgcgacccacgcgtcattaactcctttgttcagcttgacactccattgcagagggagggtatagctggtgacagagagaaatgggcgaggaggccaattgcaacgtcgcgatggagtccgctgcgcccaaggagaacggccacaccaccggtggcgccgcggcggaggccaaggccgccgccgcctgggctgagatcgccgtcaccgacgccgcggcggtgccaaagccgacgccgccgcctgcggccgtggccgtcgacccccggcttcagggcatctccgacgccatccgcgtcgtcccccacttccccaagcaaggcatcatgttcaacgacatcacgccgctgctgctgcgcccgggggtgttcaaggacgccgtcgacatcttcgtcgagcgctaccgcggcatggccatcgccgccgtcgccgggattgaggctagggggttcatatttggcccggcgatcgcgctggcaattggcgccaaattcataccgttgcgtaagcccaagaaactcccaggcgaggtgatttctgagacgtatgttctcgagtacgggaccgattgcttgcagatgcatgttggcgccattgaacctggtgagcgtgtgctgatcgttgatgatctggttgcaactggtgggacactttgtgctgctataaggcttcttgaacgcgctggagctgacgttgttgagtgcgcgtgtctcattgggctcccaaaatttaaggatttctacaagctcaatggcaaaccagtttatgtgctggtggagtcccgcgaatatgaaaaataaagagattgatgatcaggaatgcacatggcttcattccttacaaattgcaagtgagcgctggacggatatcgacaagtctgcggtacattattaaggctaagctagctgctaagtattagaggggaggtgagagagagcgagagagagagagattggtgagtggggagtagttcttgtaggctgagtagtactagttttttcaggggcactgaaaaaagagcttgtagtttctgtcgggaacaccgattactagctgaaacatcatcagttctgttcttcttccaatgttgaataaaatttacgtggtttcgatctaactcgagactagttctctccctcgtgccgaattcctgcagcccg

SEQ ID NO: 23833 - DNA, 414 bp, Oryza sativa
  Clone ID: PAT_MRT4530_28875C.1
atggacgcgggttcaggtgggcaagggtggagagaagacttccggcagtggcgtggcgacgagcatcgcatcagcgctgacgaccgtggcgcccacgcgcgtcaccgcgggaggatgacaggtggggccacccgtgctgggccccacgtggcagtgactccggggatagccgccaagtggtgtggaggcggcctggaggcagaggcagaggaggaccaggatgagatgcgcgagctcctcgccgtggcagcggccgcggccgtcctggcgacgtcgctggtcggcacggcgtccgccgccgacgcgccggctccttccccgacgtccgacgcgccggtggctgcgccggccttcgccgccgccgccgccgccgccgcgtccttgaccgcccttgcctttggatacctcttctaa

SEQ ID NO: 23834 - DNA, 951 bp, Oryza sativa
  Clone ID: PAT_MRT4530_28876C.1
atggcggcgaccaccaccaccgtggaggacctgccaggggacgtgctggcgtgcgcgctgcggcggctggatgggccgtccctggccgccgcgggctgcgccacgtccgggctcagggcgctcgccgacgacccggacacgtggcgcgcgctctgcctgtcgcggtggccgtcgctggcggcggcggagcagcggtgcgtcctttccgccgccggcgccgtctctccgcgccgcctcttcgccgacgccttccctttcccctgcgtggacgacgccgccgccgccgctccgctcgacggagacgatcagcggctgcccggggagctcgtctccgccgtggacgtctaccacgggggcgcggccgtcgtctcccgcgtcgtcgagacctccacgtcgtcctcctggttcctcgcctcgccgttccgcgtcgacgccgtggagggcaagagcccggcgccggcgcccgcctcggtggcgtcgtcgtggtcgccggcggagctggagctgagctggatcttgctggacccgagcaccggccgggcggtgaacgtgtcgagccggcgacccgtggcggtggagaggcactggtacaccggcgacacgctggtgcgctacgccgtggtgctcgccgggtgcaagttcgaggccaccgtcagctgctcggaggaggccggccagataacggaggtcagcctcgccgccgacgacgccgacggcgcggcgatcagcggcgagggctgcctgcggctgctcgccgcggccatggccgggccacggaagggagggcggggccaggaaggggaagccaagaggaggtacgacgagttcgtgaggaggaagaggggcaggaaggagtccaaggccaggcgagaggtgctcgtcgacctctgctgctccgccgtcagcgccgtcgccgtcatcagcttcctcgccgccgtcgtgctccggtag

SEQ ID NO: 23835 - DNA, 205 bp, Oryza sativa
  Clone ID: PAT_MRT4530_28877C.1
atggttcgatggcggtggcatctccccatattttacaatgtacgccgttggggcgtcgacgagctgaggaaggagatcaagctggacgtgttcgaggcagatctggagaagcgcaggtggttggaggtgaaggaactaggtgaccaagctctcttcctcggcacctcctgctccagggcaattctttcatcggattatggcagct

SEQ ID NO: 23836 - DNA, 1549 bp, Oryza sativa
  Clone ID: PAT_MRT4530_28878C.1
atggataagctcagtggttctgcacgtcttattatcgtttcagatcttgaccacacgatggttgatcatcacgatgaggagaacttatccttgcttagatttggcgccctgtgggagtccgtttactgtcaggattctctactagtattttcaactggaagatcccctactctttataaggaattgaggaaagagaagcctatgctaactccagacatcactatcatgtctgtggggactgagataacatatggtgaggcaatggttcctgatgatggttgggaggaatatctgaacaataagtgggacaggaatccagagacagaacagcgtccacataaggtcagcttttttgttgataaaaagagtgctcaggaagtgataaagtctctctccggtaatatggagaaatgcgggcttgatgttaaaataatctacagtggtggccaagaccttgacatattacctcagggcgctgggaagggtcaagcacttgcatatttgcttaagaagttaagctcctgtggaaaaccaccaaacaatactcttgtttgtggggactctggtaatgatgcagaattatttagcatccctggtgtacatggtgtcatggttagcaatgcccaagaggaattgcttcagtggtatgcagaaaatgcgaagggtaaccctaaaattattcatgcaactgagaggtgcgccgctggtattatcgaagctattggacacttcaaactaggacctagtgtttctccaagagatgtggggtttccttatgttaaggaggaccatatcaaacctacagatgctgttgtaaagttttacgttctctatgagaagtggcgcagggctgaggttccaaaatcagattcagttgtacagtacttcaaaaatatcactcatgcaaatggtgttatcattcaaccttctgggcttgaatgttctctccatgcctctgttgatgcattgagttcatgttatggtgagaaacaagggaaaaaataccgaacatgggtggacagactatttgtctcacagtctggttcagacagttggctggtcagatttgacttgtgggaggcagaaggtgatgcgcggttgtgctgtttgacaagtcttgcgctgaatgtaaagcctgaaacccctgctggcttcctgataacacatgtacacaaaacatggctcaaaggatactcttcagcggatgagcagtcctccaagctttaaaccctttttcacccctgtgcacacggaatgaatttacttgatgataaatgaaggacctgctcgtctgagaatctcattttcttatttaatgtaatataaatgatctgtctcgtgactcgtgcgatgataaagtgaacgatctcagaaggcaacttcaacaaatgttggatatgattttacagagagttcagaattagatttcatgacacaagtaccgctaagctggcattatttgtgggcacttgccaacaagttttgcatcactatgtgcctagcggtcaaataccttgcaaaaattatgacattatgcatgtttttcttt

SEQ ID NO: 23837 - DNA, 709 bp, Oryza sativa
  unsure (1)..(709): unsure at all n locations
  Clone ID: PAT_MRT4530_28879C.1
ggtccgnaccacgcgtccgcaccagttaccctcaatagaaacggtgctaatggcccagaacaagaccatggctctgctccttgccacccttgtggcggtggttgcggtagtacgagccaccgaagagaaggatatagaagaagctgtgtgctcagagcattgcaacgacgaggaaaaagaaggcaccatcgaccacaagcactgtgtagacatctgcatcctcacgaacagggaactttttggggccttggagagaggaatgaagccctcgatggagcaattcagcgctttgtgcaatgaggggtgtagcaaagaatttaaggaggatcctgccaccaacaagaagtgcgtagacagttgcatcgtcgatgctaaggaactcaatggacacttagcgaaaggtggcgcttctagtgttcccgcacgtgcatgattgtgtcgagctgcacatctgttccttcatccatgatcgagggacgatacccattaatggttcccacccagcggtcggccttgtattacattgtcctgttgttccttttgcctcttcaattgtttcattatttggtgttcataacttctatgtgatcgatctggtctgttgttctacccaatattgttactaaaagcatttgttatctttaattgattaaaatagttccagttgtgctttgtcaaaaaaaaaaaaaaaaaaaaaaacaggcgctct

SEQ ID NO: 23838 - DNA, 1137 bp, Oryza sativa
  Clone ID: PAT_MRT4530_2887C.1
atggacgccgtcgagacgcggcatggcgagtcggccaggggaaaaggtggagggacggtcatctaccgttcgcaagggcgcgtggcggcggtggcgaggtacaacgggttgggtagattccgtcggcagcggcaccccggactccggcagcgcgacagcggcggaaggacgacggtggctggccgggttggctcatctcgcagctcgccaggctggcttggcgaggtgcgcctggtagtggggacgacgacaagccgctggttcggcaacggtgtgaacagattcagcaatatcgaggttgccagccggcttgccttcgccgccgccgactggtgcctcgacctacacggctggtctattatgccgctgttgatgggcgtctacgtcttcaccgcccggccgtctcgtccgctgccgactggtgtttccgcctacacggctggcctattatgccgctgttgttgggcgtccacatcctcaccaaccggcttgccttcgccgccgccgattggtgtctccgcctacacggctggcctattatgccgctgttggtgggcgtccacatattcaccaaccggcttgccttcgccgccgctgattggtgtctccgcctacatggctggcctattatgccgtcgttattgggcgtccatgacctcaccgccagcctacctccatcgccaccgactggtgtttctgcctacacggctggcctattatgccgccattgttgggcgtctacgacttcaccggcctgtctctgtcgccaccgactggtgtcctcgcctatacggttggttggtcacaccaccgttcatgggcatctacgtcttcaccaaccggtttgcctttgccgccaccgactggtgtctctgcctacatggctggtctattatgacgccgttggtgggcatcttcgctttcaccgtcgaccgccttctttcgccgccgactggtgtcttcattgttattgacggacgactttgttcccacattggccacctcggcttgccttcgtatgacgacaactggtgatatatcttcacggccagccatgtcgctgccaccgctaataggtgtcatcatcttcaacacaagttgtctgcgtctgctgccgaccggtttcttcacttccat

SEQ ID NO: 23839 - DNA, 387 bp, Oryza sativa
  Clone ID: PAT_MRT4530_28880C.1
gcacgaggaagcaaggcagcttgcaggatttctgctcgaaaagctgttgcaaggtcttgcagctaaaaggggcatgtttcacttgagatctcccacttgaacagatgacagaatctctcgtatttggattttgaccacggtcttttttgtgctcttctcttctcttctcatcctggttgggcttggtgtggcatgctgcttgtgagcaggtcctggctggaggggcaaagcggtgcctgaccctcaagtggactcccgatggtccttgctacacacatactaggatatgtctgtgatggctagcgcccagacatcaactcttgacaagtcatgcttctttcgtaagacggcacatccgtgttcaccaagcaagtgcgcaccaggtgg

SEQ ID NO: 23840 - DNA, 477 bp, Oryza sativa
  Clone ID: PAT_MRT4530_28881C.1
atggcggcggccgggcgcggcggtgaccggatgaggcggcggcaagcgggcgtcgtcaaggcagcggacattgtcgtcgtcaaggcggcggacgtcgtcgaggcagcggccgtcgtcgttgtctctgcggggaacgtccccgccgccggccgcctcctcaccaccatccgccaccacctactccgcaccttgccgctgcccctcgccgcgccgctcctagggcacctccttttgcgccgccgcgtccgcgaggccgcctccatcatccactggctctgccgcccggactccccgcagcggcccaacagcgccaccttcaccttcgctgtcgcagcggacgggcacaacagcgacaacggtgaccaggcgggcgtggcgaggcagcgaccggcgaggcggcgacgaacgggccccgcccagatccgacgagttgcggtggccgacggacaaatcctccgcaaggaaaaatcattttga

SEQ ID NO: 23841 - DNA, 402 bp, Oryza sativa
  Clone ID: PAT_MRT4530_28882C.1
atgtccatcgccggcgaggcgctgcgcaccaacatcacgacgctgggcccgctggtgctcccgctgtcggagcagctcctgttcctcgccatggtggtgctccaccgcgtgttcctcgccggcgtcaagacctacctgccggacttcaccccggcgctcgaccacttctgcatccacgccgggggccgcggtgtgctggacgagctggagcggagcctcaagctgagtgcgtggcacatggagccgtcgtggatgacgcacggcgacggcttcatgcttcacttgacggccttcgcccttgggcactggcccaaggaggcagtagtgtggtcggccagtggagcggggaaacctggaaagccaaagtgcaacaacagcacttctctcgaaaatatcgagtaa

SEQ ID NO: 23842 - DNA, 694 bp, Oryza sativa
  unsure (1)..(694): unsure at all n locations
  Clone ID: PAT_MRT4530_28883C.1
aaaatacaagacgtaaagcgttataggcagttctctagcatccatcacatagaccatgatgatctttcgatatccttctgtctcctgcgccctgcgcagatgagcatgcgctctctggcaacagtcttgattgcattgcatccttagtgggcaactgcgcacgcatgcaaccagtttatagcaacctgatcatggaactccgcgcatatgatgtccgacgaggcattcagtgcagttcggatgaggcctaccttgnggaagcactcgacgcaggctacaacatgagcaggatgtacaggtgatgccgcatcacatgactgtcagcggcatgagagtagatcggagcaccaatactcattagccaggatattatgcacacatggtgcaggtatattaatgcaataatgagcagagtagatgcgtgtctttgttggctgagccccaagctcaagcccatggccaggtggctctcaatttgccctgacatgtgtggagactaccctaggtactgtagcactccatgcaaaggtgctactggacattgcgggacttgggagtgtgtaccatcatatatatatagttggataactatagtgtcacacatcatcgtactgtgtcatgtaacaagaatgggaatagcatttggctgctcgtatgaataaatgatagtctctcgagtgaatgcttgttaccc

SEQ ID NO: 23843 - DNA, 609 bp, Oryza sativa
  Clone ID: PAT_MRT4530_28884C.1
ccggccgggatatttgtagtagtgttcttatcatgtagtctttacttattatgactgcagcctgatgtctataaatacaaggcacatggtaggaagagccatatatacctgtcagaaatttcagtactgttgattttcagtttgagtataaagtgtaccattcaataaaaaaaaaaaaaaaaaaaaaaaaaaaaaaaaaaaaaaaaaaaaaaaaaaaaaaaaaaaaaaaaaaaaaaaaaaaaaaaaaaaaaaaaaaaaaaaaaaaaaaaaaaaaaaaaaaaaaaaaaaaaaaaaaaaaaaaaaaaaaaaaaaaaaaaaaaaaaaaaaaaaaaaaaaaaaaaaaaccccgggcgggggtttttttttttttttttttttaaggggaaaaaaggggttttttttttttggggggttttttttttggggggggcccccaaaaatttgcaaccccttttttaaaaaaaaatgtgaccccccgtttttttccaaaaccccccccaaaaaaattttgaattttgggggggcccttttgcaaaattaggaacctttttcccccctttttttattttgggggtgcccaaaaaaaaaaaaaaaaaatttggggggggc

SEQ ID NO: 23844 - DNA, 792 bp, Oryza sativa
  Clone ID: PAT_MRT4530_28885C.1
atggagatacaagagagggccatgaagcatgtcatggagattggagaggagaggaagagaagcagcttgaagaggaggctgatgatgaggctgaggaaagatggctacgatgcttctctctgcaggtcttcttgggttgccaccgctgagcatccaggaggtgattacgagtacatcgacgtgctcgtggcagtaggccatggtgctgacacgtcgtccacgtccaggctgatcgttgacgtggatttccggtcccagttccagctggcgaggccggccccatggtacgcccacctgtcgagccggctgccgccggtgttcgtgggcccgccggagaagctgcggcaggcggtggcgctgctgtgcatggcggcgcagcggtcgctccgggagagcggcctgcacgtcccgccgtggaggcggcccagctacgtgcaggccaagtggctcccctgccgcggcgtgcaggcatcagcgctgccaccgggcggcgagtccgccgcggcggcgaacggcggcgatggcccgcgggcggtggtccagtggtcggtggggaaggagaggagacgccgtggtggtgggcaccggaggtcaggcctctcggtggagctatccgactccggcgccggtgagtcctctactatactatccccatggcccattgcagcttttgcaaggaggaaggagaaaaaggaagttgcaaaacatagtaggagcctcaactgggcctctatggctggaagaaggaaacgctatatctggccgaaagctcaactgggcctctatggataa

SEQ ID NO: 23845 - DNA, 2554 bp, Oryza sativa
  Clone ID: PAT_MRT4530_28886C.1
tgtgtgcacggggcgcaaacgcagcagtagaagcaaccccacacgctcacaagtcacaagagcgaagaagatttccccaatttctttcttacccttgccgttgctcgtcccgcgagaggcagcatccaaatccgccgaatttaatcgcgccaagaccgaattttggccatttttcattcaatttttggtccaggaaccccgaatgcgccgagttcacctcgccaagacatcaaattcgtgattttttttttttagtttgcgagttcgcgtgtttcgagctcgccggagggatctcggggtcaggcggccatgtcgttgccggcgatttccctgtacaccagcccaccaccgggcgccgtctactcgtcggagttcgatccgagctcccgcggctcgtcgccgccctgctccaccgcgccgccgtccacctctcaccgcccgcccgccgccgcgggcgggctgtcctgcctcttctcctccccggccgcggcggcctcgccgcctcgtgccccgccgcacgacgagctcggtgcgctgtggcaagatagatccgacgagcccgccttcgccggcggcggcggcggctactcgtcctcgccgctcaagtggcgtgacctccaccaccaccatcaccacagccccgtgtcggtgttccagggcccgtcgtcctctcggggggcctcccgcagcccgccggcgtcgtggctcgccggccgcgaccgcgaccgcgagcgcctcttcgccggcttcgtgcgcaacgcgctgggctcctgcgttgactacgccccggcactcagcccgcggtcggaggtcggcggcggcgagctcgcgttcgagctcgacgagaacctcgcggaggcgagccccgcctgcgagccgtgcgcccgggagctcctcgccggcgcccaggctcgccaccgcatcttccacgaggagctcgtcgtgaagaccttcttcgaggccgagaaggctcaccgtggccaggtctcaaagttgagccacttgagcaaacttgctcgtgataacaacacagcaagcaggattgttgaagcagatcgattgcacacaatgcttcttgcaatggctgatgcacgggcagttctaataaaattagctgaccgtgtgcataacatgaaaactttggaagctttacctcttggtaaacaacaaagatttgctaaggagaccatggagatctttgttcctttggctaatcgattagggattgccagctggaaagaccagttggaaaatctttgcttcaagcatctgaatccagaagagcacaaggatctatcatctaaactaaccaaatcctttgacgaagtgctaatcacatctgctgtggacaaactagatagaggtctgagggatgcaggcctctcatatcacaatctttctgggaggcacaaaagcctatacagtattcacaacaagatgctaaagaagaatttgacaatggatgagatccatgatatccatggcctgcgtctcgtgtttgagaaggaggaagattgctatcgagcacttgatgttgttcatgaactatggccccaagttcctggaagatttaaggactacatatctcgtccaaaattaaatgggtatcgatcattgcacactgttgtcatgagcgagaatgtccacccatttgaagtccagatccgtacaaaagagatgcacctgcaagctgagtatggattcgcagcacactggaggtacaaggaaggcacctgtaggcactcctttgtactccagatggtggaatgggctaggtgggtgcttacatggcaatgtgaagcaatgaacaaagaacgacctgcatctctaggcgacagtgatgcaattaggccaccctgtccatttcccatgcattcagaagactgcccttactcatatactcggcaatgcgaccatgatggaccgatatttgtcatcctactggaacatgacaagatgtctgtgcaagaattccaagcaaactcaactgtaatgaacctcatggatcgagttgggaccaacactccaagatggagtccctaccgcatccccatgaaggaagatctgcgaccgaaggttaaccacgagcccataagcgatctgaaccggaagctcagcatgggggatgtggtggagctgacaccggcccttcctcacgagtcgctccccaattaccgggaggagattcagcgcatgtacgaccgtggcggattcgccctcgccacccggggtggcagctcgaggcggtgacagtacttcgacaatcttaacagccccaccgcatcattgtacaatgttgtccaacctaattcaattcattgtaaatacaaccctaattcttcgcagccgcagaaaccggaacaacacccccaccaagttctgtaagctggggggagtctgttctgctgcctggagtctgttagcttgacccaggaggctgcaatgtgtaaaagtaaaaacagtgtataatcttttccaaggtagttccagcttctcccaggatttgtggagaggaggctgtagcagaatctaaaaaaaaaaaaaaaaaaaaaaa

SEQ ID NO: 23846 - DNA, 627 bp, Oryza sativa
  Clone ID: PAT_MRT4530_28887C.1
atgggtaagatcgaagcgcccgcccgccgccggcctgaaaggaagaacccggggggccccccccccgcgtgctcgcgattaaaatggacaagacgacgatcatcgtgtccgccgtgggcgggtcccctggggttgctcagcgccatcctggggttcgccgccgagggcgcgaagcgcaccagggccctatactcgtcgacgaacccatcggcgctcgggctgggcgtatgcgcggccatcttcctggtgatggcgcaggtcaccgtgacggccgtcggcggctgctgcggctgctgcaagtcccgcgccatcccgtccgagaccaagcggatcgtcggcgtcgtctgcgccgtcatctcatggattgcggcggtgatcgcgttcgtgatgttcctggacgccgggatcgtggcgtcggagtgcttcatcgtcagggaaggcttcttcgccggcgccggggtgctggccctgatcgccacggcgctcgggctaacctcctacatcgtgctccgcccgcagcccgacgcggcggcggggagaggcgagcccacgccgatcgggatcccgatggacgctgttcccgggtacccgccgaggcctcctcatcctcctccgcagcaggtctaa

SEQ ID NO: 23847 - DNA, 462 bp, Oryza sativa
  Clone ID: PAT_MRT4530_28888C.1
atggagggaggaggaaaaggtgcggcggcgctgctggttctgctgctcgtcgcggcgtctctgaacgccggcgtcgcggtcgcggcggcgcgccgtctcggagaggatggcggcggccgccgtcagcagccgcctccgctggtgtccgtcagcaaggcgtcgtcagggccttctggctgcagcaacgacccccatatttctggacgtccctgcgcgccaccaaaaatgccctacggcgtgttcggcgggcaaataccaggtggcaagttagggccatatgtgcagccggaggacggcttgctctcggacaccgccggcggtggcggcgcatgcatcagctccaagcaggcggcgcggcggcgccacggcagcggcgccggcggcatgcagcgacgccgccgcgacgagcagcacaaccaccatcatcatcaccgcggccgccggcttcatcttcatcagtaa

SEQ ID NO: 23848 - DNA, 964 bp, Oryza sativa
  Clone ID: PAT_MRT4530_28889C.1
gatcaacaaaaactaccataattattaatattaatgatctaaattatgatccacatattgacagggaaagttccaggttaactctccggccaacaaagctgcaccctggaggcccagagcagtcagtactgaagttcctcggcgacggcgagataacgcagctggcctcgctgggccaggaggagatagcgttcgcagctttctggtcgacggctagcgacagcggcggtgcgcgtttcttgacttgttcatctctagttgcacttctcaccatgaagaatctactttcgtggttctccttgcaagatatcttcatgttcctgaccatatggttcagttgatgtgctttgggtttactaatctggtgtaccataaagggctcctctcttcttccctgcacccaaaatcccagtgcctgatgaaggcttgaagcagcagcagcaggagcacgagcacgagcggcagctgcagcatcgtgttgatctgatctcctcctatccatggacacttcttgcagtcgcatacaatcatcgatgaagtaccgggtgcctgcaggaggagcactactcctcatgtcactgctcccttccatgcatctgtatttgcctgaagcttctgtccctaccttggccctttttatgggtgggcacatgaattccttggggctctgctcatcactgccgaatgagtgctgcttcagatgtagctgtggctgcatatcgttttgtccaatgccatgccgtgtgcctctgtacatctgtaggtgacttttaacgtgagatatggtaagccctctgacatccatgagctgaagaatgagcttaggagttgctttttgttggccgccaaggcagtcgatggctcgcacgaagctgcggtggagctccgcggtccatctcagcctcggcaccttggacctgttgtactgcctcgcggctcccttcctctcgccgctaattcccat

SEQ ID NO: 23849 - DNA, 278 bp, Oryza sativa
  Clone ID: PAT_MRT4530_2888C.1
accttcttggcggggtattcacaagggctttccaaagttgcgaattgccaacatgctattggtttttcacaaaccgctttaaattggctgattgccattcttcatgcattacaatttttcccctccctttgatcctcatcaaaagtaaaaacaactttttttccctttgttttcttggcaacattcgcttttttgcaattgccttttttttttccccaaacttttttaaactatgttaccacagactgtaggtttatttggctattaatttggactcc

SEQ ID NO: 23850 - DNA, 607 bp, Oryza sativa
  unsure (1)..(607): unsure at all n locations
  Clone ID: PAT_MRT4530_28890C.1
gatggaacnatcatggttgctcatctcaatggttgtgttgctgncancacaatggtggtttcctgatgatgtccgccagctgttcgngttgtganggagggtctgattggatgtcagtgctatgttgatatgntgganccactaacgtgtgctaccgcctntcagagatcgagatagatccggggagattgtaaacggtccttggtatcaagaggaaggaaggaggcgttcgggtcgtcagtcggtcctctcaagggtagtacgggtcagtcgtccatcaaggagtaccagtcctccgatatcgtctgaccatctcaccaccccgtcccgtgtgcggccgtagccgtcgtacaaccgtccgtgcnagtcaaccagtccgtcgagtgngtggcgtagaggtgtagtgtgtcgtagtgcgttgcaccaagaggtcgtcgtaaagtagtgtacgtaggtagttaagggtaagtccaaggtgagtgagagagggtcgtgtggagtgtgtggtctccgtgtacatcgatcgatcgactctngactactctgtttaaccaactgttttcgatatatttatattattaatgatttttccaaaaaaaaaaaaaaa

SEQ ID NO: 23851 - DNA, 3014 bp, Oryza sativa
  Clone ID: PAT_MRT4530_28891C.1
aaccaacacccatcccattatccattatctctgcggggttttgattgatgtgcgaccaaccatgtatattattctcaaagtttaaccactctcaccaccactcattattccatccaatcttccatccatccatccaaggcaagctcagcaaatcaatcaaaaaaaacaaataaaaagagaaaacaaaatggtgtatatgaagaagtctagcaaccggcgaggcgggcgcacaccctgcgctggatgggggtccggcacgatgggcactccttcatcccttgcttgtcatggaggtcattgcatttcgcgcagaccacctggtgcgcgcaagggaggaagacgaccgacatctcctcgctcaggcacatgacgcactcccggtcacgctgtatgtcgtcaaaatcgaaatcctggggtaccgctgctatattggccaaaatttgagcgctgccattctttctcccttcagaaaggcgcaacgcgttggttctgttgtctgctccccacttgggaggggcaccaaccctcaacgagtccaaggataccttcagctgcgaaatctgctgctcgagagcacgtatctggctcttgtatctttgcgtatcgttctccgctttgagatgcaggaagttctcttccgacctcagtgatgtctcaatctgatccctctctttcttctctaagcttacacgggcaattgcctcaatctttccagcctcttcttgcctccaccttgcctggatttgatccttctgctctttagcatgatgaagttgctggtggacctgagatagcttgttcctttgagcagcaagatcctcttgcaacagggctctttcagattcccaatgctgagaccttttatgactgttctcatccttctttgaaagctccaaaatatttgttgcagacactagtgcatgccgctttgcagcttccatctgtatcctgagctgttcattctcggcttcacgtctacgagcagaagattctgccttttccagctgggtgttcgccctagaaatcgcagattccatctctaaaagcttcttccgagtgctctcttccagattgtgcctctcttcttggaggcggtccgcttcttccttctctttcctaagtgaatgaagctcttccttctccttggcaagtcgacgagtgacttgcatcaccttctgctgagcccagtctgtccaatccctcatatgtgcttgcaactctttctgccgctggacaagaatcaagaccatttcatccttcttatcttgtgggatccaaaccttctgatcctcatcatatgataaattgattttgctgctagagtccataccctctgtattggcatcatgattcgaagatggagcaggactgtcatttgaggacggcaatggcaacgacaatgagagatctgtgctagcagctggtaatgggttcaagttactactcagcttggcatcaaatgatggattggagggaagggcagcaccagtaaaagaaaggtcaggtggtacttccggtcccttcatgcttgcagaaaaccctttgcctactttggatgaggccttcaaactgctagtagtagaatctgaaaacgacctgcacttcctgtccagcactgcgctacccaaagagctatgcttgcttgacctaagagatcctttagaacccagtgctcgggaactcttatcaaaactcatcaacttctgccgatgcaaggaatcccgcttagaactccccctcttactagggattggcttatcatctttcacaggttgtgtcgcagcagcaacgaatggttgctcctctgaatgatcaggcacaggatttgagttttcttttggcttaagattcgggatttcactctgcgccttacctgagacagagggtttactgctcggtacattcaggtttgctggtgttgcggatgaatcagccttggcagtattgtaagaattgggtggcactggggtaagttttccacgaaaagtgacgccagtctgtgggttggtaatagatactgataaatccgaacttggattattaggttcatagtttccaacaactggctgggcaatcacttgcgtatccactgctgggagggaagccggattgtagtccatggcacaggcattggccacattcatatccgacataagcaagcagaacatcacatcacctgtagtgtagaacggctgagcctgattgaccaacgcaatcatgccaccgagcactgcctgctcaatcttcctcatgtcttcctcggaggcgccctcactcaacatgtccccctcggtcttgagcacctcgaccgccgcctcgccgaacccagcaaggctctccctccaattgtactgcgtggcagcccgcaggacggcggcacgcgcggtgggctcggagtaacccatcgcgatgatcacacctacggcattgtcgaacgtcgcgtccaggcccttgagaaggatctcctcgagcagcgcctcgttggggtcattccaattcacatatctctggcactccagtagctcctccgccgtggggtgaatatccttgcaatcgcacgagcccgggatgaggtccaggttgacgccctcggcggccaccgcggcggcggccgccgccgccgcgatggctgccttctccggcgacatgaactcgaagcccacgcagtcggccgtcagtgggtactccagcccgaatgaccccagctcggcggacggcggctcggcgcggtacttgcgcttgttccggctcgccgccttctcctgcgccgccgccgctggccccaacggtggatgcgccgcgagagtggacatcacgatagatagctctggttccttcctgcgcgtgcgtgcaccgaatcagggaagagagagagatagaaaaaaaaataaaccccgggggggggggggtcgtcggcggggatcgaagcggagtcgatcagaggagtggagaagagagagagagagtatggctagagagagagaggaggaggaggaagaagaagaagggggaag

SEQ ID NO: 23852 - DNA, 307 bp, Oryza sativa
  Clone ID: PAT_MRT4530_28892C.1
atggagatggccagccgccccaacacgcaccatggtcaggacatggaaggtttcgttgctgagctcgtctgcatggcatttgtggttggtttcccagcagagctggagtgcaccaggatttgtcctctcagtagcaagttcccacaccaggtccgttgtgaggtccatggtattccctcctacctacccaacatggtggtgacagcttgtgcaggcatagttgatcatgcttgcgaggaggctgccctcaagatgatggttgttggtgttgcttctatgctgcatatctcaaagatacaggtgcaag

SEQ ID NO: 23853 - DNA, 2696 bp, Oryza sativa
  Clone ID: PAT_MRT4530_28893C.1
ccacgcgtccgtaggaagaaggcaagggaagggcatggcgacgctgccggacctgggtgtgtccgccttcatcaacatcttgggcgccttcgtcttcctcctcatcttcgccgccctccgcctccagcccatcaacgaccgcgtctacttccccaagctctacctcactggccagcgacgccaccaccctcaccctcatggcttcgtcaacctcgacctctgctcctacctccgcttcctcgcctgggtccccggcgccctccgcatgtcccagcccgacctcatccaccacgccggcctcgactccgccgtctacctccgaatctacacgctcggcctcaagatatttttgcccatcatgactgtcgccttgctggttcttattccagttaatgtctctggtggcacgttacttaatttacgaaaagaaattgtctttagtgatattgataagctttccatatcaaatgtcaaccctggatccaacaggttctttatccatctattaatggcatatgtgttcactttttggacttgctttatgctatacaaagagtatagcaatgtggcatttatgagattgcacttcctggcttctcagaagcgttgtgctgatcagttcactgtgattgttagaaacatacctcatgtttcaagccattcaacatctgaaacagtggatgaattcttccgtaggaatcatccagaccactatcttggtcagcaggctgtttataacgcaaacaggtatgctaaacttgtgaagaaaaaagagaggcttcaaaactggttggattactaccagctgaagtttgaaaggcatcctggaaaaagaccaattggaaggacagggtgccttggtttctgcggtagagaagtggatcaaatcgactattaccgtgctagaatcagcgagcttgataagaagcttgcatctgagcgtcaaagagttctcaatgacccaaaagctgttatgccagttgcttttgtgacatttgactcgagatggggagctgctgtatgtgcacagacacaacagtcaaagaatcctacccaatggctaactgattgggctcctgaaccgcgggatgtatattggcagaatcttgccattccatttttctctctcagtatccgcaagttcctgatatccattgcagtttttgctctggtgttcttctacatgatacctatagcttttgtgcaatcacttgccaatcttgagggtattgaaaaagttgcacctttcctaaggcctgtgatagacacaccagtggtgaaatccttcctgcagggtttccttccgggtttggctttgaagatttttctgtatatcctcccaacggttttgatgattatgtcaaaggttgaaggttatgtgtctttatcatctctggaaaggagggctgcttcaaaatattactacttcatgctggtgaatgtatttcttggaagcataatcgctggcacagcttttgaacagctaaatgcatttttccatcagccaccttcacaaataccaaggaccattggagtagctataccaatgaaagctacattttttatgacatacataatggttgacgggtgggctggcatcgcgaacgagattcttcgagtgaagccgctggtgatataccacctgaagaacatgtttattgtgaagacggagcgggacagggagagggcaatggatccgggcagcattgggcttgcagagaacctcccatcactgcagctgtattttcttcttgggcttgtgtatgctgtggtcacccccattctcctccctttcattatcatcttctttgccttcgctttcctcgtgtacagacaccagatcatcaacgtgtacaaccaagaatacgagagtgctgctgcgttttggcctcaggtgcactctcgcataatagcgagcttgctgatctctcatgtaactctgtttgggctgatgagcaccatgaaggctgcctactccaccccgctgcttatctttctgccactcctcaccatatggttccacaagtactgcaagagccgtttcgagcctgctttccgcaagtaccctctagaggaagcgatggagaaggacaatctggagcgcacgtcggagccaaacctgaacctcaaatcgtacctgcagaacgcttacctgcaccccattttccacatgtttgagcagcagcagcagcaggagcaggagcagcaacgggaggagaaggtagaggtgcgaatcgacaaggcgcagcaacatcatcatcggcaggtagaggaggaagaggaggagagcaagagcagccaggctacaacacactactaccaccatcaccatgagcagaccacaacgacgacacaccaccattaccatcagcatgagcatatgagccactaccacatgggcccctccgacacagctgactcaccctcgccgccgcactttgtctaccattatggcgtcgacccttgataatcgcccagatagtctcttagcttctgaatcactagattgtttgttcttttgttttttccttttgtcaattgggggtgatatttttattcctctaattaacgaccgactggctgctgataattatttaatgatctgttgtaaatgcgaatatgtgagttgattgagtgtgtaaaaaaaaaacccacggaacaattcaaaaaaaactccctcgaaaaaaaaaaaaaaa

SEQ ID NO: 23854 - DNA, 1517 bp, Oryza sativa
  Clone ID: PAT_MRT4530_28894C.1
tgccgccgcgtctcctattgtcgtcactcgcgccgcgcgccgtcgccatctcccctcgagccccacccacgccacacgccatcgtccgtcgcccatcgccgtcatcgcctcgagccccgtccgcgcgccgtcacccctcgcccgcgtgcctgcgtgctgccgtcgccgcgtcgcctcctcacaccccgccgcactgtgcgtgccgctgtcctcgccgccgagtgtgccacggccgcgccgccgtcctcgccgccgcctccggcccccgtccgcgtgcgtgcgcgccgccgccgccgcccccgcctgatgtcgtgcccccgccgccatctgccccgtgccgccggccggtccgcccgcccgccggcctcccccctccccccttcggccagatctgggagggagggagggaggggagccgccgccagccgcctcgcgccgtcccgcgccgccggcctccccccacccccctccggccagatctggagggtagggagggagagaagccgccgccggccaccccacgcccgacgccgttcgcccttcacccgacgccgtccgcccctcgcccgacggcatccgtccttcaccgccgtccgccggcctcccccaccccctccggccagatctggaggggagggagggaggggagccaccgccggccgccctgcgcccggccgccggtccgcgctttgcctgacgccgtccgcccttccccaccggcctcccccctcccccctccggccagatctggaggggagggagggaggggagccgccgccgaccgccccttccgccgccacaaccaccacgccgcctcgcgccgcagcggcctccgccggccgtaccgcctccgccaccaccgcgagaaggccccccgccgccacctccccctccacctccaccaccacctccaccaccaccacctcctccgctccctccgccgctggcgccgcgatgcgagccgccgctgccgctgccgctgccgctccaccacctgccaatctaccacagaaactccattgctccaccgccataaaaaacctctgccggcgcgtcggtacactgcaccggcgcccccaccggctagtatccgcgtgcagccacctcaccaggctccgcctccaccacctccaccgtcacggagtcgaacctcgcccgccgccgtgccaccgggcaccgccgtcgatcgccagcagtagaccccgccaccggtcacttccccgccatttctaggcgcggatctagcggtcacttccaccgccgccatcacctccaaacgccgccgccacccccgccaaatgccaccgccccacggcactaccccgccgccaacttccttcctaccagatccggccggaacgcacaaatctgggcggttccaccgttccaaatgccgagcagccccctacccctgcgtggtgagagaagcgaagccccgccgcccccaccggcggcgccgccaccgccaagaacgccgccgccgccgccgtggcgccgcacaccatccccaaggagct

SEQ ID NO: 23855 - DNA, 1290 bp, Oryza sativa
  Clone ID: PAT_MRT4530_28895C.1
atggaggcggccgccgacgaggagcaggaggggatctccgcccagtcgccggcccaggcgccgccctcctccgcctcgtcccttcccaaggagcaatcgcaggtggagctggagctgcgggtgcttcaggctctcgagttctaccctccgtccaaactgaaaggcattcatcgtcactttgttatctatggtctaatggaatacttgagaaaaagtcttgatagacaattctctgctgatgaagttttacaactactggaccgattcttcaacctagaaatgctgccgcagacccagcctccgccgccgccgccgccgccgcccacctccgcggcgcaccacgcgtaccactaccagtaccagtaccagtacgagcagcccaaaccccatcagtatccgcagccgcagcaggccaacccgtcggaccacagccacgccgtgctccactcgctcctgcgccgcgtggccgcgctcgagtccaccctcccgcgctgcttcgcctcgccgcccgtgccgcccccgctccaccggaaccctcgccaccgcccccgcgcggccgcgcaccgggaggaggaggacgacgaggaggaggaggacgacgacgaggatgcaccggcctcgctgccgccgccgccacgccgtgcgcgggctccgccttcaccagcgagggagcgggcggcgcggacgatccaggcgcacttccgccgcttcctggcgcggcggtcccgcacgctgcgccacctcaaggagctcgccgtcctccggtccaaggccgccgcgctccggggctccctctccgggcgaggcagggtgggcgaccccgccgccatttctgaggccgccatggccctcctcttccatctcgactcgatccagggcggtgacccgatgatccgtgagggaaagcgcgcggtgagccgggagcttacccggatcttggagtttgttgataaggtgctagtcaaagagcatggggagatggcaatgaatggcgaattggattgtaaagactaccatgaaggttgcaatgccgcatttgcggctaatccgtcagcgatgaacaagaagaaggtaggtttctgtggtaatggtaaagtccaagagctgcatgatgaggctgagcaagagcatggcagtgatgctgatgagagctctgagacctcgagctctgctgaagctgaggcgaggaagcgctcaaacagtaagaggggtgctcatgccaagcccgggcttgcggcgccaatgcctgtgtacatggagccgagaaggattgacgaggagaggagataa

SEQ ID NO: 23856 - DNA, 303 bp, Oryza sativa
  Clone ID: PAT_MRT4530_28896C.1
atgatcgtccaccagatgaagctgaagcctaccaaggacgatgcactgatcaagctcaggcgatgcgttgcgcctccgctcgccgttggcttggccgctgcaagattcagcaaacaaaagagaggctcagttacaaattacagctacatgtctgtgaatcactggaaatttctaagcaagcttgaaatgatctcatacagagagatgcagcgtttccagtggaagctgaagaagcagcagtgctacctgcagtgccggcacctgcaggaattgaagagagttcagatcagcatccctctgtaa

SEQ ID NO: 23857 - DNA, 330 bp, Oryza sativa
  Clone ID: PAT_MRT4530_28897C.1
gcgaaaaaacatgctccatttttaatccccccaacgaaaacaacatcgatcctactcgcattttactaaaaactggcacatcacacgggggtttttggtcaaaataaatgggcaagccataaaaaggccaagctggttcatgggtacttttaagggcccacaagggggaaaagcgtgttcatgtagaaccccgacctgtcgccccggaccttgggggggacccggggggtgtacctgaccttggactcctcctttaccttttccaaggccacctccggccgggaaacgaaccctttttgtgaggaatttctttggggggccaaaccctaa

SEQ ID NO: 23858 - DNA, 390 bp, Oryza sativa
  Clone ID: PAT_MRT4530_28898C.1
atgggaaaagttacttacatccatggtatggaccagtcgaacgggcagcagaagctagagaggcatacaacagtagaagcaattacctcggaggtcgcgtggaattcaccgtcgacttcgctggaggaggaggaggaggaggagggtgagactgcctggagactctacggctacgggaatcccgatgggatctaccgcctgcggtttggatgtggtggtgccgggttcggattgcagtctcgtggaggtgggcacacccgtgcgggcgggcgcgaagcgactggattcaggggcccgtccatcgtggtccacctaccggtgattggcagtggtatggtcgggtttttcttcggttgccgcggccttgtcagtttcggggggctcggggga

SEQ ID NO: 23859 - DNA, 456 bp, Oryza sativa
  Clone ID: PAT_MRT4530_28899C.1
tcgatggtgaataaatgatgaacttcaatgttcttctgaatacagcttgccaattgggagcaaaaaaaaaaaaaaaaaaaaaaaaaaataaaaaaaaaaaaaaaaaaaaaaaaaaaaaaaaaaaaaaaaaaaaaaaaagaaaatgctaatcaattcaataacaatacgaataaaaaaaagaaagcaaaacaagaagtgagctaatacaaaatcaaattaagaacaatgcagactccatggtgaggcaccttgtaaagaagaactcaatgttccaaaccatgctaatagaaaagaaccctaatgctaaccgcctatctacggaagaagcacgaagccttaacaataacactggagaagagattgcgcacttcactccgaaaattaaaaacagacgtacctagggttatcaaatgagacggataacgaagcctcagagagattaactaatgaaagagg

SEQ ID NO: 23860 - DNA, 399 bp, Oryza sativa
  Clone ID: PAT_MRT4530_2889C.1
atggcggaagtggccaatgtgggaacaaagtcgtccatcaataacaatgaagacaccagtcggcggcgacgaaggcggtcgacggtgaaagcgaagatgcccactaatggcggcataataggtcagccgttcagagaagaggagcttgaagaagtggtcgacggaaaggaagtgaaaactcccaaagcgaaagcgaagtcggcgactcatgaaattgattccatcgcgctcgttgataggaaactcgacgcaacccctacctggcgcgccaactgtcgaaacatgaattcggcaataataaaagggggtagcgcacgagacctaaaagtggatggatgcagagacaaaggatttagacaggttcaggccctctcgatgagaggagaaaatgccccttag

SEQ ID NO: 23861 - DNA, 179 bp, Oryza sativa
  Clone ID: PAT_MRT4530_288C.1
aagctttttttttttggatgtgactacgcaaatttatttccaaccaataattccgatttttaaaacaaaaatcattcacaaacagatgtgcccacaatattcgtattcaataactgcaaatattacgctgggtattatgttacaaaattgagttgggatggatgcgacagtcaaagctt

SEQ ID NO: 23862 - DNA, 325 bp, Oryza sativa
  Clone ID: PAT_MRT4530_28900C.1
atatcccaccagatataccgacagggaggggtttgaatatattgagccgtgtttaggagatggtccgtacgatgatgaccggcaccaggtctatactggttatgggcctgcagaaatacctcgtcaggaaggtggagaggaagatatctacgatcaccggcgagcatgaagaagccctacctttacaggcctgggacggtggcgctcctcgagaaccgaaggtaccaaaagagtactgagctcctgattcgaaagctcccctttccagcgccttgttcgttagatcccgcaggatttttaagatcggcttccgctttcagagtca

SEQ ID NO: 23863 - DNA, 903 bp, Oryza sativa
  Clone ID: PAT_MRT4530_28901C.1
atggttcaggcattggtctttgctgtggggatcgtaggcaacatattgtcgttcttggtcatccttgcaccagtgccgacgttttatcgggtgtacaagaagaagtcgacggagtcgttccagtcggtgccgtacgcggtggcgctgctgagcgcaatgctgtggctctactacgccctcctcacctccgacctcctcctcctctccatcaactccatcggctgcctcgtcgagtccctctacctcaccgtctacctcctctacgcccccaggcaggccatggccttcaccctcaagctcgtctgcgccatgaacctcgccctcttcgccgccgtcgtcgccgccctccagctcctcgtcaaggccaccgaccgccgcgtcacgctcgccggcggcatcggcgcctccttcgccctcgccgtcttcgtcgccccgctcaccatcatcaggcaagtgatcaggaccaagagcgtggagttcatgcccttctggctctccttcttcctcaccctcagcgccgtcgtctggttcttctacggcctcctcatgaaagacttcttcgttgccacgcccaacgtgctgggattgctggttgggctggcccagatggggctgtacgtggtgtacaagaaccccaagaagaactccgccgtgtcggaggcggccgccgcccagcaggttgaggtcaaggaccagcagcagctgcagatgcagctccaggcgtcgccggcggtggcgccgctcgacgtcgacgccgacgccgacgccgacttggaggcggcggcgccggccaccccgcagcggccagctgacgatgacgccatcgaccacaggagcgtcgtcgtcgacatcccgccgccgccgcagccgccgccggcgctgccggccggggaggtggcctga

SEQ ID NO: 23864 - DNA, 921 bp, Oryza sativa
  Clone ID: PAT_MRT4530_28902C.1
acgacgagcgcctcccccgccccacctcccgccccacgcgtccgcctcctcctcctccttcctctcgctctctcctccttgacaaaatttcctccacccattcccttctccacccaccctgccgatctctctgaattcggtcgcctcctccgcaccatctttctctcctcctctcttctagcaatcggtcgtttcctccggttgttgtgctgattcttcgttctttctctccctctctctctctttctttcttcctctctctgccttggagaggatcaagaaacgaagggagggaggagaggagaggagaagggaaatcgagaaaagtctgttctttggtttggctcgtgtggttcttgagagctgctgtttggaaaatctctgcacctgttgctgaccacttgcttcaattgttgaaagagatgaacagcacctgagatgctattgccagacatcaattgataaagagcacatcttcagtaatgcaaggacagaagaactctgttgagcagcttgctgatgtgtttggatttgaccatgcatccagttcaggaaaccctgtcatggatcaacaaggatattggaacaacattcttggttcagtggagtcacataaccttcaaggttatcaggtgaaccgtagtgatggaactattccctatggaaacggtgtgcatcaaaatggcacttttttaggtttttgggaatcaggcgaagcaagtgcaagtggcagttcactacattttgggggctctaatgagatcaaagctgagcaacgtaatatcggtggtggcctaaggattggtgaaaggcgcttggtagctgagcgcaacctttctttggataatgttgatataggccttaacatcaatggtaatgatctatctggtgaaaattccaatgtgaatggtgcttcacaag

SEQ ID NO: 23865 - DNA, 636 bp, Oryza sativa
  Clone ID: PAT_MRT4530_28903C.1
atggattccgaccactggatctcccgcctcatggccgccaagcgccagtacgcgctgcagcgcgcccagaatcaccaccacgccaccgccaccgccaccgccaccgccgcgtcgcactcccacctcgatcggtatgggtacgatgatgttgagccagaggacgaggtacggccagacttcccatgtccttactgctatgaagatcatgacattacatctctttgtgcccatttagaggatgagcacccctttgagtctaaagttgtgagacatcacagattacgcagagttgctgttcctagcaaccatgctctctcccttggagggagagatctacaggagacctacttaaaggttcttcttggaaacagtagtcgaagcagtggtaccaatgcagcaagttcagtcactgattcactactatcttcacttgttttaaatttatcttcatccgaagccgaagatacagcgaaattttctgctctagctgtggtagaaaataattggtttaaaagaacactgccttcaaagacttggaaggcaagttcatccaaccggaggctggttcctgatcctttcgacattgatgatgaaccgatgtggctggcctcttacttgtcatggaagcagttctga

SEQ ID NO: 23866 - DNA, 1213 bp, Oryza sativa
  Clone ID: PAT_MRT4530_28904C.1
ttgaacagataattttacctcatgaatataccaaacatggaattcaattttgaaatgtttatagtaagaatcaaattgggggtaatgttcattgtattgttaagcacataatgaaatcatatggaataacacaatcaatacagtaacgctagtcgatagcctagcaatctgaattggatttcgaacataaatgttcagaactgcttccatgacaagtaagaggccagccacatcggttcatcatcaatgtcgaaaggatcaggaaccagcctccggttggatgaactgcttcaggatttggaagatgctttacttcatcattcatccagaaatgtgtggacaaaaggcccactcgagattccagtgcacggagctgctctttttttcttctgctagtcatcaaaaagggtagagacaagcaggtgctgtacaaaagatgatctcactgcagctcgcctccgccttctctccctttcttcctgactaagattagaatcagagcttgccttccaagtctttgaaggcagtgttcttttaaaccaattattttctaccacagctagagcagaaaatttcgctgtatcttcggcttcggatgaagataaatttaaaacaagtgaagatagtagtgaatcagtgactgaacttgctgcattggtaccactgcttcgactactgtttccaagaagaacctttaagtaggtctcctgtagatctctccctccaagggagagagcatggttgctaggaacagcaactctgcgtaatctgtgatgtctctgcagtctaaacaggtagctgtgctgaagggttatgtgatccaataagtcctttgaaatcctagccgagcaaaccgggcaagccacaactttagactcaaaggggtgctcatcctctaaatgggcacaaagagatgtaatgtcatgatcttcatagcagtaaggacatgggaagtctggccgtacctcgtcctctggctcaacatcatcgtacccataccgatcgaggtgggagtgcgacgcggcggtggcggtggcggtggcggtggcgtggtggtgattctgggcgcgctgcagcgcgtactggcgcttggcggccatgaggcgggagatccagtggtcggaatccatggcgccgcgggctcctcctcctccgcgggtcgccgccgcgtgggtcgcgtagggacttccgtccttcctctcgtctcgtctcg

SEQ ID NO: 23867 - DNA, 552 bp, Oryza sativa
  Clone ID: PAT_MRT4530_28905C.1
atggccgccgtcgtccgtgagcttgtcaagaggaggaggtgtgcgccgacggagaggacactactggagaaagttcattcgcaagcgcacggatataccattatagcatttcacccgagagtattccaagggtatctgtcgacgtttgatgtcgcgattccggttcgggcctctgaattgtcaggtaataaccctactcctgttggccgatgccgggtagtcttcctcctcgaatccgtgcccggcgagatcagagatagtgctagatccctcctgacggatgtcaaggaggactgcgaaagtgaaaaggaggctcagaaattagagcgactggaggtgcagaagatacacgcatgtccgaatgattgtatcctctatcgtggtgagaagtacgagaacctagaagcatacccgaaggcggactaccgtaagaagcctatatttcgcaacggtaaatacgtgttcgatatggtgaaagatctcaaagtagtgtttggaaagggacctggcagccaacccatagccagcgaagatggtcacgcggcgatgtag

SEQ ID NO: 23868 - DNA, 962 bp, Oryza sativa
  Clone ID: PAT_MRT4530_28906C.1
aactccggacaacgggacaagcacaaaaattgcacgagctcttgtgattgttccttgtatgcattccgcgcccgggtcaggatttggaaaagtggtttcttctggccgacaatgtatgaagattcaaaagcattcgttagaagatgcacaagctggcagaggcaaggaggaattactgctcgtgatgcaatgcccctcacatacaacttgcaagtcgagatattcgatgtttggggtatagactttatgggacctttccctaagtcccgcaactgcgagtatattctagtggcagtcgactatgtctcgatggtcataagtgacggaggttctcacttcatcgacaaaaccttccgagacctcctacaagacatgggagccaaacacaatgtggccactccttactatccacagaccagcggtcaagcagaaacatcaaacaaacaaatgaagaatattgtgcagaagacggtcaacaaaatgggaacatggtgaaaggatagattgctagacgcactgtgggaagtcatgtcgactacccgtagagctcgagcacagagcatattgggccatcagaaactagaacatgaactttgaaggagcaggagaatgaagaaaaatgaaaattgctgaacttgaagaatggagagagaaggcttaccacaacgcaaagatatataaagaaaggacgaagcgctggcatgataaaaggataaacattaagaaattcaagccaggagacaaagtactgatgttcaattccagggttatgcttttcggccacggaaaattgcgcagcaaatgggaaggaccgttcgacgtcatcgacacctcttcacatggggcaatcacactccgtgatgattcaggtaatatattcaagtttagatgcgagtttagagatagaacgatcggatcacgcccctgagctagttcttctccttctttctcctttgcaaaag

SEQ ID NO: 23869 - DNA, 326 bp, Oryza sativa
  unsure (1)..(326): unsure at all n locations
  Clone ID: PAT_MRT4530_28907C.1
ttgtttttttttattttttttttttttttttttttttttttttttttttttttttttttttttttccttctctttttttttccccttctttcccccccctcaactttccctctatccaattttccttaaactttttttttttaanacgtgggggtttttcctnnctttttttttgctttttttttaaaaccacccantaacaatcccacacaccttaaatgccaaacccttaatgcctaaaccctgagctacctaacattaaatccaacccactttattcccgtttcccacacttgccaactttccannccagaaaccttaaggac

SEQ ID NO: 23870 - DNA, 170 bp, Oryza sativa
  Clone ID: PAT_MRT4530_28908C.1
gcaacttgctattgcgaacaaatcttcttcactatgaacatttaaatatgctaaagagcagttgatattgtagagtattagatcttgtgcacatacacgatatagcagctgtgctctagaagaagttagcaactgaggtctgggggagcagatcaaataattttgtgcat

SEQ ID NO: 23871 - DNA, 651 bp, Oryza sativa
  Clone ID: PAT_MRT4530_28909C.1
gtggatccccgggctgaggaatcggcacgaggagagattagactggacacgaaggctccctctcctcacctccacgcgctctgcttcctcgtcctcctctccgcgtagagagatctggttgctccatcgaattcggctcgttcggtcgttttcttgcgtcctcgtcgtgttcgccatcgatttccgtgggagattcagaggcggcgagggcggcggaggaggaggtttcttgctcgtttcttgggttgcgcttcgtgctggagtaatgtctactagtgctctgcgtttggagctcgttggttgcgtgttcttgggagaattcgaggcatgggcgaggtggtgttgagggattttggtggtgtgttggagagattgggagacggcgaaggattatcatctgcttgttgctggtttgatagctgaattcttggttgtttttttggtgccatggcggcgtcgagggatttcttgggcgggttcggcggggaggtgggcggcgcggcggtggcgggggagaagggcggcggcgagtccgacgagatcgaactcagcttggggctgtcgctgggcggttgcttcggcgccgacctggcgagggagttcaagaagccgaggctggtgaggtcgtcgtccatcgcgtcaatctgctcg

SEQ ID NO: 23872 - DNA, 3866 bp, Oryza sativa
  Clone ID: PAT_MRT4530_2890C.1
ccattttggaacaactagctacatttgcggttgagcttgccgacgtcgctgggcgtcacggccttctccccctggcggagctcgtcggcgtaggtgtgcttccggagcatgtcgacgatctcggccttggagtgcgcggcgaggaacgcgagctcggcggccgacgccgcggccccggggaagttggtggccgcgtcgcgcccccggtaccggagcgccgccacgtcgtaggcccgcgccgccgcctcctcgtcggggaacgtcccgagccacacccgcgcgtgccgctcgtagatgtaccgcgacgactgctgcgccgccgccgccgccggcctcgacgtcaccacctcatccgccgagtcaactcccttcaccaccggtagctgttgagccgccgccgccaccgccaccaccggctccggcgacatccgcacggcgccgccggactcggtggtggcctccactctgccggcttgtcttcgccaccgccattgctgataacaacaacgacttcaccgccggcctgcctccgtcgccgccgactggtgtcttcgcctatatggttggttggtcacaccaccgttgttgggcgtctacatcttcaccgccggcctgcctccgtcgccgccgattggtgcctccgtctacacggctggcctattatgccgccgttgttgggcgtctatatcttcaccgccggcctgcctccgtcgccgccgactggtgtcttcgcctatacggttggttggtcacaccaccgttgttgggcgtctacatcttcaccgccggcctgcctccgtcgccgccgactggtgtcttcgcctatatggttggttggtcacaccaccgttgctgggcgtttacatcttcaccgccggcctgcctccgtcgccgccgagtggtgcctccgcctacacggctggcctattatgccgccgttgttgggcgtctacgacttcaccgccggcctgcctccgtcgccgccgactggtgcctccgcctacacggctggcctattatgccgccgctgttgggcgtctacgacttcaccgccggcctgcctccgtcgccgccgagtgatgcctccgcctacacggctggcctattatgccgccgctgttgggcgtctacgacttcaccgccggcctgcctccgtcgccgccgactggtgcctccgcctacacggctggcctattatgccgccgctgttgggcgtctacgacttcaccgccggcctgcctccgtcgccgccgactggtgcctccgcctacacggctggcctattatgccgccgctgttgggcgtctacgacttcaccgccggcctgcctccgtcgccgccgagtggtgcctccgcctacatggctggcctattatgccgccgctgttgggcgtctacgacttcaccgccggcccgcctccgtcgccgccgagtggtgcctccgcctacatggctggcctattatgccgccgctgttgggcgtctacgacgtcaccgccggcccgcctccgtcgccgccgagtggtgcctccgcctacacggctggcctattatgccgccgctgttgggcgtctacgacctcaccgccggcccgcctccgtcgccgccgactggtgtcctcgcctatacggttggttggtcacaccaccgttcatgggcgtccacgtcttcgccgaccggctggccttcgccgccgccgactggtgtttttgcctatacggttggtggacttcgccgccgttaatgggcttcattatctacaccactggcttggttccactggcgccgactggtgtttttgcctatacggttggtggacttcgcctccgttaatgggcttcattatctacaccactggcttggttccactggcgccgactggtgtttttgtcaccattgatggactgcttcgttcccacatcggctacttctgctgtcaccgagggaatacgacaaagctaagatccagatccagatatgcataaaagggattcatggctttaagcttatctcttacgctccaggaatggatcagtcagaacatcaccaccggctcgcctcgaccgccgccgactggtgtttccgcctgcacggctggcctattatgccgccgttgttgggcgtctacgtcttcaccgaccggcttgccttcgccgccgccgactggtgtttccgcctgcacggctggcctttatgccgccgttgttgggcgtctacgtcttcaccgaccggccgcctcgaccgccgccgactggtgtttccgcctgaacggctggcctttatgccgccgttgttgggcgtctacgtcttcaccgaccggccgcctcgaccgccgccgactggtgtttccgcctgcacggctggcctattatgccgccgttgttgggcgtctacgtcttcaccgaccggccgcctcgaccgccgccgactggtgtttccgcctgaacggctggcctttatgccgccgttgttgggcgtctacgtcttcaccgaccggccgcctcgaccgccgccgactggtgtttccgcctgcacggctggcctttatgccgccgttgttgggcgtctacgtcttcaccgaccggccgcctcgaccgccgccgactggtgtttccgcctgcacggctggcctttatgccgccgttgttgggcgtctacgtcttcaccgaccggctgcctcgtctgccgccggctggtgcttccgcctgcacggctgacttattatgccgccgttgttgggcgtctacgtcttcaccgaccggccgcctcgactgccgccgactggtgtttccgcctgcacggctggcctattatgccgccgttgttgggcgtctacgtctttaccgaccggcttgccttcgtcgccgccgaccgatgtcctcgcctgcacggctggcctttatgccgccgttgttgggcgtctacgtcttcaccgaccggcttgccttcgccgccgccgactggtgtttccgcctgcacggctggcctctatgccgccgttgttgggcgtctacgtcttcaccgaccggcttgccttcgccgccgccgactggtgtttccgcctgcacggctggcctttatgccgccgttgttgggcgtctacgtcttcaccgaccggcttgccttcgccgccgccgactggtgtttccgcttgcacggctggcctttatgccgccgtagttgggcgtctacgtcttcaccgaccggcttgccttcgtcgccgccgactggtgtcctcgcctgcacggctggcctattatgccgccgttgttgggcgcctacgtcttcaccgaccggcttgcctttgtcgccgccgaccgatgtcctcgcctgcacggctggcctttatgccgccgttgttgggcgtctacgtcttcaccgaccggcttgccttcgccgccgccgactggtgtttccacctgcacggctggcctttatggaccggccgccgcatccgccgctgactgctaccactactgataaacatcatcgttttccgtcgccgactggttatgctgtcgccgactggtgcttttatcttcacaactgcgcgtcttcactaccggttcacttcattacggcaatacaactttgtcatcatggtggagcgacttcatctttattatcttcggcaccgggaaactctattgttgctacttcgcaagttttactacttcaccaaccacgacgtctttgtgaacctcgacatctcggcatgcaatgccatgttattttactacaacaagtggctctccaatattcaggatttctacttggacatcttcaacacatatcttcaatcaagcaatgactattcgacgacaagaagctacagttctcgactctatgttcagttgtttcccaac

SEQ ID NO: 23873 - DNA, 596 bp, Oryza sativa
  unsure (1)..(596): unsure at all n locations
  Clone ID: PAT_MRT4530_28910C.1
gcgcgcggccccccccctcccgccccccccccctgccgccgcctcccccggccccccccccccccccctcccccccccccgcccccccccccgccccccgcccccgctgccgccggcgctcccccacctccaggccccccgccgcggcttccacgtcgagctcggcgcacgcgagaaagcgcttttggaggaggatactgctctgaagaggtttaaatcatataagaacagtgtgaaacaggtctcaaaggttgggaatattcttaccggcgttgtcctttttgcctgcgcctatcagatcgttgcacttgcaaatagttaaaaatgaaggaatggacactcatgtgatcactcaaatccaccagaaagtgattcatcagcataaactgtcattttgtcagcactagttctgcacctcctgttttgatggtaccatataacataaaacaaactaggttaaccttctttggcaagatctttgtgctctcttggcctagtgtgacatgtanacagatgtatgcgatgaatgatcatcgcctttgttttcttttccttgacttagcacgctcaaagctcaataaaatggtttatctcgg

SEQ ID NO: 23874 - DNA, 361 bp, Oryza sativa
  unsure (1)..(361): unsure at all n locations
  Clone ID: PAT_MRT4530_28911C.1
ccacaaaaatgttggacgctctcttgagaggaggggaggaaccaccgggtcgttgaggactttgatgcgacgccatgcttgaggctgcgtgggcatttgacagaagggtggcgggaaggcacccatatgcgatgctgcaaggaatgagtgattgggttgtggtggtgcaacatagcccgccgctnactgctttggttttgctggatctgggtctggaaatggttaacggtgccctgagtggcaagggcaactggatgtgaaattgcattgtgtaacaatgatgcatgtataacatcattcgacctcgtattacgtagattgattatccccatgtgagacccaaaaaaaaaaaaaaaaaaaa

SEQ ID NO: 23875 - DNA, 313 bp, Oryza sativa
  unsure (1)..(313): unsure at all n locations
  Clone ID: PAT_MRT4530_28912C.1
cccacgcgtccgcccacgcgtccgcccacgcgtccgataattgggggtggagcagaatccgccattgctgccgctcgctctgcttcttcttcttcttcctcctccaactcctcctccgttgggacggcgacgagttgagtttgattctttgattgatttctcttctgattttcctcggtaggtgaggtcttcgaaatggtcgccatgatgtgttggtgctcatcttcctccttgattctaacgcctgcgtttcttggcgtgaagcgaanggggaggatgtggcgctctgccttctgcgattgaagctcgattc

SEQ ID NO: 23876 - DNA, 4488 bp, Oryza sativa
  Clone ID: PAT_MRT4530_28913C.1
cggacgcgtgggctagcccgtcggcgccgacgcctcctcctcgacgtcccctccattgctggcggcggagatgcagaaggtggtgagcctgacgagagggggagggggggagtgtcgtcgtcgcgggcggcgtcgatgtggtggagcacggacaacggggtgctcttgcggtcgagggcgtcgtcgaggggggaggaggacgacgacgacgaggaggcgctgcggtggacggcgctcgagaagttgcccacgtacgaccgggtgcgccgcgccgtcctgccggtggtggacgagggcggcggcggcggagggggatgggaggcggggaagaaggtggtggacgtgctcagcctcgacccgtaggagcggcgggcgctgctcgagcggctcgtgcgcgtcgccgaggacgacaacgagcgcttccttctcaagctcaaggagcgcatcgaccgggtggggattgatattccgacgatcgaggtgcggttcgagcacctggaggtggaggcggaggtccgcgtcggcaacagcggcctccccaccgtcctcaactccataaccaacaacctcgaggaggccgagaatgcgctggggattctacccaacaagaagcagaccatgcccatcctccacgtcgtcagtggcagcgtcaagcaccgcaggatgactctactgttaggaccgcccaggtctggcaagaccaccttgctacttgctttggctggaaggctcaaagacctcaagttctctggccaagtaacttacaacggacaccagatggaggactttgtgccacagaggactgctgcgtacatcagccaacatgaccttcatatcggggaaatgaccgttcgggagacactctcattctcggcgcgctgccagggtgttggaagccgctttgatatgttgaccgagctgacaaggcgagagaaggcggcaaatatcaagcctgatgctgatgttgatgcgtttatgaaggcttcagcaatggagggacaagagagcaatttgattactgactatatactaaagatattaggactggaaatatgtgctgacacgatggtaggagatgatatggtgaggggtatctccggtggacaacggaagcgtgtcaccacaggtgagatgcttgttgggccagccaatgcatttttcatggatgagatatcgactgggctcgatagctcaactacgttccagatcgtgaagtcactcaggcagaccatccacatccttggcggcacagcagtcatctcattgttgcagccagctcctgagacatacgacctatttgacgacatcatactcctctccgatggccatatcgtgtaccagggccctcgagagaatgtgctcgaattctttgagttgatggggttcaagtgccctgagaggaagggtgttgctgacttcttacaggaagtaacttccaggaaagatcagaagcagtactgggcgcagcatgacaagccctaccggtatgtgccaataaaggaatttgctagcgcattccagtccttccacactgggagaagtatagcaaacgagcttgccactccattcgacaagagcaaaagccatccggctgcattgaccacctcaaggtatggtgttagtgccatggaactgctgaaggcaaatatcgaccgggagttattgcttatcaagaggaattccttcgtctatatcttcagaaccatccagctgatgacggtgtcagcaatggcaatgactgtcttctttcgtacaaagatgcaccgtgattcagtggctgatggagtcatcttcatgggcgcactcttttttgcagtgatgatgataatgctcaatggcttatctgagctaccgttaaccatttttaagctgccagttttcttcaagcagagagacctcttattctttccagcatggacctacaccataccctcatggatcctcaagtccccaatgtcctttattgaagttggtgggttttgtttcatgtcgtactatgtgattgggtttgatccgaatgtaggcaggttcttcaagcagtatctgcttatgttagcagtcagtcagatggcagcagcactcttcagatttgttggcggggcagcacggaacctgattgttgcaaatgtctttggatcgttcatgttgctaatctttatggttctgggtggttttattctagcaagagataaagtgaataaatggtggatttggggctactggatatctccgatgatgtatgcacagaatgccgtctcagtgaatgagtttttggggcacagctgggacaaagtcttgaataattctctctccaacgagaccctaggcgtgcaagcccttatgtcccgtggaatcttccctgaagccaagtggtattggattggctttggtgcattgctcggattcatcatgctcttcaatattctctttactcttgcactaacatacctcaaacccgatggtaagtcccaaccatcaatatcagaagaggagctgaaggagaagcaagcaaacatcaatggtaatgttctagacgttgataccatggcatcaagtaataatttagcaatagtaggcagcaccggaactggttcagaaattgctgataattctcaacctacacaaaggggtatggttctcccctttaccccactttcactcactttcgaggacatcaaatattctgtcgatatgccacaggaaatgaaagcacatggaatagttgaggaccggttggaactccttaaaggtgtcagtgggtgtttcaggccaggagtgttgactgcacttatgggtgttagtggtgctggaaagactactctgatggatgtgttagcagggagaaaaacaggtggttacattgaaggcaacatctccatatcaggatacccaaagaaacaagagacgtttgcacgtgtatcaggatactgtgaacagaacgacatccactcacctcaagtgacagtctctgagtcactgcttttctcagcttggctccggcttcccaaggatgtagattcaaacacaagaaagatgttcattgaggaggtgatggagcttgtggagctcaagcctttgagagatgctttagttggtcttcctggagttaatggcctctcaattgagcagaggaagagactgaccattgccgtagagcttgttgctaatccttcaatcattttcatggatgagccaacttcagggcttgatgcccgagcagctgccattgtgatgaggacagtgagaaatactgtcaatactggtagaactgtggtatgcacgattcatcagcctagtattgacatatttgaagcatttgatgagcttttccttatgaagcgaggaggagaagaaatatatgttggcccattaggccatcattcttcagagctgattaagtatttcgaggggatccaaggagtcagcaaaattacagatggctacaatccagccacgtggatgttggaggtgacaacagtttctcaagaacaggcactggatgttgatttctgtgacatatacaggaaatctgaactctttcagaggaacaaggcattgatacaggaactgagcacaccaccgccaggttcaagtgaactatattttcctacacagtactcacagtctttcttaattcaatgcctggcatgcctgtggaagcagcacctgtcatactggaggaatcctccttacaatgccataagactatttttcactactgtcatagctctcatcttcggtaccatcttctgggaccttggtggtaaaatgggccagtcacaagacttgttcaacgccatggggtcaatgtatgctgcagtgctgtttattggcgtgctaaacggtcagtcagttcagccagtggtatcagtggagaggacagtcttttaccgtgaaagagctgctgggatgtattcagctctcccgtatgcatttgggcaggttgccattgaattcccgtacacacttgttcagtctgtcatatatagcatcatagtgtactcgatgattgggttccaatggacagtggctaaattcttctggtacctcttcttcatgttcttcacgctgctatacttcacattctacggcatgatggctgtgggcctaacaccaagctaccatgtcgcctcaatcgtctcctcggctttctatgccatctggaacctcttcaccgggttcgtcatctccagaccgctcaattccattttccctggaccgtgtgctcaggcaactccagtctggtggagatggtactgctggatatgccctgtagcatggacactatacgggctgattgtctcgcaatatggagatatcgtgacgccgatggatgatggcatacccgtgaatgtcttcgtggagaactattttgactttaagcacagctggctgggtttcgtggctgtggtgatcgtcgcattcaccatgttatttgccttcctgtttggctttgccatcatgaagctcaacttccagaagagatag

SEQ ID NO: 23877 - DNA, 608 bp, Oryza sativa
  Clone ID: PAT_MRT4530_28914C.1
ctatctgtgcctgactgttcgtggaggtaggtaggtagatggccggacatgggctgcccggtgtgatgtgtggggtgtggtgcctgtttcgtgctgctcgtcacgcactgggggcttcccatggtggagcatcccccggctacagcacacagccataacgtcgacttcgggcaagctgtgccgcaccaacggcaaaggccatgctgtgcggtgccaacaccctgcatgctgtgctgtgcgccgcctgtgcggccatgcctgcaccctgcggccctggccacctgccgacatgctacacccgggctgagctgactgactctgtgttgccaatgtgtgccatgccatgctgccctgtgaatgtgccctgcccccctgtgcaatttgcaccttgcgtgctgctgctgcctgactgcctgatggcaatgactgaatttgctgaggcttagctggcacctgtggtaacacaaggggaaatgattgactgcaactgtgactatgctgagcccgctactgcgtcagaaaactgttaagtcgattgagctcttctgttgaatctagctagtgaagaagtccatttcttgttgctgcaaaaaaaaaaaaaaaaaaaa

SEQ ID NO: 23878 - DNA, 2973 bp, Oryza sativa
  Clone ID: PAT_MRT4530_28915C.1
ttagcgatctcggtccaagtgtccaagtgacacccatttgccggtggcgcgcctttgggcccatggccatggcgcacatgcttggatgggccggcccgtcgctccacgcctcggatcaccactgtcttcgcccgcggcggcgcacgccgccgccggagcccctgccccctctcgggcggcgcggcggggaccggggctcaccgcggccatgcgctgttcttgctatccctctcgtcagtttgtgccctcaccctgatgatttccgtttcactagccttgcacttcttgtcttcttccactcaacaggttggcgctaggttttgccgattggggatgaactcgtgacgaaattgcaatgtggggctctctctcggtaatggattggagaagtgatgaacggcgagcttaaacttatggcttcctatgtgagcaagcttaagttcatcttgcaaaaagatcagcagcaggagccccatactgcgaaccttctagtcctacttgggagtagcaatcaggacaaaagaaatggcctctcacagggagaaaacagaatggacacttgtaccagaaagaagccaagaagataccaactcctcaccatgcaacaaaaagaaacgcttaatcgtgcatttcaatcatgtccgaaccctgatagaaatgacttgaagaagttggccaaggaactaaacatgactgagacccaaatcaaatattggttccagaactgcaggacaaagatgaagaaattcaagaacaatgaggagcgcaaactactgcagaaggagaatgaggagctgaagaaggagaatgcagagttgagaaataggatgaagaactcaacatgccgcgcttgtgacctccctttgttccatatagattgccgtcattgggagaatccaatgctcaacaagggtaatcatggcgttacaagtaatctcattcctcaggcagtgtcatccttgctccccagctcaagtggttttgtagcttcaggctccaatcttagtagcaatgctgtgctcatgcccgtatctgccatgccatcatcagttttgcagcctgctccagccgtctctggtgccaattttcccatcttgcacaatctatctgccaatgcaaatgatggctatacggaaaaaaacgtacttgatctggcgaaccgtgcaatggaagagttctttagtctaatgaaggagaatgagtctcttcttgtcaaaaaaaaggagaatgggcctctctggctcccacacatggatattctgggagtcgaatcacttaactaccaggaataccttgcaaaatccaggacgattggacaaaaacctgttgacttcaaagtggtcgtcaccagggacactgccattgtcaatggtagctgtgttgacctcgtcaaaagccttttggatgctaaccgctggagagagttgtttccaggcatcgtggcaagtgcaaacaccaccaagatcatctctactgggccctctaacttgcacgacgggttgcttcaattgaaaaatttgcagatgcgtgcagagctccaggtaatgtcacctgaagtcccagtttgcgatgtgacattcttgaggcagagtgtgcagtttggaagtggactgtggtgtgtggttgatgtgtctattgataccatccttcctggagagagtaaaacagctcagtccagtgtgcagaccagcagtacagctgccagacgcatggaagtcaggctgttgccatcaggctgtgttattgaagaaatggagaatggctattccaaggtgacctggatggtgcatgcagcttatgatgagagagcagtgccagtgctttatcattcacttctccgctctgcaaaagcccttggtgcgtgccgctgggtagcatcactccagagacacagccagttcctttccggcctgcacaaatacatcttttgtcctgacagcacaatgacagaagtggtgatgcgaagaaaagtcctgtacctggtgaagcagatgacgagcagcttcacaggcctatttgcgtcgatgtctaaggccacgctgcaagatggtgatgatactcacttcgcgcatcagatagttggtggtgcaacaggtgaacctgccggactgctgctgagcgccaccacaaccatatggctccccggcgtgaacccgaggcacgtgtatgaccacctgcgtgatgagcagtgccatggtgaatggcgctgcctcctcggtgagcagctgcatcagggcaatgccttgccgtatggtgcccccctgaatggtgagaccgtgccagagttctatcgcatggtgaacgggctgcatgaagggcatgctatctccctgatcagccccagagaaatgggtggtaacataagcaacactctgctcctgcaagaggcaagaactgatctttctggctccctcatagtttacgccaggacagatgtgaacaccgtgcattccatcatgaacagtggcctcaaccctgccaccgtcttcctcgtatcctctggatgtgccattcttcctgattgcctggaatcattccctctacacccagctgcaactgcagatcaggccggcacctccagtgccgctatcgctagcaggagcgaaaccggtgggtcattcgtcaccgtcacttaccagatgtttttcagcagccaaggtggcgcagcacctgccagctcatcaattcatcaaggccgtgatgcgctcaagaaagccaccgacattttcaaggtggtcctcgacactctcaccgtggcatagcgcaataccccaggggtagcatttgcatgcgaaagtgaaatccagatcgagttaaatttcagtgtttaagactatgttgtttctgttgttcaggggatggctttatctctgatagacccgtggatcatgctgtttaccttgtttaccattttcagactatcgatttgaaatgttgatcagacatttataataattggaactttgagacatc

SEQ ID NO: 23879 - DNA, 4583 bp, Oryza sativa
  Clone ID: PAT_MRT4530_28916C.1
atggatgcggcggcggagatgcagaaggtggtgagcctgaggagagggggaggggggtcgtcgtcgcggggggcggcgtcgatgtggtggagcgcggacaacggggtgttctcgcggtcgagggcgtcgtcgagtggggaggatggggaggacgacgaggaggcgctgcggtgggcggcgctcgagaagctgcccacgtacgaccgcgtgcgccgcgccgtactgccggtggtggaggagggcggcggcggaggggaggcggggaagaaggtggtggacgtgctcagcctcggcccgcaggagcggcgggcgctgctcgagcggctcgtgcgcgtcgccgaggacgacaacgagcgcttccttctcaagctcaaggagcgcatcgaccgggtggggattgatattccgacgatcgaggtgcggttcgagcacctggaggcggaggcggaggtccgcgtcggcaacagcggcctccccaccgtcctcaactccatgaccaacaagctcgagggagccgcgaacgcgctggggattctacccaacaagaagcagaccatgcccatcctccacgacgtcagcggcatcgtcaagccccgcaggatgactctgctgttaggacctcccgggtctggcaagaccaccttgctacttgctttggctggaaggcttggcaaagacatcaagttctctggtcaagtgacttacaatggacaccagatggaggattttgtgccacagaggacagctgcatacatcagccagcatgatcttcatattggggaaatgactgttcgggagacactctcattctcggcacgctgccagggtgttggaagccgctttgatatgctgaccgagctgtcaaggcgagagaaggcagcaaatattaagcctgatgctgatattgatgcgtttatgaaggcttcagcgatggagggacaagagaccaatttgattactgactatatactgaagatattaggactggatatatgtgcagacacgatggtaggagatgatatggtgaggggtatctccggtggacaacggaagcgtgtcaccacaggtgagatgcttgttgggccagccaatgcacttttcatggatgagatatcgactgggctcgacagctcaactacatttcagatcgtgaagtcgctcagacaggccatccacatcctcggtggcacagcagtcatctcgctgttgcagccagctccagagacatatgacctatttgacgacatcatactcctctctgatggtcagattgtataccaggggcctcgagagggtgtgctagaattttttgagttgatggggttcaaatgccctgagaggaagggtgttgcggacttcttacaggaagtaacttccaggaaagaccagaagcagtactggatgcagcatgacaagccctatcggtacgtgccagtcaaggattttgctagtgcattccagtcgttccacactgggaaaagtatagcaaacgaacttgctactccattcgacaagagcaaaaatcatccggctgcattgaccacctcgaggtacggtgtcagtgccatggaactgttgaaggcaaacatcgaccgggagttcttgcttatgaagagaaattccttcgtttatatcttcagagcctgccagctgatggtggtgtcggcaattgcaatgaccgtcttcttccgtacaaagatgcaccgtgattccgtgactgatggagtcatcttcatgggcgcactcttcttctcagtgatgatgataatgttcaatggtctatctgagctaccgctaaccatttttaagttgccagtcttcttcaagcagagagacctcttattctttccagcatggacctacaccataccctcatggatcctcaagatcccaatgtcctttattgaggtcggtgggtttgttttcatgtcatactatgtgattgggtttgatccgagtgcaggaaggttcttcaagcagtatctgcttatgttagcaatcaaccagatggcagcggcactcttcagattcgttggtggggcagcaaggaacatgatcgttgcgaatgtctttggatccttcatgttgctaatctttatggttctgggtggttttattctagtaagagagaaagtgaagaaatggtggatttggggctactggatctccccgatgatgtatgcacagaatgccatctcagtgaatgagtttttggggcacagctgggataaagtcttgaataattctctctccaatgagaccctaggcgtacaagcccttaggtcccgtggcgtcttcccggaagccaagtggtattggattggctttggtgcattgctcggattcatcatgctcttcaatggtctctttactcttgcactaacatacctcaaaccctatggtaagtcccaaccatcagtatctgaagaggagctgaaggagaagcaagccaacatcaatggtaatgttctagacgttgataccatggcatcaagtactaatctagcaatagttgacaacacggaaactagttcagaaattgctgataattctcaacctacacaaaggggtatggttctcccttttgctccgctttcactcactttcgacaacatcaaatactctgtcgacatgccacaggaaatgaaagcgcatggaatagttgaggaccggttggagctcctcaaaggtgtcagtgggtctttcaggccaggagtgctaactgcgcttatgggtgttagtggtgctggaaagactactctgatggatgtgttagcagggagaaagacaggtgggtacattgaaggcaacatcaccatatcaggatacccaaagaaacaagagacatttgcacgtgtatcaggatattgtgaacagaatgacatccactcaccgcaagtaacagtctcagagtcactgcttttctcagcttggctacggcttcccaaggatgtagattcaaacacaagaaagatgttcattgaggaggtgatggagcttgtggagctcaagcctttgagagatgctttagttggtcttcctggagttaatggcctctcaactgagcagaggaagaggttgaccattgccgtagagcttgttgctaatccttcaatcattttcatggatgagccaacttcagggcttgatgcccgagcagctgccattgtgatgaggacagtgaggaatactgtggatactggtagaactgtggtgtgcacaattcatcagcctagtattgacatatttgaagcatttgatgagcttttccttatgaagcgaggaggagaagaaatatatgttggcccgttaggccatcaatcttcagagctgattaagtattttgagggaatcaaaggagtcagcagaattaaagatggctacaatccagccacgtggatgttggaggtgtcaacaatttctcaagaacaggcattaggtgttgatttttgtgacatatacaggaaatctgaactcttccagaggaacaaggcattgatacaggaactgagcacaccaccaccagcatgcctgtggaagatgcacctgtcatactggaggaaccctccttacaatgccataagattatttttcactactgtcatagctctcctctttggcaccatcttctgggatcttggcggtaaaacgggcaagtcacaagacttgttcaatgccatggggtccatgtattccgcagtgctttttattggcgtcctaaactctcagtcagttcagccagttgtatcagtggagaggacagtcttttatcgtgaaagagctgctggcatgtattcagctttcccgtatgcatttggacaggttgccatcgaattcccgtatacactggttcagtctatcatatatggcatcatagtgtactcgatgattggttttaaatggacggcggctaaattcttctggtacctcttcttcatgttcttcacgtttctatacttcacattctatggcatgatggctgtgggcctgacaccaagctaccacgtcgcctcaatcgtctcatcggctttctatggcatctggaacctattctccgggttcatcatccccagaccgaaagttccaatctggtggagatggtactgctggatatgccctgtcgcgtggacgctgtacggtctggttgcctcgcagtttggagacattatgacgccaatggatgatggcactcccgtgaaaatcttcgtggagaactacttcgacttcaagcatagctggctgggggtggtggccgtggtgatcgtcgcattcaccatgttatttgccttcctctttggctttgccatcatgaagcttaacttccagaagagatagtgatgacaagggatattacattcattgagttgcaaacgctacctgaaatttgtgcatatcattggatctaaagaagttttttttgttgccattacaatattgtaaatcataccagcctttcccccttatttttatagaaagaatgcactactgttacacctagtaattttgttattaatacccttctttttatagaatagaacgtcctacttttattttttaattttttcagatataataatgtttcc

SEQ ID NO: 23880 - DNA, 195 bp, Oryza sativa
  Clone ID: PAT_MRT4530_28917C.1
atgaccgtgggcacggctgttcgaacagaacccggtttgtccgaccccaccccggcgttcccaactattggcatgcgaggtttccctgaaccgtctagttacttagccaggagagcacgaataccgaggtaccacaagggtggagcgacaaggattcagggtagtacgacctacagaaattggtgcgactactgg

SEQ ID NO: 23881 - DNA, 2175 bp, Oryza sativa
  Clone ID: PAT_MRT4530_28918C.1
ttatatatggtaatcgccccgcctatagcggtaatcgccccacctatagttatagtacccaaattctatcttgaacttccactcgggtaatatttccagaggagttgcaaacggatccgccggttcaccaatcattgacggctcgagaaccgctaaacgtgttgattggatatggagacacctttggtcgtgaattctaatgtggcagatccaactctctatcggaatcgcgtcaggcacacctgtcacaattttgactgcccaataaccaatttgatcccaaggtaaagaataaccagttacaccaaacgatgcagttaatacagctaaaaccacaccagtgacccaagttaattcgcggggttttttaaacccacgtggaggagggacgcgcggggggagcatccgatccggctccccctgccggacgcccggcaatgagcattttcgatataactggcttatggtaatgtcatcattcttgtcattctcatcgtatctatagttagctccaataacttgggactgcaagagagcagacagtcctgcgagctccaataacctgtgcttgatttcatcatctgccttgatctcagaaaccatgtctgtcttcctgggaggattgctacagtccctgtctctgctcttccgggcggcctgatccgggccatcttggggatgatacttctgctcggcaagaaacgagagcgccgcgacgacgtcgctgatcatcggcctgttgctggcatcctcctgcaagcacatggaggcgatcgcgagagcttggtaaagccccttgagggggaatttctcttccagcaacgggtcagccagtctcacgaatctcttcttgtccttgacgagaggtgccgcccattggacgagaacctgctcgtgcgtcggcctggaggtatcgatcgcccgcctgccggtgatgatctccagcagcacgacgccgaagctgtagatgtccgacgtcttggtgagcttgccggtcatggcgtactcgggggcgcagtagccgtacgtgcccatgacccgcgtgctgacgtggctcttgtcgccgacggggccgagcttggcgaggccgaagtcggacagcttggagttgaagtcctcgtccaggaggatgttggacgtcttgaggtcgcggtagatcaccggcgggttggccacctcgtgcaggtactcgatgcccttcgccgcgcccaccgcgatcttcatccgcgtttgccacgggagaggctttgcctttggagggagatctaggagatgatcctccagcgagccgttccgcatgcactcgtagacgaggattctctggtccatgtcggtgcagtagccgagcagcttgacgaggttggggtggtgcaggagactgagcatcagcacctccaccaggaactcgcggttcccctggaacccgtccttgtccagctgcttgacggcgacgatctcgttgatctcttcgaggtggcctctgtacaccctcccaaagccgccttccccgagcaggttgttcgggctgaaggagtcggtggcgttgcatagctgcctgtacgtgagcaccatgctggggatgttctggtgggtgatccgtagaatcccctcggctgcgtacacgttgcagacatctgacttggacgatatgtcgttcacgaggtcggccacggcgtcgttctcgtagcgcctgcagctggcgcgctcgctgccgtgctcggtggcggcggcgtcgccgtagtgatccttcttggccttcttcttcttcttcctccagaacctcttcttcctccacctcttcttatccggctcggagtccgccgccgaagtcgacgcttcctccttgccacggacaccggaagatccaatggcgctggcggacgagcagcgacaggtgcggccgccgcggaggagcgtcttgccgttgcagcatctcttcatcgccgatgtcaacaggtccatcgcgcgaatcgacgcgagagtggggaaacaccctcgagccgatccgcgggtgaaggccgggcgaatttgttgggatacttcaacagcgacgcgggccacaacttgtggacgggatccgttcttctttcctggaggtagctgggacttgggaggccaggatccaaatttggcaaagccattgtttgctgttcgatcggtcctgtgtgtctgcat

SEQ ID NO: 23882 - DNA, 333 bp, Oryza sativa
  Clone ID: PAT_MRT4530_28919C.1
agagagatagactcaaaggatttttaccaagaggttggacctcttactaagtttcctccaaaacctatacgcaaaaagtcaagtgtaaaactgttaacaaccaaatttggtaattcaagtatcggagatgaagataaaaccgaagcggaatccaagacggagatcgttctggaaacagagcaagaatcagttaaagtccgaatcagctaagatcagaatcggcagagttcgagtcggacaagagatatgttcgggaaaaagtctgccgtaaagacttatggtatcttagagtttgttatagataagagtcgtgtccgacatggacatattttg

SEQ ID NO: 23883 - DNA, 1118 bp, Oryza sativa
  Clone ID: PAT_MRT4530_2891C.1
ctactcctctttccatgaggacaacggaggggtctcacaatccttccaggtgttggccatctgagcgtaccagtcaccgtgcacatcagcagcagcagcgtaggattcgagctcagccatttcgtcccgagtgagctccagggacagagccccaacattctggtcgaaattctcgatcttcgtggtaccgggtatggggcaaacatcgtcccccttgtggtgaatccaagccagtgcgaactgcgcagccgtgcatcctttcctcatcgccatcgcattgacgcgatcgaatatcttggcattcttctcaaggttttctggttggaatctaggcagatttgtttccatccctataggagaccgcttaaggaagtcataaagatcatttctattttcacggccagccacttgattttcacgggtgggtgctagcagccacttgatttttacaggtaccagtgaccacatgtggtaacacgattttaccctgtacgaaaatcctctaccaagtgggctgtaagctactattccaattccaagttccctgcaagttggaattatatcttcttccacgtctctagaccataatgaccactcgagctgaactgcattgatagggtgtaccgcatgagcccttctgattgttgatgcagatgcttcacataacccaatatattttacctttccttcttcaactagttttttgagttcatcaatcatcatagcctctgtaggctgccctcgcacgccgcgcgcacgtacgacgggtccccgcggacgtcccgctttcagtcttcgaacgcgatgccgaacttggtggccagctcaaccttatcacgcacgccgccttgcagcgccttgcagagtaggagctcgttggtgtgggggccgtagatgtcggaggtgtcgaggagggtcacgccgtcggtttttggtgtggtgtattatttttttttttttttggttttttttttttttttttttttttttttttttttgttttttttttttttttttttcacatgtcacatatgatgatatctgagcttatttttaacttccgaaccactatactgttaaaacccacgcgtccgcggacgcgtgggcggacgcgtggg

SEQ ID NO: 23884 - DNA, 5976 bp, Oryza sativa
  Clone ID: PAT_MRT4530_28920C.1
atgtcgggccaagcgggggatgggaacgatggtggtaagggagctaatatcccttatgactatccctctacatctatatcttataatcccgaagatcccaccaaggaggacgacgagaacaagcacaagaacgctcaagccgctaatgcaatacttagcgccttgagtggaagcacggatagtgttcgtgagtccaagatggagatcctcaaggggcaatttgagagatttgtgatgttagatggtgagagcccaagcgacatgtacgaccggttgagcaagatcgtcaatgagatcaagggacttggctccaaggacatgaccgatgaggttgtggtcaagaagatggttcgagcaatcactccaaggaactttaccttggtgaccatcattcgtgagcgtccggactacaagactctcacacctcatgatttgctcggacgcatccttgcccatgacatgctcgtgcaagagtccaaggatgtcattcaatacatcaaccaaagctcaaccgcaagcatcaagaaggaagacttggctttgaaggcaaaggaagaagaagaagagaaccgcaagagcaagagcaaggcggagatcgatgatgaagagatggctctcttcgtcaagaagttcggcaaattcatgaggcgaagcggcttcttcaagggaggatcttccaagcactactctaacaagtcaagtggaagacactctgcaagagtgtgctacgtgtgcaaagagcccgggcacttcattgcggattgcccccacctcaaggatggttcccacatcaaggaagataagaagaaggatgagaagaaggagaagcacaagcatagcaagagcgaacattatggccaagctcaccttgggatgatctttggctccgactccaagtcaagctcaagtgatgaagaaggagttgccacgttcgccgtcaagccctcatcaccaccgagactcttcaactactcaagtgatgagaatgctaaggtaccttctcctcttaagtcatttaatgttgatcttgttagtgatgaggaggatgaggttgaggatgaggttatggatgacgaattgttcaagtccataactaaggaatccctaccacacttgagtgagttgcttgggagaattgaggaccaatatgtaactcttgagaggcaagagactttgctcattcatgagaaagagcggtctcatgaactcaagagtgagcttgctaaggagagagagaaaaatgaggcattggtacggctttacaagcaaaccaaagagtctcatgctaatcttgaggtggcgaacgctcaacttcaagagagagtggatggcttggacaaagcatacctcactcttgaagagaagttcaaaaccttaaagaatagtgtctctctccctagcgagccatcttgttctaaaattgtcccaagcaatgaaccatgtgtgagatgcaaagatattgatattgaagcttgtgctactaactctatttccttgagtgctttgcaaaagcaaaatgagaagcttatgggactccttcacaatggcttacttaagtgccatatggatagtaaggccctaaaggagtacctaggctatcaaagggacaacttctaccatcagggtcttgggtatgttcctccaccaaaagaaaaggtggacaagagtgtgctgatcaggaggccccaaggtcttagcaattttgttaaggccaaaagtatccttcctaatgattatgcttcacattgttcttttgatgcatcttatgttcttaggaagaatgctagttgtcgtgttgttgctaagtatgtaggcccaaggggcaagaatatttctatcaagagagtactttgggtgcctaagacacttgttactaacatgagaggacccaagcaaggaaaggttatgggattgggtaagattgcaatctctaatgatctttccattgccaacgttctcttggtaaaatctctaaactacaatcttttgtccgtttctcaattatgttctatgggttacaattgtctttttaccgatgttgatgtgaccgtctatagaaggaatgattcctcggtagtctttaaggatgtcctcaagggaaagctttaccttgtagatttttcctcaagtaaagccaaacatgagacatgcttagtggctaagtccaatacggggtggctttggcatcggaggctagcccatgttggtatgaggaatcttcacaagcttctaaagcacgatcacatccttggacaaacaaatgttcaatttgagaaagatagggtgtgtagcgcatatcaagccggcaaacaaattggagcacatcaccccgtcaagaatgtgatgaccactacaagaccattggagcttctccacatggacctcttcggaccaattgcttatctaagcattggaggtaacaaatatggtcttgttattgttgatgacttttcacgcttcacgtgggtgttctttttgcatgacaagagtgagacacaagctatcttcaagaagtttgcaagaagagcacaaaacgagttcgacctcaagatcaagaacattcgaagcgacaacggcaaggaatttaagaacactaagtgttacattcttaataagaaggctagatcctctaagttcgctcctaaagtggatgagggattcttgcttgggtatgggtcaaatgaatgcgcttaccgcgttttcaacaaaacctccggtattgttgagatcgcgcgtgatgtgacatttgaagaaactaatggctctcaagtagagcaagttgattctcatgtgttaggtgaagaggaggatccgagcgaagcaatcaaaagattggctcttggggacgtacgtcctagggagccacaacaaggagtctcttcctcaacacaagtggagccacctacatcaacccaagccaacgatccctctatctcaagcttggatcaaggtgaagaaggtgagcaagtgccaccctcaccgatcaacttagctcgcccaagaatccaccaaagtatccaaagagatcatcccaccgacaacatcttaggagacatcaacaagggagtatccactcgttctcgtattgcaaatttttgtgagcattactcgtttgtgtcttctcttgaacctctaagggtggaagaagctcttaatgatccggattgggtgatggcgatgcaagaggagttgaataatttcacccagaatgaagtgtggaatttggtggagcgagctcggcaaaatgtgattggcacaaagtggatcttccgcaacaagcaagacgaggccggggtcgtaataaggaacaaggcgaggttagtggcgcaagggttcacccaaatcgaaggattagatttcggtgaaacttttgcaccggtagctagacttgagtcgattcgcatattgcttgcttttgttactaacctcaattttaagctatatcaaatggatgtcaaaagcaccttcctcaacgggcctatgaacgagttggtatacgtggagcaaccaccgggcttcgaggatccgaagtatcctaaccgcgtgtacaagctccacaaggcactctacgggcttaagcaagcccctagagcttgtgaagagtttagtaggatgatgaccaaacgttttgagatgtccatgatgggtgaattgaagttcttcctcgtccttcaaatcaagcaactcaaggaaggaacttttatttgccaaacaaagtatttgaaggacatgcttaagaagtttggaatggagaacgccaagccaatccacactcccatgccatcaaatggccacctcgacttcaacgagcaaggtaaagacgtcgatcaaaaagtataccgttccatcattggctcacttctttacctttgtgcatctaggcccgatattatgcttagtgtgtgcatgtgtgcaagatttcaagccgctccgaaggagtgtcaccttgtggccatgaagagaattcttagatatttagtgcacacacctaaccttggtctttggtatcctaagggagcgaggtttgatctcattggctatgccaatgtggattatgccggatgcaaagtggataggaaaagcacatcgggtacttgccaattcttgggtaggtcccttgtttcttggtcttccaagaagcaaaactccgtcgtcctatccaccaccgaagcggaatatgtttcggcggggagttgttgtgctcaacttctttggatgaagcaaacattgagagactatggcctcaatgtatccaaaatcccactcctatgtgacaatgagagtgccattaagatagccaacaaccccattcaacactctcgaaccaaacatatcgatattcgccaccatttcttgagagatcattccataagaggcgacatagacatccaacatgtgagaaccgacaaacaattggcggatatctttaccaagcctctagatgaagctaggatgcctccccgcaagcaaacctcccacaagtccaagcgcccgagggatcgctctcccactccatcctctcatgatgattcggacagtgattggtccggtggagaagatgcggttcctcaggttgcgtgggtggctcggcggtctactcaagctcatggtggtggtggcgatggtgagggctcctctcgtcaaccgcaaacgccgccgcaccaacccaatgtccccattgggcctctccgcattcatacccccgagagggatccggcggtgattcaccaagtgtatgattggtggcgcaagtctgaggttgttgctcctcgtcgggatgaggatctgcgctcctttcgccgcaccgccacggatctgcggttttggaccctttttcagcaagacttttatgagtctgtgattaagtccaaaactcatcccactgttcccatgcaatggatcaattgggaggagttgcaggcacacaatgatccagtgattgactctgtgattgccaattgtgatctcatgggtatccgctccttcatgacgttgcagcaaaattggtgcaacgaggtcattgctcagttttatgccaccgtctactttgatcgttatcgtgccatgcactggatgactcaggggtcctggtattctgtttcttatcagcagttggctgagatctggggcttccgtcttcgttctttgctcaaccttgatgaccttcataatcttcaaattcttgccaacacagaattgcttcccctttatactccaaatgatccaaatgtggtgttgggcaaggtcgacggcctcaagccgtactttgcctacttgaaccggatgtttcgccggtcttttgtgcctaaggatggtgatgccagcagcattaaccacctctctaggaccgtgcttctccggtttgatccccctcctcatcgcttccatgtctatcactttgtgtgggaggagatccgcatggcttcaattcagtacaagaaggggttggtctatgcccctcacattatgtggatgatcgagactgtgactcagctccagtttcgccatgatgtgactcattctcagcttcagttgcgccttcttaaggccccccgctcctcagctgctcgggacataccctcctcttccactcagccgcctcctgctcctgagcgccctgcctctgtggctcgtcgtgagccgtctcccttattccgcattttgcggagtctttttggtctttgctccacggaggccaaaaagaaccaccgattgcggaattcggcaaagaaaacggctcgtgatgtcaagttcctcaaggcaaggtattatgaggaccaccacattgatatccctccttctcctccaggtttcgaggccgagcccgatgagccagaggatgaagagattgaggatccttttgccgggttgccttccgacttcgacttctttggatatggccatggctatggctatcctcctccacgcccttcgcttgagtcgtcatctcatcgtcctctctttttggtgtcttga

SEQ ID NO: 23885 - DNA, 2067 bp, Oryza sativa
  Clone ID: PAT_MRT4530_28921C.1
atgttggatgaatacaagacatcggaccgcttttgggccgaagccgtcaacaccgcatgccacgccatcaaccgcctctatcttcaccgccttcttaagaagactccctatgagcttcttaccggtaacaaaccaaatgtctcttactttcgtgttttcggtagtaagtgttacattcttaataagaaggctagatcctctaagttcgctcctaaagtggatgaggggttcttgcttgggtatgggtcaaatgaatgcgcataccgcgttttcaacaaaacctccggtattgttgagatcgcgcttgatgtgacatttgacgaaactaacggctctcaagtagagcaagttgactcacatgtgttaggtgatgaggaggacccgagcgaagcaatcaagaggttggctcttggggacgtacgtcctagggagccacaagaaggggcctcttcctcacacaaagtagagccacctacatcgacccaagccgacgatctctctacttcaagcttggatcaaggtgaagaaggtgagcatgtgccaccctcaccgatcaatctagctcgcccaagaatccaccaaagtattcaaagagatcaccccaccgacaacatcttaggagacatcaacaagggagtatccactcattctcgtattgcaaatttttgtgagcattactcgtttgtgtcttctcttgagcctctaagggtggaagaagctcttaatgatccggattgggtgatggcgatgcaagaggagttgaacaacttcacccggaatgaagtgtggactttggtggagcgacctcagcaaaatgtgattggcacgaagtggatcttccggaacaagcaagacgaagccggagtcgtagtaaggaacaaggcgaggatgatgaccaaacgttttgagatgtccatgatgggtgaattgaagttcttcctcggccttcaaatcaagcaactcaaggaaggaactttcatttgccaaacaaagtatttgaaggacatgcttaagaagtttgggatggagaatgccaagccaatccacactcccatgccatcaaataaccacctcgacttcaacgagcaagtgattggtccggggaagaggatgcggttcctcaggttgcgtgggtggctcggggcggcactctccctcctcggtggtccactcaagctcttggtggcggtggtgagggctcctctcatcaaccgcaaacgccgccacaccaacccaatgtccccattggctcatgatgatccggtgctcaactatgtgatttccaattgtgagctcatgggacttcgctccttcatgactttacagcaggattggtgcaacgaagtcattgctcaattttatgcaaccgccttctttgatggttttcgcgccattcactggatgactcatgggtcctgcattaaccacctctccaggactgtgcttctcaggttcgatccccctcctcatcgctttcatgtttatcacttcgtttgggcggaaatccgcatggcctccattcagtactggaaggggttggtctatgcccctcacattatgcggatgatcgagaccgtcactcagcttcagtttcgtcatgatgtgtctcattcccagcttcatttgcgccttgttaaggcctcccgctcttctcaggcaggcacctctgcagctggggacatcccctcctcttccactcagccgcctcctgcttgtgatcgtccatctcctgtggctcgtcgtgagccatctcccttgttccgcattttgcggagtctttttggtctttgctccgcggaggccaaaaagaaccgccgattgcggaatgcggcgaagaaaacggctcgcgacgtcaagtatctcaaggcgcggtatcatgaggaccaccacatcgatgtcccgccttcccctccgggctttgaggctgagcccgatgagcctgaggaggaacagctcgaggatccatttgttgggctgcctccggacttcgacttctttgggttcggccatggctatggctatcctcctcctcctccagaggatccccctcaggcgccctttgtttga

SEQ ID NO: 23886 - DNA, 586 bp, Oryza sativa
  Clone ID: PAT_MRT4530_28922C.1
actcaaactacaatggcaatgtaagtgcaggaacagtgttttaaattcataggatctatggtgccttgcagatgatctcagaatcactgggagaaactgaaaaaaatagaagtgattccaaattctagggatttcagctcttgggaccctgttctttctctggacactagggttggcccttttgctgtggatgtttttataatacaggcccacggaaggttagagtgtggccagcacctctgcaatacccagccatttgccctgctaccccaggttctagagcagtcaccttctttttagagtcatttcacagctcaggcctgaggctgtctgcggcgccggcccaagactttggagcccatgttgatgggcatgaagttgttcttaaacacgctcccagatctgctcagccagcctgccatcttgtgggtcacacagatggcagtgttgcaggatctctcctgggtggtgatgctgattttcaggatggagacaaagagaagcgctgtcagtgagagcctgagggcaggtgcttccccccaggactgaccatccgtggaaaattatagctctgagagggaccagt

SEQ ID NO: 23887 - DNA, 348 bp, Oryza sativa
  Clone ID: PAT_MRT4530_28923C.1
atggaagatcgccacgtgtgcagatgcggcgccgaccagcgagtccgtgggcgcggtccaggacgaaaggcgcagaactctctcgctgagcggtgggcccagggcggcatgggcggtgcatgcaggacgacggagatggaatacgcccacgcaaacaaaaccaggtgggcccactatcgaaaagcggtgggcccaccgtcttgccgctcgtgtggttttgtggggcccgcactggagctgcaagtgggggttggggtgtgtggccttgttgacttgccctctgcagcggcggatgaacagctaccagtggatgagtatacaaaaaccgaagaggatttcgcgaagtga

SEQ ID NO: 23888 - DNA, 3060 bp, Oryza sativa
  Clone ID: PAT_MRT4530_28924C.1
gacgtgacactaaaggagtacctaggctatcaaagggacaacttcaaccatgagggtcttgggaagaatgctagtggtcgtgttgttgctaagtatgtaggcccaaggggcaagaatatttctatcaagagagtactttgggtgcctaaggcacttgttactaacatgagaggacccaaacaagaatatgtctccggtggaagaagttgggtgattgatagtggatgcaccaatcacatgaccggagaagaatcaatgttttcatctcttgatccaaatggcacttcacaagataacatagtgttcggggacgatggaaagggaaaggttatgggattgggtaagattgcaatctctaatgatctttccattgccaacgttctcttggtaaaatctctaaactacaatcttttgtccgtttctcaattatgttctatgggttacaattgtctttttaccgatgttgatgtgaccgtctataaaaggaatgattcctcggtagtctttaagggtgttctcaagggaaagctttaccttgtggatttttcctcaagtaaagccaaacatgagacatgcttagtggctaagtccaacacggggtggctttggcatcggaggctagcccatgttggtatgaggaatcttcacaagcttctaaagcacgattacatccttggactaacaaatgttcaatttgagaaagatagggtgttctttttgcatgacaagagtgagacacaagccatcttcaagaagtttgcaagaagagcacaaaacgagttcgacctcaagatcaagaacattcgaagcgacaacggcaaggaattcaagaacacgtgcatcgagagtttccttgatgaagaaggcatcaagcatgagttctcagctccatattcacctcaacaaaatggagtagccgagaggaagaataggactgtcattgagatggcgaggaccatgttagatgagtacaagacatcggaccgtttttgggccgaagccgtcaacaccgcatgccacgccatcaaccgcctttatcttcaccgccttcttaagaagactccctatgagcttcttaccggtaacaaaccaaatgtctcttactttcgtgttttcggtagtaagtgttacattcttaataagaaggctagatcctctaagttcgctcctaaagtggatgagggattcttgcttgggtatgggtcaaatgaatgcgcataccgcgtcttcaacaaaacctccggtattgttgagatcgcgcgtgatgtgacatttgacgaaactaatggctctcaagtagagcaagttgactcacatgtgttaggtgaagaggaggacccgagtgaagcaatcaaaagggtggaagaagctcttaatgatccggattgggtgatggcgatgcaagaggagttgaacaatttcacccggaatgaagtgtggactttggtggagcgacctcggcaaaatatgattggcacaaagtggatcttccgcaacaagcaagacgaggccggggtcgtaataaggaacaaggccgagctatatcaaatggatgtcaaaagcgcctttctcaacgggcctatcaacgagttggtatacgtggagcaaccaccgggcttcgaggatccaaaatttcccaaccacgtgtacaagctccataaggcactatatgggcttaagcaagcccctagagcttggcataataatgatatttttgtgtgccaaatatatgtcgatgacattatatttggttctactaacaagtcttttagtgaagagtttagtaggatgatgaccaagcgttttgagatgtccatgatgggtgaatttaagttctcctccggtcttcaaatcaaccaactcaaggaaggaactttcatttgccaaccaaagtatttgaaggacatgctcaagaagtttgaaatggagaatgcgaagccaatccacactcccatgccatcaaatggccacctcgacctcaacgagcaaggtaaagacgtcgaccaaaagggaacgaggtttgatctcattggctatgccgatgcggattatgccgggtgcaaagtgaataggaaaagcacatcgggtacttgccaattcttgggatgcctcattgcaagcaaacttctcgcaagtccaagcgctctagggatcggtctcccactccttccccatcctctcatgaggactcggaccgtgattggtccgggcgagaagaagaggagaccggccctcaggtggccaatgttccccggggctcctctctcccacctcggcgctccactcatggggatgaagggtcctcgcggcagcctcgtgcttcctctggcgagggctcttctcgccaagctcacaccactgcgcctcctccggcgaggcttattggccccctcatgcttcatgctccctcacgccatcctcgccgagctgttcgtgactggcgccaaaagtctgacattgtggctgtggagcggaatcaggatcctcgctccatgccgcgcaccgcctctgatgacaggttctggacctctttccagcaagactacaatgcccatgcaatggatcgattgggaggctttggcgaccttggatgatcctgacctcaatgccgtcattggtgcttgtgagatgggggttcgcaatttcatgacccttcagcaagcttggtgcaaggagatcattgctcaattctatgccacagcctattttaatggtgatcgtgacattcattggatgactcagggctcgtggtattctatctcttatgaccagcttgccaatctgtggggttttaatgagaactggatgcggtacatgacccacttgcataacattgtgattcctcacaatcatgatttgcgccctctgtatcttcctggtggcaagttggggactactgaagggctgaagccttatcatatctatcaaaaccgcatccttaggcggaccttgactccaaaggatggtgatgctagcaacatcaaccatttctcccgctccatgctcctcaggttcaatcccccctgtcgtccctttcatgtctttctatttgtttggtag

SEQ ID NO: 23889 - DNA, 396 bp, Oryza sativa
  Clone ID: PAT_MRT4530_28925C.1
atgccgtctccgacgctgtggcgcaccagcttcggccgaacttcggcacttgtgaggaaactccggatcacggacctgctgttcccgctcagggatgacaaaggcgcaatggccgaggacgtagagctggtggacttgcaggcttctagggacgcagagccccgctcttccgccgggccgcctcctcctttcttccaggctcaccaactgcccctccctctcaatctcccatcagccacctccccctcccttctaagcttgggaagaaaagagaatgaagaagaggacactgatacgcgagccccctattttttacttaaatgtgagtcccacattttttttgaactaggacaccacattagcgaaaccaggcatccatactactatgggatctaa

SEQ ID NO: 23890 - DNA, 3450 bp, Oryza sativa
  Clone ID: PAT_MRT4530_28926C.1
atgtcgggtcaaacggggaatggcaaggatggtgataagggagctacgtttccttatgactatccctccgcatctacatcttatgtgagcacctatagcggcaaagctccgtacttcaatggtacggactatgccgcttggaaacataagatgaagatgcatttgaaatctattaaccctttgatttggagaatagtcgaaaaaggctatgttttgcataatcctgaggaacccaccaaggaggacgacgagaacgagcacaagaacgctcaagccgctaatgcaattcttagcgtcttgagtggaagtgagttcaaccgtgtggacggcattgagagtggcaaagtgatttgggacacgcttcggaatttgcatgaaggcacggatagtgttcgtgagtcaaaggtggagattctcaaggggcaatttgagtggtttgtgatgttggatggtgagagcccaagcgacatgtatgatcgattgagcaagatcgttaatgagatcaagggacttggctccacggacatgaccgatgaggttgtggtcaagaagatgtccaaggaggccatccaatacatcaaccaaacctcaaccacaatcatcaagaaggaagacttggcattgaaggcgaaggaagaagaagaagagagtcgcaagagcaagagcaaggcggagatcgatgatgaagagatggctctcttcgtcaagaagttcggcaagttcatgaagcaaagcggcttctttaagggaagttcgtccaagtattcctctaacaagtcaagtggaagacactccgcaagggagcctaaggtaccctctcccctcaagtcatttaatgttgatcttattagtgatgaggagaaagatgttgaggatgaggttatggatgacgagttgttcaaatccatagcaaaggaatccataccacacttgagtgagttgcttgggagaattgagaatcaatatgcaacccttgagaggcaagaggaattgctcattcgtgagaaagagtggtctcatgaactcaagagtgaactttctaaggagagagagagaaatgaggctttggtacggctttacaagcaaaccaaagagtctcatgctaatcttgaggtgacaaacgctcaacttcaagagagagtggatggcttggataaagcttacctctctcttgaagcgaagttcgaaaccttaaagaatagtgtctctctccctagcgaggcatcgtgctccaaaattgtcccaagcaataaaccatgtgtgaggtgcaaagatattgatattgaagcttgtgctactaactctacttctttgagtgctttgcaaaagcaaaatgagaagcttatgggactccttcataatggcctacttaagtgccatatggatagtaaggccctaaaggagtacctaggctatcaaagggactacttcaaccatgaaggtcttgggtatgttcctccacctaaaggaaaggaatatgtctccggtggaaaaagttgggtgattgatagtggttgcactaatcatatgaccggagaagaatcaatgttttcatctcttgatccaaatggcacttctcaagagaacatcatcttcggggacgatggaaagggaaaggtaattggattgggtaagattgcaatttcaaatgacctttccatttccaacatcctcttggtaaaatctctaaattacaatctattgtccgtttctcaattatgttccatgggattcaattgtctttttaccgatgttgatgtgaccgtatttagaagggatgattcctcggtagtctttaagggtgttctcaagggaaaactttatcttgtggatttttcctcaactaaagccaaacatgagacatgctcagtggctaagtccaacacgggatggctttggcatcggaggctagcccatgttggtatgaggaatcttcacaaatttctaaagcacgatcacatccttggactaacaaatgttcaatttgagaaagatagggtgtgtagtgcatgccaagccgggaaacaaattggagcacatcacccggttaagaacgtaatgactactacaagaccgttggagcttcttcacatggacctcttcgggccaattgcttatctaagcattggaggtaacaaatatggtcttgttgttgttgatgacttttcacgcttcacgtgggtgttcttcttgcatgacaagagtgagacacaagccatcttcgagaagtttgcaagaagagcccaaaacgagttcgacctcaagatcaagaacattcgaagcgacaacggcaaggagttcaagaacacgtgcatcgagagtttccttgatgaagaaggcatcaagcatgagttctcggctccatactcacctcaacaaaatggagtagccgagaggaagaatcggactctcattgagatggcgaggacaatgttggacaaatacaagacatcggaccgtttttgggccgaagccgtcaacaccgcatgtcactccatcaaccgcctctatcttcaccaccttcttaagaagactccctatgagcttcttaccggtaacaaatcaaatgtctgttactttcctgttttcggtagtaagtgctacattcttaataagaaggctagatcctcaaagtttgctcctaaagtggatgaggggttcttgcttgggtatgggtcaaatgagtgcgcataccgcgttttcaacaaaacctccggtattgttgagatcgcgcgtgatgtgatatttgacgaaactaacggctctcaagtagagcaagttgactcacatgtgttaggtgaagaggaggaccctagcgaagcaatcaaaaggttggctcttggagacatcgggaaagctgattcaactctttttactaaaagacattataatgatatttttgtgtgccaaatatatgtcgatgacattatatttggttctactgacaagtcttttagtgaagagtttagtaggatgatgaccaagcgttttgagatgtccatgatgggcgaattgaagttcttcctcggccttcaaatcaagcaactcaaggaaggaactttcatttgccaaacaaagtatttgaaggacatgctcaagaagtttgaaatggagaatgcgaagccaatccacactctcatgccatcaaatggccacctcgacctcaacgagcgaggtaaagatgtcgaccaaaaggtataccgttccatcattggctcactcatttacctttgtgcatctaggcccgatattatgcttagtgtgtgcatgtgttcaagatttcaagccgctccgaaggagtgtcaccttgtggccatgaagagaattcttagatatttagtgcacgcacctaatcttggtctttggtatcctaagggagcgaggtttgatctcattggttatgccgatgcagattatgccgagtttgatctcccttcatcctccttttag

SEQ ID NO: 23891 - DNA, 600 bp, Oryza sativa
  Clone ID: PAT_MRT4530_28927C.1
gcccggcggcacgagccactgcaaatgccacagcttcctttcctggttcccgatccctccctcgtcatcaagccaactccatcgttccatcatcaccaacatttgcagcaacactgtgaacaagctctagttgcatcagctatacgtgctactactatataaaactggcgccctagcttatacaggttcgcacaggcaacatatacatacgtgcgtgacgacgtgtagtactgcggtgagatcgatggtgcttccaaccatcctccccaagatagccgcgcactggctcttcaccttctaccgcgcggcacgtaagctccgcggccatgcgttccagtactgccgcagctcctccgccactactaccaagccgcctccgccgtcgcccgtctcgccagcggccaagtgcaccgtcgtcttccccgacgccgccgacaaggccgtggtgttcggcttcgacggcgcgctcatgaggtccgcggcgctcttcccctacttcatgctcgtcgcctgcgagggcggcagcctgctgcgcgcgctgctcctgctctgcgccttccctctcgtctgggccctgggcgagcgctccgacgccggcgt

SEQ ID NO: 23892 - DNA, 5226 bp, Oryza sativa
  Clone ID: PAT_MRT4530_28928C.1
atgtcgggccaaacgggggaaggcaaagatggtgataagggagctatatttccttatgactatccacctatatctacatcttatgtgagtacctatagcggcaaagctccgtacttcaatggtacggactatgccgcttggaagcataagatgaatatgcatttgaagtctattaacccatttatttggagaatagtcgaaaaaggctatgtgttgcagaatcccgaagatcccaccaaggaggacgacgagaacaagcacaagaacgctcaagccgctaatgcaatacttagcgccttgagtggaagtgagttcaaccgtgtggatggcattgagagtgccaaagtgatttgggacatgcttcggaacttgcatgaaggcacggatagtgttcgtgagtccaaggtggagatcctcaaggggcaatttgagagatttgtgatgttggatggtgagagcccaagtgacatgtacgaccggttgagcaagatcgtcaatgagatcaagggacttggctccaaggacatgaccgatgaggttgtggtcaagaagatggttcgagcaatcactccaaggaactctaccttggtgaccatcattcgtgaccgtccggactacaagactctcacacctcatgatttgctcggacgtattcttgcccatgacatgctcgtgcaagagtccaaggatgtcatccaatacatcaaccaaagctcaaccacaagcatcaagaaggaagacttggcattgaaggcgaaggaagaagaagaagagaatcgcaagagcaagagcaaggcggagatcgatgatgaagagatggctctcttcgtcaagaagttcggcaagttcatgaggcgaagcggcttcttcaagggagagcccggacacttcattgcggattgcccacacctcaaggatggttcccacatcaaggaagataagaagaagggtgagaagaaggatgagaagaaggagaagtacaagcatagcaagcgggaacattatggccaagctcaccttgggatgatcttcggctccaactccgagtcaagctcaagtgatgaagaaggagtcgcaacgttcgccgtcaagccttcatcaccaccgagactcttcgactactcaagtgatgaggatgctcccatttgcctcatggcaaaggagcctaagttaccttctcctctcaagtcatttaatgttgatcttgttagtgatgaggaggatgaggttgaggatgaagttatggatgacgaattgttcaagtccataactaaggaatccctaccacacttgagtgagttgcttgggagaattgaggaccaatatgcaactcttgagaggcaaaaggctttgctcattcgtgagaaagagcggtctcatgaactcaagagtgagcttgctaaggagagagaaaaaaatgaggctttggtggcgaacgctcaacttcaagatagagtggatggcttggacaaagcctacctctctcttgaagagaagttcgaaaccttaaaaaatagtgtctcttttcctagtgagccatcttgttccaaaattgtcccaagtaatgaaccatgtgtgagatgcaaagatattgatattgaagcttatgctactaactctatctctttgagtgccttgcaaaagcaaaatgagaagcttatgggactccttcacaatggcctacttaagtgccatatgggtagtaaggccctaaaggagtacctaggctatcaaagggacaacttcaaccatgagggtcttaggtatgttcctccaccaaaaggaaaggtggacaagagtgtgatgatcaagaggccccaaggtcttagcaattttgttaaggccaaaagtatccttcctaatgattatgcttcacattgttcttttgatgcatcttatgttcttagaaagaatgttagtggtcgtgttgttgctaagtatgtaggcccgaggggcaagaatatttctatcaagagagtactttgggtgcctaaggcacttgtcactaacatgagaggacccaagcaagaatatatctccggtggaagaagttgggtgattgatagtggatgcaccaatcacatgaccggagaagaatcaatgttttcaacacttgatccaaatggcacttcacaagataacatagtctttggggacgatggaaagggaaatgttatgggattgggtaagattgcaatctctaatgatctctccattgccaacgttctcttggtaaaatctctaaactataatcttttatccgtttctcaattatgttctatgggttacaattgtctctttaccgatgttgatgtgaccgtctatagaaggaatgattcatccgtggtctttgagggtgttctcaagggaaagctttaccttgtggatttttccccaagtaaagccaaacatgagacatgcttagtggctaagtccaacacggggtggctttggcatcggaggctagcccatgttggtaagaggaatcttcacaagcttctaaagcacgatcacatccttggactaacaaatgttcaatttgagaaagatagggtgtgtagcgcatatcaagccggcaaacaaattggagcacatcaccccgtcaagaatgtgatgaccactacaagaccattggagcttctccatatggaccttttcggaccaattgcttatctaagcattggaggtaacaaatatggtcttgttattgttgatgagttttcacgcttcacatgggtgttctttttgcatgacaagagtgagacacaagccatcttcaagaagtttgcaagaagagcacaaaacgagttcgacctcaagttcaagaacattcgaagcgacaacggcaaggagttcaacaacacgtgcatcgagagtttccttgatgaagaaggcatcaagcacgagttcttagctccatattcacctcaacaaaatggagtagccgagaggaagaatagaactctcattgagatggcgaggaccatgttggatgagtacaagacatcggaccggttttgggccgaagccgtcaacaccgcatgccacgccatcaaccgcctttatcttcaccgccttcttaagaagactccttgtgagcttcttacctgtaacaaacctaatgtctcttactttcgtgttttcggtagtaagtgttacattctaaataagaaggctagatcatctaagttcgctcctaaagtggatgagggattcttgcttgggtatggatcaaatgaatgcgcatactgcgttttcaacaaaacctccgatattgttgagatcgcgcgtgatgtgacatttgacgaaactaatggctctcaagtagacgcctttctcaacgggcctattaacgagttggtatacgtggagcaaccaccgggcttcgaggatccgaagtatcccaatcacttgtacaagctccacaaggcactctacgggcttaagcaagcccctagagcttggcccgatattatgcttagtgtgtgcatgtgtgcaagatttcaagccggtctgaaggagtgtcaccttgtggccatgaagagaattcttagatatttagtgcacactcctaaccttggtctttggtatcctaagggagctaggtttgatctcattggctatgccgatgcggattatgccgggtgcaaagtggataggaaaaacacatcgggtacttgccaattcttgggtaggatgcctccccgcaagcaaacctcccataagtccaagcgcccgagggaccgctctcccactccatcctctcatgatgattcagacggtgattggtccggtggagaggatgcggttcctcaggttgcgcggggggctcggggcggcaatcttccttctcggcggtctactcaagctcttggtggtggtggtgatggtgagggctcctctcgtcaaccgcaaacgccgccgcaccaacccaatgttcccattggccctctccgcattcatacccccgagagggatccggcggtgattcgtcacgtgtatgattggaggcgcaagtctgaggttgttgctcctcgccgcgatgaggatccacgctcccttcgccgcactgccacggatccgcggttttggactctttttcagcaagacttttatgagtctgtgatcaagtccaaagctcatcccactgttcccatgcaatggatcaattgggaggagttgcaggcgcacaatgattcggtgataaattctgtgattacaaattgtgatctcatgggtattcgctctttcatgactttgcagcaaaattggtgcaacgagatcattgctcagttttatgccaccgtctactttgatcattatcgtgccatgcactggatgactcagggatcctggtattctgtttcctatcagcagttggctgaaatttggggttttcgtcttcgctccttacttaaccttgatgacctgcataatcttcaaattcctgccaacactgagttactccctctttactctccaaatgatcctaatgtggtgttgggcaaggtcgatggtctcaagccgtactttgcctacttgaaccggatgtttcgccggtcctttgtgcctaaggatggtgatgctagcagcattaaccacctctctcggaccgtgcttcttaggtttgatccccctcctcatcgctttcatgtttatcactttgtgtgggaggaaatccgcatggcttccattcagtacaagaaggggttggtctatgcccctcacattatgcggatgatcgagactgtcactcagcttcagtttcgccatgatgtgactcattctcagcttcacttgcgcctagataaggccccccgctcctcagctgctcgggacatcccttcctcttccactcaggcacctcctgctcctgagcgccctgcccctgtggctcgtcgtgagccgtctcccttattccgcattttgcggagtctttttggtctttgctccgcggaggccaaaaagaaccgccggcggaattcggcgaagaaaacggctcacgacgtcaagttcctcaaggcaaggtattatgaggaccaccacattgatgtccctccttctcctccgggtttcgaggccgagcccgatgagccagaggaggaagcgattgaggatccatttgctgggttgcctcctaacttcgacttcttcggttatggccatggctatggctatcttcctccaccacctccagaggatcctcctcaggcgcccttcgcttga

SEQ ID NO: 23893 - DNA, 566 bp, Oryza sativa
  Clone ID: PAT_MRT4530_28929C.1
aaaatgattgtttttttattaaagggtttttattttaagggttggcacacaattgtaggcaacaccttataaataaggaacatgtaaccaagggggggtcaacaacaaccacaggaaaaaagttgaaagttgacaggggccatggagcaaaagaagggcattggcaaagacatattaaaaatgggcggcggcccgagaccagcacaaaaaactgggggcaggccaagaaaaatggggcaacgggggccaaaggggcactggggcaccaagccttgaaggtggaagcaacattggtgctgaaagagccccattggctggaaaaaaaacaaggggggggaacaacccaagcccaaggggggcaccagggcccgcctacacggatccatggggcccaagggtaaggggggggggaaaaactgaataggggggaaagcactaggggcacttgcaaaaagagcaattaaggcaaacagggcaaaaatctggccgggggaagcagccattgctggttctacaaaacaaggggaaaacaaaaatccaaagggggaaaacaatcggacgcgggg

SEQ ID NO: 23894 - DNA, 1693 bp, Oryza sativa
  Clone ID: PAT_MRT4530_2892C.1
atggcagaagtggccaatgtgggaacaaagtcgtccatcaataacaatgaagacaccagtcggcggcgacgaaggcggtcgacggtgaaagcgaagatgcccactaatggcggcataataggtcagccgtgtaagcggaaacaccagtcgacggcaacgaaggtgagccaacgattgagtttccccctgactgatttggatcaagtcagagaagaggaggttgaagaagtggtcgacggaaaggaagtgaaaactcccaaagcgaaaacgaagtcggcgacccatgaaattgattccatcgcgcttgttgatgggaaactcgacgcaacccctacctggcgcgccaactgtcgaaacatgaattcggcaataataaaagggggtagcgcacgagacctaaaagtggatggatgcggagacaaaggatttagacaggttcaggccctctcaatgagagcgttacgcttcacggttcacattttttatatacttcctccgtttcacaatggtaacagtaagcgagcagggttggtgggtgtgggcgtgtggcaaagcagagaggcggctaagcgcgggtcaaagctgagaacaacgccgacgagagacgagtcgtccgcgagtataaaagcggcgggggaggagagtggaggggtggatggaaagcgggttttgtctccaaaggaagagaccatacagttcatcatgtcaggaggatctggtgattcttccccttcatcagggcgggctagcttcagttctttgtcaggtgcttctggagaccttgctaagaagaaaacattcccagcgctgtttcacctctttcagcagggatttctacaatctggagaagtccatatatttgggtatgcaagatcaaatatttcggatgatggattaagagaacgcattcgtggatacctcaaaggagcttcagatgaacatatttcacaatttttgcaattaattaaatatgttagtggttcctacaatagcggggaaggatttgcatcattaaataacgccatttcagagaatgaaacttcgaagaacaacaaaccaggaagctcacgtagactattttatttggcattgcctccatcagtctacccctcagtatgcaaaatgataagatcatactgcatgaatccatcttctcattctggctggacaagggttattgttgaaaagccctttgggaaggacttggagtctgcagaggaactcagtgcccagcttggagagctgtttaatgaacaacagctgtacagaattgaccactatttaggaaaagaattggtccaaaatctgcttgtgcttcgctttgcaaaccgtttgttcctacctctttggaatcgtgataacattgctaatgtacagattgtattcagagaggactttgggactgaaggacgtggagggtactttgatcaatatggcatcattcgtgatatcattcagaaccatttgttgcaggtcttctgtttggtggctatggaaaagcctgtctctcttaagcctgagcacataagagatgaaaaagtcaaggttcttcagtcagtgacacctataaagcatgatgaggtggtccttgggcaatatgatggctacaaggatgactctacggtaccagatgactccaacacacctacttttgcatctcttgtattgagggtaaacaatgaaagatgggaag

SEQ ID NO: 23895 - DNA, 2184 bp, Oryza sativa
  Clone ID: PAT_MRT4530_28930C.1
atggtgatgcaagaggagttgaacaatttcacccagaatgaagtgtggactttggtggagcgacctcggcaaaatgtgattggcacaaagtggatcttacgcaacaagcaagacgaggccggggtcgtaataaggaacaaggcgagcgccttcctcaacgggcctatcaacgagttggtatacgtggagcaaccaccgggcttcgaggatccgaagtatcccaaccatgtgtacaagctccacaaggtactctacgggcttaagcaagcccctagagcttggtatgagtgtcttcgcaattttcttgtgaaaaacggctttgaaatcgggaaagccgattcaactctttttactaaaagacatgataatgatatttttgtgtgccaaatatatgtcgatgacattatatttggttctactaacaagtcttttagtgaagagtttaataggatgatgaccaaacgttttgagatgtccatgatgggtgaattgaagtttttcctcggccttcaaatcaagcaactcaaggaagaaactttcatttgccaaacaaagtatttgaaggacatgctcaagaagtttgggatggagaatgccaagccaatccacactcccatgccatcaaatggccacctcgacctcaacgagcaaggtaaagacgtcgatcaaaaggtatactgttccatcattggctcacttctttacctttgtgcatctaggcccgatattatgcttagtgtgtgcatgtgtgcaagatttcaagccgctccgaaggagtgtcaccttgtggccgtgaagagaattcttagatatttagtgcacacacctaaccttggtctttggtaccctaagggagcgaggtttgatctcattggctatgccgatgcggattatgccgggtgcaaagtggataggaaaagcacatcgggtacttgccaattcttggtgttcttcgcgttcttgaggatgcctccccgcaagcaaacctcccacaagtccaagcgcccgagggaccgctctcccactccatcctctcatgatgattcggacagtgattggtccggtggagaggatgcggtgcctcagggtgcgcgggtggctcggggcggcaacctccctcctctgcgatctactcctggtggtggtggtgatggtgagggctcctctcgtcaaccgcaaacgccgccgcaccaacccaatgtccccattgggcctctccgcattcatacccccgagagggatccgacggtgattcgcgaagtgtatgattggaggagcaagtctgaggttgttgctcctcgccgggatgaggatccgcgctcccttcgccgcaccgccacggatccacggttttggactctctttcaacaagacttttatgagtctgtgatcaagtccaaagctcatcccactgttcccatgcaatggatcaattgggaggagttgcaggcgcacaatgatcccgtgatagactctgtgattgcaaattgtgatctcatgggtattcgctccttcatgaccttgcagcaaaattggggtcctggtattctgtttcttatcagcagttggctgagatttggggcttccgtcttcgttctttgctcaaccttgatgaccttcataatcttcaaattcctgctccctctttacactccaaatgatcctaatgtggtgttgggcaaggtcgacggtctcaagccgtactttgcctacttgaaccggatgtttcgccggtcctttgtgcctaaggatggtgatgctagcagcactaaccacctctctaggaccgtgcttctcaggccccccgctcctcagctgctcgggacatcccctcctcttccactcagccgcctcctgctcctgagcgccctgcctctgtggctcgtcagtctttttggtctttgctccgcggaggccaaaaagaaccgccgattgcggaattcggcgaaaaaaacggctcatgacgtcaagttcgtcaaggcaaggtattataaggaccagcacattaatatccttccttctcctccgggtttcgaggccgagcccgatgagccagaggatgaagagattgaggatccatttgctgggttgcctcctaacttcgacttctttggatatggccatggctatggctatcctcctctaccacctccagaggatcctccccaggcgcccttcgcttga

SEQ ID NO: 23896 - DNA, 1200 bp, Oryza sativa
  Clone ID: PAT_MRT4530_28931C.1
atggcagcggaaaatggccatcgtggcagcggaatagcagctatcatgggaatcggcaaggccgtcccagctcatgtgttcccacagaagtcgttcccagattactatttcgacataagcaatagcaatcatatggtggatctaaaggccaagtttacaaaaatatccgccattgaagagtcactttcactagctgttcttagcctttcactcctcattacaatcacgcaggcgaagtgcgcatacaggtctgccagtggaaaaaatatggagctcgccaaccatggcgtgccacgcctcggagccgaggcggcgcgcgccgccatcgccgactggggcgggcgcgcctccgacatcacccacctcgtcttcgtcacgtccaccagcggctgcctccccggcgccgacttcgagctcctcggcctcctcggcctcccgccgtccaccaagcgcgccatggtgtaccaggccggctgctacggcggcggcaccgccctgcgcctcgccaaggacctcgccgagaacagccccggcgcgcgggtgctggtggtctgctcggaggtgatcgccctggtcctgagggggccctccgagtcccacgtcgggaacctcgtcggccaggccatcttcggcgacgccgcgggcgccgtcgtcgtcgggtcctgccccgccgccgccgccggcgagcgtgccatgttcgagatcgtgtcggcgtcgcaggaggtcgtgcccgggacgagggacgcggtggtgtcggagctgcgggaggaggggatcgtgttcaccctgcaccgggacgtgccgcggcagatcggagactccatcggccgcctggtggagcgcgcgctgctggcgcagcagcagccggccaacgccgccatcggcgccgctgacgccgcggcgccggacttgaacgggatgttctgggtggtgcacgccggcggcagggagatactggacaggatggagagcaagctgggcctgggaaaggagaagctcgaggcgtccagggccgtcatggcgcagtacggcaacacgcggagctcgtgcgtggtcctggtcatggaggagatgcggcggaggtcggaggaacgggggctgcgtacggcgggggaagggctagacatggggatgctcgtcggcttcggcccaggcctcaccgtcgagacaatcgtgctccgcgcgctgcccattaattaa

SEQ ID NO: 23897 - DNA, 507 bp, Oryza sativa
  Clone ID: PAT_MRT4530_28932C.1
aaacaaaaacaaaatccccggaaatggaaaaggggggatttaaaaaaaaaaaaggccccccaagggggggggaaataccaggaaaacttgaaagggggaagggcaaaaaacaaattttttcttccggggggggggggggccaccccccctggggggcttctcgggccctttggaggaaagaaaaaaaaaaattctttttgggatttggcccaccccccccagtcccaaagggggaaaaaaaccccttgggggaaccccaaaacttctcggaagggggggcccccttttggaaaacaagcggggaaaaccccttcccccggaccccgggaaaaaggaaattcccggggcgggggccaaaaaaaaaaatcaaaagggggcccccccccacaagggcccccttaattttattggggggaaaccttggatcaaaggccaaaaacaaaggggacaggccccccccaaacccccaaaacatttggaaaacgggataaatcccggggacggccc

SEQ ID NO: 23898 - DNA, 5496 bp, Oryza sativa
  Clone ID: PAT_MRT4530_28933C.1
atgaagatgcatttgaagtctattaacccatctatttggagaatagtcgaaaaaggttatgttttgcagaatcccgaagatcccaccaaggaggacgacgagaatgagcacaagaacgctcaagccgccaatgcaatacttagtgccttgagtggaagtgagttcaaccgtgtggatggcattgagagtgccaaaatcctcaaggggcaatttgagagatttgtgatgttggatggtgagagcccaagtgacatgtatgaccggttgagcaagattgtcaatgagatcaagggacttggctccaaggacatgaccgatgaggttgtggtcaagaagatggaagaagaagaagatagccacaagagcaagagcaaggaggagatcgatgatgaagaaatggctctcttcgtcaagaagtttggcaagttcatgaggcgaagcggcttcttcaagggaaattcttccaagcatcactccaacaagtcaagtggaagacattctgcaagagtgtgctacgtgtgcaaagagcccgggcacttcattgcggattgccctcacctcaaggatggttcccacatcaaggaagataagaagaagggtgagaagaaggatgagaagaaggagaagtataagcatagcaagcgggaacattatggccaagctcaccttgggatgattttcggctccgactccgagtcaagctcaagttatgaagaaggagtcgccacattcgccgtcaagccttcatcaccgccaagactcttcgactactcaagtgatgaggatgctcccatttgcctcatggcaaaggagcctaaggtaccttctcctcccaaatcatttaatgttgatcttgttagtgatgaggaggatgaggttgaggatgaggttatggatgacaaattgttcaagtccataactaaggaatctctaccacacttgagtgagttgcttgggagaattgaggaccaatatgcaactcttgagaggcaagaggctttgctcattcatgagaaagagcgatctcatgaactcaagagtgagcttgctaaggagagagagaaaaatgaggctttggcacggctttacaagcaaaccaaagagtctcatgctaatcttgaggtggcgaacgctcaacttcaagagagagtggatggcttggacaaagcatacctctctcttgaagagaagttcgaaaccttaaagaatagtgtctctctccctagcgaaccgtcttgttccaaaattgttccaagcaatgaatcatgtgtgagatgcaaagatattgatattgaagcttgtgctactaactctatttctttgagtgctttgcaaaagcaaaatgagaagcttatgggacttcttcacaatggcctacttaagtgccatatggatagtaaggccctaaaggagtacctaggctatcaaagggacaacttcaaccatgagggtcttgggtatgttcctccaccaaaaggaaaggtggacaagagtatgatgataaagaggccccaaggttttagcaattttgttaaggcaaaaagtatccttcctaatgattctgcttcacattgttcttttgatgcatcttatgttcttaggaagaatgctagtggtcgtgttgttgctaagtatgtaggaccaagggacaaaaatttttccatcaagagagttctttgggtgcctaaggcacttgtcactaacatgagaggacccaaacaagtgtgggaatatctctccggtggaagaagttgggtgatcgatagtggatgcacaaatcacatgaccggagaagaatcaatgttttgctcccttgatcctaatggctcttcgcaagagaacatagtcttcggggacgatggaaagggaaaagtaatgggattggagaatgtctcttactttcgtgttttcggtagtaagtgctacattcttaataagaaggctagatcctcaaagtttgctcctaaagttgatgaggggttcttgcttgggtatgtgtcaaatgaatgcgcataccgcgttttcaacaaaacctccggtattgttgagatcgcgcgtgatgtgacatttgacgaaactaacggctctcaagtagagcaagttgactcacatgtgttaggtgaagaggaggaccctagcgaagcaatcaaaagattggctcttggagacgtgcgtcctagggagccacaacaaggggtctcttcctcaacacaagtggagccacctacatcaacccaagccgacaatccctccacttcaagcttggatcaaggtgaagaaggcgagcaagtgccactctctccgataaatctagctcacccaaaaatccaccaaagtatccaacgagatcaccccaccgacaacatcttaggagacatcaacaagggagtatccactctttgcaaatttttggtggaagaagctcttaatgatccggattgggtgatggcgatgcaagaggagttgaacaatttcacccggaatgaagtgtggactttggtggagcgacctcggcaaaatgtgattagcacaaagtggatcttccgcaataagcaagacgaggccggggtcgtgataaggaacaaggcgaggttagtggcgcaagggttcacccaaatcgaaggattagatttcagtgaaacatttgcgccgatagctagacttgagtcaattcgcatattgcttgcttttgctactaacctcaattttaagctatatcaaatggatgtcaaaagcgccttcctcaacgggcctatcaacgagttggtatacgtggagcaaccaccgggcttcgaggatccaaaatatcccaaccacgtatacaagcttcacaaggcactctacgggcttaagcaagcccctagagcttggtatgagtgtctttgcaatttttttgtgaaaaatggctttgagatcgggaaagccgattcaactctttttactaaaaggcatgataatgatatttttgtgtaccaaatatatgtcgatgacatcatatttggttctactaacaagtcttttagtgaagagtttagtaggatgatgaccaaacgttttgagatgtccatgatgggtgaattaaagttcttcctcggccttcaaatcaagcaactaaaggaaggaaccttcatttgccaaacaaagtatttgaaggacatgctcaagaaatttggaatggagaatgcgaagcaatccacactcccatgccatcaaatggccacctcgacctcaacgagcaaggtaaagacgtcgaccaaaaggcccaatattatgcttagtgtgtgcatatgtgcaagatttcaagccgctccgaaggagtgtcaccttgtggccgtgaagagaattcttagatatttagtgcacacacctaatcttggtctttggtatcctaagggagcgaggtttgatctcattggttatgccgatgcggattatgccgggtgcaaagtggataggaaaagcacatcgggttcttgcaaattcttgggtaggtcccttgtttcttggtcttccaagaagcaaaactccgtcgccctatccaccgccgaagcggaatacgtttcggcggggagttgttgtgctcaacttctttggatgaagcaaaccttgagagactatggcctaaatgtgtccaaaatcccactcttgtgtgacaatgagagcgccattaagttagccaataaccccgtccaacattcccgaaccaaacatatagatattcgccaccatttcttgagagaccattccacaagaggcgacatagatatccaacatgtgagaaccgacaaacaattggcggatatcttcaccaagtctctagatgaagctaggttttgtgagttgagaaggtggtttccctccctcaactccttccaaatcactggttccccagtgattctcttggtggttcttgagtgtatcctcatgatcaggggtcagttcaagaatcaactttactctcgccgtgggtcaatgagttctcaaggtcgctctccctcttccaaggctcgtcatgctatacggcgtatgtccgaatcccgcaaagatgccattgacgcgcaagctcaagcctctgaccaagcagctcaagtggctaatgtggagtgtggtgctcctcttcctcttcgccgcagccgagtcagtggagaaggatcaagtgcacctgctagcaaagtaaggagaggcaatcctacggattcttctgagccgggtcacggtagtggttctcatgcaccatcctttgaggaagagattcagttagaagaggacattgccgctcagcaagctgctcaggaagaagggcctttctttatcactgctccctctagagatcctaattatcatcgaagagtcgtaaggtggaaccgcaagtggactgaagtggagaaagagtgtaagaaagatccctacaaatttcaacagttgtccactgatcctcggttttggaacctttttcagcaggattactatgagatagtgattgcacctaagaagggggctattcttatgcagtgggttgattggaagtatatggaggagttgcatgatccaattattgatgaagtcattgaagcttgtgctcggcaaaacttgaaggaactcatgggcttgcaatacccatgtgtcatatgccaagtttgctgccattttggggtttccggctccaatcgtgtcaagattcatgatgagaagcccatggacacaaattctcttcacttcttgtaccaagatgtggactatgagttaggcaccatcaaaggtctccttcccttctatgcctatctcaataagctcttgcgcaaaactcttaatcccaaggaaggtgatgctagcaacgtccttgcctatacaagaaatttgctttacaagatgaaggctcacccacagctctttgacgcctttgacttcatctttgaagaaatccggcttatctctatgatgcctaagcgaggacttagctatgggccttacattacgaagatgattgagattgtgtccaagaagaagtttcacaaggaggtggcacataccggttaccaagtccgtcccatcaaggctgctgttgtgccggctggacgaaccactcgtgcttcttctcgtgccggtcactccgctaccgtcaccaagccggactccaactcgtccttgaggttcttcaagtccatcttcaacttatgcaagaccatctcagttcggcaagccaaggaacgcagagcaaggaagaaggacactcgacggctcaagaacctccttcgcaacgcccatttgccgtgttctcccgatggttctgaggttgaggacagtggggaggatgtgattgaggacccttttgcagctgaggcaagctcctctcatgcggatcgtggcaaggctcctatggaggaagaagaagaggagaaggaaggtaatctatctcctttcgtgatggctagtcgaatcttgggcttttgtgtcttgttatgtgcaattatctattatccatgctcaaatgtgtga

SEQ ID NO: 23899 - DNA, 774 bp, Oryza sativa
  Clone ID: PAT_MRT4530_28934C.1
atgggtgactgggcgcgcgcccagtcgctcacgcgatcaagagggcaagcccccgaacatcgtcaacagaaacagcaagatgcacagaatagaaaactggaccaagaacataaacaacctcctgaaactaggcagcgcagaaggcgcgaatcgacagggagcagcggcgaagccgcgacgattgcaaccttgggtttcaccggactcaaccaaacttcaccatggatcgagttcgccattgaatctgaggagcttgagctcaacccaaatggcacacccagcgtggatgccactgcccggagacaaagaggaagaaggatcccagatccagccaccctgatgcaagcggacttgcacaaggtggagcagaagcaccagactcacaccaccgacgccgacgtaggccaaacggcgcgatcatcactgccaaaggcagcaacagcgcagccgcgggcaacgtcagcagccgccgccgccttgggccgcatccacgccgccgccaccgcagcggatcaccgcattctagccactgccgccgccgcagaccgcatccgagcagccgccgctgccgcggaccacctccgagccaccgcctccgctgcagaccgcttccaagccgccgccgtcgctgcgaactggatccgcgccaccaccgtcatcttcggtcgtattcgtgtcgccatcgccgagtttggctacatccgtaacgccgccgctgtctccaacctccataccacaccaacgagaagaaaaaacaggaagaacccgacctaa

SEQ ID NO: 23900 - DNA, 5724 bp, Oryza sativa
  Clone ID: PAT_MRT4530_28935C.1
atgtcgggccaaacgggggatggcaaagatggtgataagggagctacgtttccttatgactatccatccacatctacctcttatgtgagtacctatagcggcaaagctccatacttcaatggcacggactatgccgcttggaaacataagatgaagatgcatttgaagtctattaatccatctatttggagaatagtcgaaaaaggctatgttttgcagaaacccgaggatcccaccaaggaggatgacgagaacgaacacaagaacgctcaagccgctaatgtaatacttagtgccttgagtggaagtgagttcaaccgcgtggacgacattgagagtgccaaggtgatttgggacacgcttcggaatttgcatgaaggcacggatagtgttcgcgagtccaaggtggagatcctcaaagggcaatttgagaggtttgtgatgttggatggagagagcccaagcgacatgtatgaccatttgagcaagatcgtcaatgagatcaagggacttggctccaaggacatgaccgatgaggttgtggtcaagaagatggttcgagcaatcactctaaggaactctaccttggtaactatcattcgtgagcgtccggactacaagactctcacacctcatgatttgctcgggcgcatccttgcccatgacatgcttgtgcaagagtccaaggaggtcattcaatacatcaaccaaagctcaacgacaagcatcaagaaggaagacttggcattgaaggcaaaggaagaagaagaagagagccgcaagagcaagagcaaggaggagatcgatgatgaagaaatgactctcttcgtcaagaagtttggcaagttcatgaggcgaagcggcttcttcaagggaagttcttccaagcatcactccaacaagttaagtggaagacattccgcaagggtgtgctacgtgtgcaaagagcccggacacttcattgcggattgcccttacctcaaggatggttcccacatcaaggaagataagatgggcgagaagaaggatgagaagaaggagaagcacaagcatagcaagcgggaacgttatggccaagctcaccttgggaagattttcggctccgactccgagtcaagctcaagtgatgaagaaggaattgccacgttcgccgtcaagccttcatcaccaccgaggctcttcaactactcaagtgatgaggatgctcccatttgcctcatggcaaaggagcctaaggtaccttcctccctcaagtcattcaatgttgatcttgttagtgatgaggaggatgatgttgaggatgaggttatggatgaggaattgttcaagtccataaccaaggagtctctaccacacttgagtgagttgcttgggagaattgaggatcaatatgcaacccttgagaggcaagaggcattactcattcgtgagaaagagcggtctcatgaactcaagggtgagcttgctaaggagagagagaaaaatgaggctttggtacggctttacaagcaaaccaaagagtctcacgctaatcttgaggtgacgaatgctcaacttcaagagagagtggatggcttggataaagcttatctctctcttgaagagaagttcgaaaccttaaagaatagtgtctctctccctagcgaggcatcttgttccaaaattgttccaagcaatgaaccatgtgctaggtgtaaggatattgatattgatgcatgtgctactaactctacttccttgagtgccttgcaaaagcaaaatgagaagcttatgggactccttcacaatggcttgcttaagtgccatatgggtagtaaggccctaaaggagtacctaggctatcaaagggaccacttcaaccatgaaggccttgggtatgttcctccaccaaaaggaaaggtggacaagagtgtgttgatcaagaagccccaaggtcttagcaactttgttaaggccaaaagtatccttcccaatggtcatgcatcacattgtttttttgatgcatcttatgttcttaggaagaatgctagtggtcgtgtggttgctaaatatgttggacctaggggcaaaaatgtttccatcaagagagttctttgggtacctaaggcacttgtcactaacatgagaggacccaagcaagaatatcactccggtggaagaagttgggtgattgatagtggatgcacaaatcacatgaccggagaagaatcaatgttttcttcccttgatccaaatggctcttcgcaagagaacatagtcttcggggacgatggaaagggaaaagtaatgggattgggtaagattacaatctccaatgatctttccatctccaacgtcctcttgtctttaagggtgttctcaaggacaagcttttatcttgtggatttttcctcaactaaagccaaacataagacatgcttagtggctaagtccgacatggggtggctttggcatcggaggctagcctatgtcggtatgaggaatcttcacaagcttctaaagcacgatcacatccttggactaacaaatgttcaatttgagaaagataggatgtgtagtgcatgtcaagccgggaaacaaattggagcacatcacccggtcaagaacgtaatgactactacaagaccgttggagcttcttcacatggacctcttcgggccaattgcttatctaagcattggaggtaacaaatatggtcttgttattgttgatgacttttcacgcttcacgtgggtgttcttcttgcatgacaagagtgagacacaagccatcttcaagaagtttgaaagaagagcccaaaacgagttcgacctcaagatcaagaatattcggagcgacaacggcaaggagttcaagaacacttgcatcgagagtttccttgatgaagaaggcatcaagcatgagttctcagctccatactcacctcaacaaaatggagtagccgagaggaagaattggactctcatcgagatggcgaggacaatgttggacgaatacaagacatcggaccgcttttgggccgaagccgtcaacaccgcatgtcacgccatcaactgcctctatcttcaccgccttcttaagaagactgcctatgagcttcttaccggtgaagaggaggaccctagcgaagcaatcaaaaggttggctcttggagacgtacgtcctagggagccacaacaaggggcctcttcctcaacacaagtggagccacgtatatcgacccaagccgacaatccctctacttcaagcttggatcaaggtgaagaaggcgagcaagtgccacccgctccgataaatctagctcacccaagaatccaccaaagtatccaacgagatcaccctaccaacagcatcttaggagacatcaacaagggagtatccactcgttctcgtattgtaaatttttgtgagcattactcgtttgtgtcttctcttgaacctctaagggtaaaagaagctcttaatgatccggattgggtgatggcgatgcaagaggagttgaacaatttcacctggaatgaagtgtggactttggtggagcgatctcgtcaaaatgtgattggcacaaagtggatctttcgcaacaagcaagacgaggccggggtcgtgataaggaacaaggcgaggatgtattttagagtcgttttgggacgtgacaagatcgggaaagctgattcaactctttttactaagaggcataataatgatatttttgtgtgccaaatatatgtcgatgacattgtatttggttctactaacaagtcttttagtgaagagtttagtaggatgatgaccaagcgttttgagatgtccatgatgggtgaattgaagttcttcctcggccttcaaatcaagcaactcaaggaaagaactttcatttgccaaacaaagtatttgaaggacatgctcaagaagtttggaatggagaatgcaaagccaatccacactcccatgccatcaaatggccacctcgacctcaacgagcaaggtaaagacgtcgaccaaaagggagcgaggtttgatctcattggctatgccgatgcggattatgccgggtgcaaagtggataggaaaagcacatcgggtacttgccaattcttgggtaggtcccttgttttttggtcttccaagaagcaaaactccgtcgctctatccaccgccgaagcggaatacgtttcggcggggagttgtgctcaacttctttggatgaagcaaaccttgagagactatggcctcaatgtgtccaaaatcccactcctatgtgacaatgagagcgccattaagatagccaataatctcgtccaacattcccgaaccaagcatatagatattcgccaccatttcttgagagaccattccacaagtggcgacatagacatccaacattgtatcctcatgatcaagggtcagttcaagaatcaagtttactctcgccgtggatcaatgagttctcgaggtcgctctccctcttccaaggctcgtcatgctatacggcgtatgtccgaatcccgcaaagatgccattgacgcgcaagctcaagcctctgaacaagcagctcaagtggctaatgtggagcgaggtgctccccttactcctcgccgcagccgagtcaatggagaaggatcaagtgcacctgctagcaaagtgaggagaggcaatcctacgggttcttctgagcagggtcaagtatatgaggagttgcatgatccaattattgatgaagtcattgaagcttgtgcttggcaaaacttgaaggaactcatgggcttgcaatacccatggtgcaaagagatcatcgcacaattctatgccaccgtttactttgagccaatcaaagaaaagactattcattggatgacagatggcatcatatactcagtgacatatgccaagtttgctgccattttggggtttccggctcgctctcgcaccaatcatgtcaagattcatgatgagaagcccatggacacaaattctcttcacttcttgtaccaagatgtggactatgagttaggaaccatcaaaggtcttcgtcccttctatgcctatctcaacaagcttttgcacaaaactctctatcccaaggaaggtgatgctagcaacgtccttgcctatacaagaaatttgctttacaagatgaaggctcacccacagctctttgacgcctttgacttcatctttgaagaaatccggcttatctccatgatgccgaaacgaggacttggctatgggccctacataatgaagatgattgagattgtgtcaaagaggaagtttcacaaggaagtggctcacaccggttaccaagtccgtcccatcaaggctgctgctgtgccggctggacgaaccactcgtgcttcttctcatgccggtccctccactactgtcaccacgtcggactccaactcttccttgaggttcttcaagtctatcttcaacttatgcaagaccatctcagtttggcaagccaaggaacgcagagcaaggaagaaggacactcggcggatcaagaacctccttcacaacgccaatttgccatgttctcccgatggttctgaggttgaggacagtggggaggatgtgattgaggacccttttgcagctgaggcaagctcctctcgtgcggatcgtggcaaggctcctttggaggaagaagaggaggaggaaggtgactatgctgaggagtcaagtgaggaggatgaggattctgatgaagatgagtga

SEQ ID NO: 23901 - DNA, 576 bp, Oryza sativa
  Clone ID: PAT_MRT4530_28936C.1
atggcgacacgaatacgaccgaagatgacggtggtggcgcggatccagttcgcagcgacggcggcggcttggaagcggtctgcagcggaggcggtggctcggaggtggtccgcggcagcggcggctgctcggatgcggtctgcggcggcggcagtggctagaatgcgggtggctggatctgggatccttcttcctctttgtctccgggcagtggcatccacgctgggtgtgccatttgggttgagctcaagctcctcagattcaatggcgaactcgatccatggtgaagtttggttgagtccggtgaaacctacaccaaaatctacggctcaacagcaaatctccaatttgtgcaatttctatgaaggcgaccgaaggggattactggttcgtcaagcggtctgcatgctaaaggagacccaaggttgcaatcgtcgcggcttcgccgctgctccctgtcgattcgcgccttctgcgctgcctagtttcaggaggttgtttatgttcttggtccagttttctattctgtgcatcttgctgtttctgttgacgatgttcgggggcttgccctcttga

SEQ ID NO: 23902 - DNA, 3729 bp, Oryza sativa
  Clone ID: PAT_MRT4530_28937C.1
atgtcgggtcaaacggggaatggcaaggatggtgataagggagctacgtttccttatgactatccctccacatctgcatcttatgtgagcacctatagcggcaaagctccgtacttcaatggtacggactatgccgcttggaaacataagatgaagatgcatttgaaatctattaaccctttgatttggagaatagtcgaaaaaggctatgttttgcagaatcccgtggaacccaccaaggaggacgacaagaacgagcacaagaacgctcaagccgctaatgcaattcttagcgccttgagtggaagtgatttcaaccgtgtggacggcattgagagtgccaaagtgatttgggacacgcttcggagtttgcatgaagttacggatagtgttagcgagttcaaggtggagattctcaaggggcagtttgagcggtttgtgatgttggatggtgagagcccaagcgacatgtatgatcgattaagcaagatcgttaatgagatcaaggtacttggctctaaggacatgaccaatgaggttgtggtcaagaagatggttcgggcaatcactccaaggaactctaccttggtgaccatcattcgtgagcgtccggactacaagactctcacacctcatgacttgctcgggcgtatccttgcccatgacatgcttgagcaagagtccaaggaggtcatccaatacatcaaccaaacctcaaccacaagcattaagaaggaagacttggcattgaaggcgaaggaagaagaagaagagagtcgcaagagcaagagcaagagcaaggcggagatcgatgatgaagagatggctctcttcgtcaagaagttcgacaagttcatgaagcaaagcggcttcttcaaggaaagttcgtccaagtattcctccaacaagtcaagtggaagacactccgcaagggtgtgctatgtgtgcaaagagcccgagcacttcattgacgattgcccccacatcaaggattgcccccacttcaaggaagacaagaagaagcttgagaagaacgagaagcacaagcatagcaagcatgatcgctatggccaagctcaccttggggtgatcttcggctccgacttcgagtcaagctcaagtgatgaagaaggagttgccacattcgccgtcaagccttcatcaccaccgagactcttcaactactcaagtgatgaggatgctcccatttgcctcatggcaaaggagcctaaggtaccctctcccctcaagtcatttaatgttgatcttgttagtgatgaggaggaagatgttgaggatgaggttatggatgacgagttgttcaaatccatagccaaggaatccataccacacttgagtgagttgcttgggagaattgagaatcaatatgcaaaccttgagaggcaagaggaattgctcattcgtgagaaagagcggtctcatgaactcaagagtgaacttgctaaggagagagagaaaaatgaggctttggtacggctttacaagcaaaccaaagagtctcatactaatcttgaggtggcgaacgctcaacttcaagagagagtggatggcttggacaaagcttacctctctcttgaagagaagttcgaaaccttaaagaatagtgtctctctccctagcgaggcatcgtgctccaaaattgtcccaagcaacgaaccatgtgtgaggtgcaaagatattgatattgaagcttgtagtactaactctacttctttgagtgctttacaaaagcaaaatgagaagcttatgggactccttcataatggcctacttaagtgccatatgggtagtaaggcgctaaaggagtacctaggctatcaaagggacaacttcaaccatgaaggtcttgggtatgtttctccacctaaaggaaaggtggacaagagtgtgatgatcaagaatccccaaggtcttagcaactttgttaaggccaaatgtatccttcctaatgattatgcttctcattgttcttttgatacatcttatgttcttaggaaaaatgctaatggtcgtgctgttgctaaaagggatgactcatccgtagtctttaagggtgttctcgagggcaagctttatcttgtggattttttctcaactaaagccaaacatgagacatgcttagtggctaagtccaacatgaggtggctttggcatcggaggctaacccatgtcggtatgaggaatcttcacaagcttctaaagcacgatcacatccttggactaacaaatgttcaatttgagaaagataggagtgagacacaagccatcttcaagaagtttgaaagaagagcccaaaacgagttcgacctcaagatcaagaacattcgaagcgacaacggcaaggagttcaagaacactaagtgctacattcttaataagaaggctagatcctcaaagtttgctcctaaagtggatgaggggttcttgcttgggtataggtcaaatgagtgcgcataccgtgttttcaacaaaacctccggtattgttgagatcgcgcgtgatgtgacatttgatgaaattaacggctctcaagtagagcaagttgactcacatgtgttaggtgaaggggaggaccctaacgaaacaatcaaaagggtggaagaagctcttaatgatccggattgggggatggcgatgcaagaggagttgaacaacttcacccggaatgaagtgtggactttggtggagcgacctcggcaaaatgtgattggcacaaagtggatctttcgcaacaagcaagacgaggccagggtcgtgataaggaacaaggcgaaattagtggcgcaagggttcacccaaatcgatggattagatttcggtgaaacttttgcgccggtagctagacttgagtcaattcgcatattgcttgcttttgctactaacctcaattttaagctatttcaaatcgatgtcaaaagcgtcttcctcaacgggcctatcaacgagttggtatacgtggagcaaccactgggcttcgaggatccaaaatatcccatcaacgtgtacaagctccacaaggcactctacggtcttaagcaagcccctagagcttggtatgagtgtcttcacaattttcttgtgaaaaacggctttgagatcgggaaagccgattcaactctttttactaaaagatatgataatgatatttttgtgtgccaaatatatgtcgatgacattatatttggttctactaacaagtcttttaatgaagagtttagtaggatgatgaccaagcgttttgagatgtccatgatgggtgaattgaagttcttcctcggccttcaaatcaagcaactcaaggaaggaactttcatttgccaaacaaagtatttaaaggacatgctcaagaagtttggaatggagaatgcgaagccaatccacactcccatgccatcaaatggccacctcgacctcaacgagcaaggtaaagacgtcgaccaaaaggtataccgttccatcattggctcactcctttacctttgtgcatctaggcccgatattatgcttagtgtgtgcatgtgtgcaagatttcaagccgctctgaaggagtgtcaccttgtggccatgaagagaattcttagatatgtgcacacacctaatcttggtctttggtatcctaagggagcgagttttgatctcattggttatgccgatgcggattatgccgggtgcaaagtggataggaaaagcacattgggtacttgctaa

SEQ ID NO: 23903 - DNA, 370 bp, Oryza sativa
  unsure (1)..(370): unsure at all n locations
  Clone ID: PAT_MRT4530_28938C.1
gcagaagcagaactacgtgttggcatccatataatggtaaaattcgaacagaaaaaacaaaatctgtacaagcaatcacaaatcctaacccaaaataaaccctatccaaaactacagtgcagctattttcttcaagaaacacacactgggcaagaattcacaagccatacaagctgttcgtctgatccatggatggatcacgacttgaacgagctgtttgagcttcccatggacttgaggtccttgtacggccccgacgacgtcagctcctgctccatccccccggcgcgccgccgncgncgncgtttttgccacagccggtgacccacgtacgctccggcgacggccaggctcgccaggatcagcgaca

SEQ ID NO: 23904 - DNA, 5856 bp, Oryza sativa
  Clone ID: PAT_MRT4530_28939C.1
atgtcgggccaagcgggggatgggaacaatggtgataagggagctaagatcccttatgactatccctccacatctacatcttatgtgagtacctatagcggcaaagctccgtacttcaatggtacggactatgccgcttggaagcataagatgaagatgcatttgaagtctattaacccatctatttggagaatagtcgaaaaaggctatgttttgcagaatcccgaagatcccaccaaggaggacgacgagaacgagcacaagaacgctcaagccgctaatgcaatacttagcgccttgagtggaagtgagttcaaccgtgtggatggcattgagagtgccaaagtgatttggtacacgcttcggaacttgcatgaaggcacgtatagtgttcgtgagtccaaggtggagatcctcaaggggcaatttgagagatttgtgatgttagatggtgagagcccaagcgacatgtacgaccggttaagcaagatcgtcaatgaaatcaagggacttgactccaaggacatgaccgatgaggttgtggtcaagaagatggttcgagcaatcactccaaggaactctaccttggtgaccatcattcgtgagcgtccggactacaagactctcacacctcatgatttgctcggatgcatccttacccatgacatgctcgtgcaagagtctaaggatgtcatccaatacatcaaccaaagctcaaccgcaagcatcaagaatgaagacttggctttgaaggcaaaggaagaagaagaagagaaccgcaagagcaagagcaaggcggagatcaatgatgaagagatggctctcttcgtcaagaagttcggcaagttcatgaggcgaagcggcttcttcaagggaggatcttccaagcactactccaacaagtcaagtggaagacactccgcaaaagtgtgctacgtgtgcaaagcgcctggacacttcattgtggattgcccccacctcaaggatggttcccacatcaaggaagataagaagaagagtgagaagaaggatgagaagaaggagaagcacaagcatagcaagagggaacattatggccaagctcaccttgggatgatcttcggctccgactccgagtcaagctcaagtgatgaagaaggagtcgccacgtttgccgtcaagccttcatcaccaccgagactcttcgactactcaagtgatgaggatgctcccgtttgcctcatggcaaaggagcctaaggtaccttctcctcacaagtcatttaatgttgatcttgttagtgatgaggaggatgaggttatggatgacgaattgttcaagtccataactaaggaatccctaccacacttgagtgagttgcttgggagaattaaggaccaatatggaactcttgagaggcaagagagtttgctcattcgtaagaaagagcggtctcatgaactcaagagtgagcttgctaaagagagagagaaaaatgaggcattggtacgactttacaagcaaaccaaagagtctcatgctaatcttgaggtggcgaacgctcaacttcaagagagagtggatggcttggacaaagcatacctcactcttgaagagaagttcgaaaccttaaaaaatagtgtctctctccctagcgagccatcttgttccaaaattgtcccaagcaatgaaccatgtgtgagatgcaaagatattgatattgaagcttgtgctactaactctatttccttgagtgctttgcaaaagcaaaatgagaagcttatgggactccttcacaatggcctacttaagtgccatatgggtagtaaggccctaaaggagtacctagactatcaaagggacaacttcaaccatgagggtcttgggtatgttcctccaccaaaaggaaaggtggacaagagtgtgatgatcaagaggccccaaggtcttagcaattttgttaaggccaaaagtatcattcctaatgattatgcttcacattgttcttttgatgcatcttatgttcttaggaagaatgctagtggtcgtattgttgctaagtatgtaggcccaaggggcaagaatatttctatcaagagagtactttgggtgcctaaggcacttgttactaacatgagaggacccaagcaagaatatgtctccggtggaagaagttgggtgattgatagtggatgcacaaatcacatgactggagaagaatcaatgttttcaactcttgatccaaatggcacttcacaagataacatagttttcggggacaacggaaagggaaaggttatgggattgggtaacattgcaatatctaatgatctttccattgccaacgttctcttggtaaaatctctaaactacaatcttttgtctgtttctcaattatgttctatgggttacaattgtctttttaccgatgttgatgtgaccgtctatagaaggaatgattcctcggtagtctttaagggtgtcctcaagggaaagctttaccttgtggatttttcctcaagtaaagccaaacatgagacatgctttgtggctaagtccaacacggggtggctttggcatcggaggctagcccatgttggtatgaggaatcttcacaagcttctaaagcacgatcacatccttggactaacaaatattcaatttgagaaagatagggtgtgtagcacatgtcaagccggcaaacaaattggagcacatcaccccgtcaagaatgtgatgaccactacaagactattggagcttctccacatggacctcttcggaccaattgcttatctaagcattggaggtaacaaatatggtcttgttattgttgatgacttttcacgcttcacgtgggtgttctttttgcatgacaagagtgagacacaagctatcttcaagaagtttgcaagaagagcacaaaacgagttcgacctcaagatcaataaggctagatcctctaagttcgctcctaaagtggatgagggattcttgcttgggtatgggtcaaatgaatacgcataccgcgttttcaacaaaacctccggtattgttgagatcgcgcgtgatgtgacatttgacgaaactaatggctctcaagtagagcaagttgactcacatgtgttaggtgaagaagaggatccgagcgaagcaatcaaaagattggctcttggggacgtacgtcctagggagccacaacaaggagcctcttcctcaacacaagtggagccacctacatcaacccaagccgacgatccctctatctcaagcttggatcaaggtgaagaaggcgagcaagtgccaccctcaccgatcaacttagctcgcccaagaatccaccaaagtatccaaagagatcatcccaccaacaacatcttaggagacatcaacaagggagtatccactcgttctcgtattgcaaatttttgtgagtattactcgtttgtgtcttctcttgaacctctaagggtggaagaagctcttaatgatccggattgggtgatggcgatgcaagaggagttgaacaatttcacccggaatgaagtgtggactttggtggagcgacctcggcaaaatgtgattggcacaaagtggatcttccgcaacaaacaagacgaggccggggtcgtaataaggaacaaggcgaggttagtggcgcaagggttcacccaaatcgaaggattagatttcggtgaaacttttgcgccgcgccttcctcaacgggcctatcaacgagttggtatacgtggagcaaccaccgggcttcgacacgtgtacaagctccacaaggcactctatgggcttaagcaagcccctagagcttggtatgagtgtcttcgcaattttcttgtgaaaaacggctttgaaatcgggaaagccgattcaacccttttcactaaaagacatgataatgatatttttgtgtgccaaatatatgtcgatgacattatatttggttctactaacaagtcttttagtgaagagtttagtaggatgatgaccaaacgttttgagatgtccatgatgggtgaattgaagttcttcctcggccttcaaatcaagcaactcaaggaaggaactttcatttgccaaacaaagtatttgaaggacatgcttaagaagtttgggatggagaacgccaagccaatccacactcccatgccatcaaatggccacctcgacctcaacaagcaaggtaaagacgtcgatcaaaaggtataccgttccatcattggctcacttctttacctttgtgcatctaggcccgatattatgcttagtgtgtccatgtgtgcaagatttcaagccgctccgaaggagtgtcaccttgtggccgtgaagagaattcttagatatttagtgcacacacctaaccttggtctttggtatcctaagggagcgaggtttgatctcattggctatgccgatgcggattatgccgggtgcaaagtggataggaaaagcacatcgggtacttgccaattcttgggtaggatgcctccccgcaagcaaacctcccacaagtccaagcgcccgagggatcgctctcccactccatcctctcatgatgattcggacagtgattggtccggtggagaggatgcggttcctcaggttgcgcgggtggctcggcggtctactcaagctcatggtggtggtggtgatggtgagggctcctctcgtcaaccgcaaacgccgccgcaccaacccaatgtccccattgggcctctccgcattcatacccccgagagggatctggcggtgattcgccaagtgtatgattggcggcgcaagtctgaggttgttgctcctcgtcgggatgaggatccgcgctcccttcggcgcaccgccacggatccgcgtttttggaccctctttcagcaagacttttatgagtctgtgattaagtccaaagctcatcccactgttcccatgcaatggatcaattgggaggagttgcaggcacacaatgatccggtgattgactctgtgattgccaattgtgatctcatgggtatccgctccttcatgacgttgcaccaaaattggtgcaacgagctcaaccttgatgaccttcataatcttcaaattcctgccaacacagaatttcttcccctttacactccaaatgatccaaatgtggtgttgggcaaggtcgacggcctcaagccatactttgcctacttgaaccggatgtttcgccggtcttttgtgcctaaggatggtgatgctagcagcattaaccacctttctaggaccgtgcttctccggtttgatccccctcctcaccgcttccatgtctatcactttgtgtgggaggagattcgcatggcttcaattcagtacaagaaggggttggtctatgcccctcacattatgcggatgatcgagactgtgactcaactccagtttcgccatgatgtgactcattctcagcttcacttgcgccttcttaaggccccccgctcctcagctgctcgggacataccctcctcttccactcagccgcctcctgctcctgagcgccctgcctctgtggctcgtcgtgagccgtctcccttattccgcattttgcggagtctttttggtctttgctccgcgaaggccaaaaagaaccgccgattgcggaattcggcgaagaaaacggctcgtgatgtcaagttcctcaaggcaaggtattatgaggaccaccacattgatatccctccttctcctccgggtttcgaggccgagcccgatgagccagaggatgaagcgattgaggatccttttgctgggttgccttccgattttgacttctttggatatggccatggctatggctatcctcctccaccccctccagaggatcctcctcaggcgcccttcgcttga

SEQ ID NO: 23905 - DNA, 699 bp, Oryza sativa
  Clone ID: PAT_MRT4530_2893C.1
atgacgaaatccaccaatcatgaagatgacgatgtcggtgatccagtcaatagcggtgtaattgccgatgataatgacgaagacgctcatcagcacgagacgaccagcgatgaagatggtaaggccaatcaacactggcagaatcatgcagtcatggaagtgaagaaaccagtcggcagccatggcaaacgcggtgacaccagtcagcggcggatgcggcggccggtcggtgaagacgtagacgcccaacaacggcggcataaaggccagccgtgcaggcggaagcaccagtcggcggcggtcgaggcgtccgtcggcggcggcgaaggcaagccggtcggtgaagacgtagacgcccaacaacggcggcataaaggccagccgtgcaggcggaaacaccagtcggcggcggcgaaggcaagccggtcggcggaaacaccagtcggcagcggcgaaggcaagccggtcggtaaagacgtagacgcccaacaacggcggcataaaggccagccgtgcaggcggaaacaccagtcggcggcggcgaaggcaagccggtcggcggaaacaccagtcggcagcggcgaaggcaagccggtcggtaaagacgtagacgcccaacaacggcggcataaaggccagccgtgcaggcggaaacaccagtcggcggcggcgaaggcaagccggtcggtgaagacgtag

SEQ ID NO: 23906 - DNA, 237 bp, Oryza sativa
  Clone ID: PAT_MRT4530_28940C.1
atggccatctatacccttcccctcttcctctctctccacacacactctctctctctcacggggtccggcggtgacggcgcggaggagccgccgcgggggcgttgtccttcgtcacggccagtgttcgcgcacaacgcgcgcgtggtggccgcggcggcgttcatgctcgacctcgggggcctcctggtgttcgccgtgctgcattggccttgcctgtgcgtgctattgggggattga

SEQ ID NO: 23907 - DNA, 420 bp, Oryza sativa
  Clone ID: PAT_MRT4530_28941C.1
atggcggcgacgctccggctcaggctcctcgccgcggcggcggccgccgccgtcatggcgtcgtccatgaatgacttacattgtgaaactgatgaagtcacaagcagcactaatccgtggaaatccaatgtaaaccaatcaattgcaactgcatttatatataagaggtatccaaaggcaagggcggtcaaggacgcggcggcggcggcggcggcggcgaaggccggcgcagccaccggcgcgtcggacgtcggggaaggagccggcgcgtcggcggcggacgccgtgccgaccagcgacgtcgccaggacggccgcggccgctgccacggcgaggagcctgagcttcagtgttgccgccatttgcttcctcgcttcttggttgactgatcgatctgcacttggagagcaagaacactag

SEQ ID NO: 23908 - DNA, 192 bp, Oryza sativa
  Clone ID: PAT_MRT4530_28942C.1
atgcggttgagtcatcgacggatcagatggagggtgggacaccggcgcgcgtcgcgcggggggcgtttgcacgtgaaacgcgagtacgtggaggtggagagagcggaagacgatgggatcgtggatggcgtgcggcgcgcccgggacacgtacgccgcgcgcgcgggggaccagcatatgccggcgtggtac

SEQ ID NO: 23909 - DNA, 757 bp, Oryza sativa
  unsure (1)..(757): unsure at all n locations
  Clone ID: PAT_MRT4530_28943C.1
ctggcctaatgtttcccactacgtattagtaccgcactaagcactagagccgcattacaaccacgcaccgactccattgccctgtttagccttcctaagctnctttactggccccgatagcccctaactagccctaaacccctagtgccgacttaaccccccacccattaacgccctnngggccccctcgngcctcccgtggttcgagcccgaacnatagactagccccaacagtttagggggccctaggggttccagactncccccccacgacccctaagtttaccctaagtncaagccccgaccccccnagggccgcctcccctgggcccgacccgcccctagttngccctagcccgcttccannggccctagctagcactcccgtagcccccatagtggggccccacncgtataggccccccgactagactagacccngaacgacacttaggcccccacaccnngatttacctatattggttagccttgggggccataccgggggccccgaccagcacgactagactagacnagctaggccgctagcccactagccctacactagtagccccactaggccccctcgtccccaatatcccccacatcctcctctcccctcgtagggttaggtttggttttggcctaccccaaacacgttttgggggttttccaactaagttaccatccctccaatacccataaccaaggtggttttgccctaccatactcagttgtagccaacacatcncnataa

SEQ ID NO: 23910 - DNA, 556 bp, Oryza sativa
  Clone ID: PAT_MRT4530_28944C.1
tgctgtaagttgtagtttcatggtggttaaggcattcgccttagtgttcctaaggcggtaaggcactgccagggtgtaaggcgtccgctctgcctcacgttgcctctgccttgcgggaaaaactagaggagaaaggcaaaatcaaggggataaaccggtcctggagaagcaggcggtagtaggggaaggggtaggaatgaaaagagctgacctacatcgtcgtcgctgacgtccccaaccaccggcaaagccagatccactcttacaattgtgtattactctaggttagaggcataaattatcttcgaaatagaaactagtcactaaaagtagatggttatataactacataaggaagaagtagtgaacagccatcttgaaatttctagactgacatatttgggaagaaaatagcaagaatgacatgtatctagtgatggtagaagtatattttagtagctgatactaacaaaaccagtcattttcttctgaaatagcatggatgttagaagctaattctcaaattaccaaatatatatgtgtaaaatatttctcc

SEQ ID NO: 23911 - DNA, 255 bp, Oryza sativa
  Clone ID: PAT_MRT4530_28945C.1
atggatcagcgcctcgactgctccttggccgacgacagccgctgccctgacgacgtccttagccctcgtcggcggccgccgttccgcctccatcacccacttctgtcaccttcgtccgcgcgcggctgccagacggcgagggatcaagcatcatgcatgggcctcccggagctcgtccgcccgccgccgttgtcctcccgtggctcgccgtcgccgttcgccgtcgtcctcctccgcgccggccactctcggtga

SEQ ID NO: 23912 - DNA, 369 bp, Oryza sativa
  Clone ID: PAT_MRT4530_28946C.1
aacatatgttgtgtgtgcctgtgtccattatctgttctttttagctaaacaatgaattggaagtttgaatatgtccgtattctttttttagagaatatgcaggactgcctatctttgcattaaggaagaaggatttgttcgtattcaaattgttcattcttttttatatagaaacaaatgccctgcaatgtccacctacatgatctacttagatgaggtttatcagtttcatctacttctccttatactttgtagacatttatttcaagctcttatgcctattaaaattgtatggaaccttgaaaacaagacttcaagaggttgagaacttaatagcatgcaactattgcagataggaacaatgatctt

SEQ ID NO: 23913 - DNA, 482 bp, Oryza sativa
  Clone ID: PAT_MRT4530_28947C.1
ataccatggatgatatggttgtaaaaccattcggttggatttttgcaccttgactatatgtttagtttttacctaatctcatggccgcgggctgcaccttgggggagggtgttttgaaaacaggctagggtcttggcagagtggatatttttcctatgggggtagggaaattagaattacttgttgcatttccagtattcccttattcactatgggttttataaacttcttgaggagttccataagaagatggttggagtgagggggaggttttactggcagggtgtggagaaaaagaggaaataccacatggtcaagtggcaagctctgtgtagacctatggagtatggagatatggggttttaaaatacttaaagtttatgaacttgtgtctcttgtgtaaatgggttatgaaaattgagggtaatttagatgacatgagtgctgtgctgctgagtaggaaggtcttgctcttgttatta

SEQ ID NO: 23914 - DNA, 1312 bp, Oryza sativa
  Clone ID: PAT_MRT4530_28948C.1
atggaagcactctacttggtggcgtcgttggccaccacactcctcacctccaccttcctctcgctcctcctcctcctccgcctcctcctcacgcgccgccctcctctcgccggcggcggcgatggcggcgccgccgtgcggctgtacgagggccgcgtccggcactcgcggcggcggccggcggcgcacgccttcgagtaccccgtgcgatacgccctcgtcgacctggaccgcctcccgctccccggccacctctcccccgacgacgcccgccgcgtcgcctccacctccggccccgtgcatctcctgacgattcccaagagcgtagggtacgagcagaacccgctcagcatctactactgctatgattcagcagagcaaggagaagatgagaagctcaagatgtgcattgctgaggtcacaaacactccatggggggagagggtaatgttcaccttccaaccaggctctgatctcgtcgcgaaaccgttacatgtcagccccttcatggatatgcttggcaattggagtattcgtgctgagtcccctggggatagtctctatgtggttattttagttcagcatccaacactcggcaactatttcaccgcagcattgcacgccaagttagtcgagaagacgagtagttctcttaggctagcaacattcttctggctgatgccccataaagttgctgcagggatatactgggaggccatcagactttggctgaagaacgtcaaattcctggaccatccaagatacttgaacttgaattacagagatgaagctcagaagcgcgatctcgagatccgttcatcgtgcagctttcttcagaaacagaagctgaacgaccaaagaaccggtcgcgccgatgaaactgctgaaatcacagatcatcatgatcacaatggtgaggagagcgttgtgaagaggtggtgtgtgtggacagatgcacaatggccatggtcatgattcaaagagcaccaagttgtctttcagaaaagaaagggaaagaactggaggagatagcatgtggattcagtattacactcttgtttaattattccttccatgagtgaataatagaacttcccccccccttcgatcgatgtggattcagtactatactgcaagttgttgcaagggtcaactaactttagtttatttttttcatgtgggacagtgagaaagctgaatgttttttaattaattaatcccatgtttttgttccctgaaaaaaacatgtttttcagtctcaaaacaaattttcgagccgggcggcggcaaatgttttaaattcgagggggtg

SEQ ID NO: 23915 - DNA, 516 bp, Oryza sativa
  Clone ID: PAT_MRT4530_28949C.1
atggtggcggcgcacggtggctgcgacggcggtggcgcacggcggctgcgacggcggcggggaacgcggcacggccaaggcgcggcgcggcgcggcggcttcgtggcggcggcgtggcggctctatgcgacgacgcggcggcgtggaggcggcggcgcggcggcgtggaggcggcggcgtggtggagtggcggcggcgcgcggcgcggcgcggggcgcatggcgacgcgacagcgacggcgacgtgcgagcgatggcgacggcgcgcggcgatgcgacggcgatggcgacggcgcgcggcgcggggcgcgagacgacgggacggcgcggcaggcgtacggcgcggcggggcgcgagatggcgacgtgacgggcgagcggcgacggcgacggccgacggcgacagcggtagcggcggtgcgcggcgtgaggtgtggggcgcgggcgcggcgtcggcgcggcagcggggcagggttaggctagggaacctcgtcgaacacctggcggccgatgaatag

SEQ ID NO: 23916 - DNA, 1416 bp, Oryza sativa
  Clone ID: PAT_MRT4530_2894C.1
atggctggcgggcgcgaaggcacacaggcaacgacggcagatgctgaggtggcgagcgacgcaggtggccggcaagctcatagtgcagtgaagatggctgaagcaggatgcgaatatatcactgtcttaggtgttgattttatgtcagaaaatgttcgtgcaatacttgatcaagctggatatagcaagccaaggatgatgggagcatgtgcatttaagagaacactaaccacaagctttcttatactcaattgtgtcagagatattgggaacgctgcttcaagttctgcatatacacattttttgaaagaagcatcaagatctcctccttctttacatgttatttatatcaatacttctttggaaacaaaagctcatgctcatgaacttgtacctacaataacatgcacttcttcaaacgttgtagcaactatattacaggcatttgcccaaataccaggtcttaatgtctggtatggcccggattcttatatgggtgcaaacattgcggatctatttcagagaatggctgtcatgtcagatgaggaaattgcagaagatggtaactgtattgttcatgatatgtttggccatgaagttgtggacaaaataaaggagcagtattgtgatgcattcctcacagcacactttgaggtcccaggagaaatgttttccttgtcaacggacgcgtgggcgaggggaatgggagtggttggatctactcagaacatcttagatttcattaaaaaccatttgatggaagctttggataggaacatcgatgatcatcttcagtttgtgttaggaacagaatccggaatgatcacttctattgttgctgctgtccgtgaattatttgattcctataaaacttctcaacaaagtgccaatattgaagttgaaatcgtgttcccagtttcttcagatgctgtttctaatacatctgtcaatggttcccaccatcttgattcttcaacagttactgatttagacaatgttagtgttgttcctggtgtgagttctggcgaaggttgctctatacatgggggctgcgcttcatgcccatacatgaagatgaattctttaagatcactgcttaaagtatgccatcagcttcctgacagagataacagattagttgcctatcaggctagccgattcaatgctaagactcctctgggaaaattggttgcagaggttgggtgtgagcccattttgcatatgcgacatttccaggcaacaaagagattaccagacaagctcgtgcaccatgttatccatgttaccccgactgaatgcaaccttcagctcaagagtgcaactaccaactttgtggccgatgatgagatatccctgttcatggctttgctactggtggaaaaaagggaaaccagaatttgcaaggtgaatttataa

SEQ ID NO: 23917 - DNA, 622 bp, Oryza sativa
  unsure (1)..(622): unsure at all n locations
  Clone ID: PAT_MRT4530_28950C.1
tgcnggattcggcacgaggccggcgagggagcgtgtgagtgggtgccggcgatggcggagacggcgaggtggagcacgcgtgcgacgacgagcgccgagcggctccatctgcgccggctgggggggtgcgcccgtgggcagcaccaagccgtggtccggcgagcgccgtgcggcccggacctcgtcggcggggcctggcgcgaccgcgatggatgagatggcggcgaggccacttcctgttgattcccggtgcgatgcgaatctcacccctctccaccgatggtatttgctgcatgcgacatgccactactgtctcgagtttttgactcgctctatgacaaaagaaccaggagcattgatcccatccgggtttgttttgagagattcctcttgtcttgcatggaagcgaccgttgtactttcacattgcaatgttaggcccttaattcttgttgttgctgttacaaaaaaaagatgatcattgagtaggagtacttacaatcccaattacccatttgtatatctatcattattctcttaacggtaccttatcggttgatgatgatattatacactggtgttgacatctgtttgatgttcaccttaaaaaaaaaaaaaaaaaa

SEQ ID NO: 23918 - DNA, 209 bp, Oryza sativa
  unsure (1)..(209): unsure at all n locations
  Clone ID: PAT_MRT4530_28951C.1
cgcattgtcaacacttcagctccctcaatcctctatgggttttcacatcccccttcaagacagggccacatcacacaggccacacggtcacgtggtggcaccaccacaggcttgtggcaccacacatacagggcaggttgggggtatgcgtgncaccatccccaggggggtatcctcgggggtcccacggtatcctgtggtatggcaat

SEQ ID NO: 23919 - DNA, 576 bp, Oryza sativa
  Clone ID: PAT_MRT4530_28952C.1
atgaactccggagacgccgaggcagcagcggcctccaagaaggcccggtgcaagaaggagaagaaaaagaagcgaaaggacgactgcggagccgcagaggcttcagcggctgacgaagaaatcgtccacgacaagaagaggaagaagcagctgcaacagaagaagaacggagatgacgtggcggttccgaatcggaagaccacgctggcaggacaaatcgcccgcgcggcgaccgtcttccgcatcgacgaggttgtggtcttcgacagcaattcctcagtggagaacagcggcgatgacgtagagagtggcgcgcgcttccttgttcgcatcctacagtatctggagactccacaatacctgcgccgacgccttttcccgatgcacaacaacttgaagtttgtggggttgctgcccccactcgatgcaccacaccatttgcgcaagcatgagtggtctgaatttcgtgaagttcatgctcgtttggctgggagagcaggcaagcatgcggcggctggcagtttgcgccgtgcgacggcacatgggatcaaggtcgttgatgacagtggcggctaa

SEQ ID NO: 23920 - DNA, 636 bp, Oryza sativa
  Clone ID: PAT_MRT4530_28953C.1
ctttcgtcggcctctcgactcctggaacctggaggtgttctcgtgttagtcccccctacgcctccgccgccgccgccgccgccgcaatgaactccggagacgccgaggcagcagcggcctccaagaaggcccggtgcaagaaggagaagaaaaagaagcgaaaggacgactgcggagccgcagaggcttcagcggctgacgaagaaatcgtccacgacaagaagaggaagaagcagctgcaacagaagaagaacggagatgacgtggcggttccgaatcggaagaccacggtgagcatcgccgtcgccggatccatcatcgacaacgcccagtccctcgagctcgccaccctcctggcaggacaaatcgcccgcgcggcgaccgtcttccgcatcgacgaggttgtggtcttcgacagcaattcctcagtggagaacagcggcgatgacgtagagagtggcgcgcgcttccttgttcgcatcctacagtatctggagactccacaatacctgcgccgacgccttttaccgatgcacaacaacctgaagtttgtggggttgctgcccccactcgatgcaccacaccatttgcgcaagcattagtggtctgaattttggtgaaaaaaaaaaacaggga

SEQ ID NO: 23921 - DNA, 449 bp, Oryza sativa
  unsure (1)..(449): unsure at all n locations
  Clone ID: PAT_MRT4530_28954C.1
atactgtcttgtttgatactattatctatttgtgcttncttttcgcctgccttttcgaatacctgatcgaattctctcagtggacaattttttgtggcaagcatctttgaccctgccgagtagctgagtaagccttttctattccatgttagtgctctgctgctctaaacttctagctgaaagtaatccatggtcatttgtcgttgtgtgatgttctccagtttgattcagtgcggtattgggggtatagattttgctccttgatggactaggatgacaaactgctcttccattcacgttgaggncaagtattgtnaattttaattgcaaacttcttgtagcntctgcttcctcaggacaattttttttcatggcccgggggaatgaaanatgactaggtaactggtaaccaactgggctttcataccatgacaatataggacatacag

SEQ ID NO: 23922 - DNA, 2529 bp, Oryza sativa
  Clone ID: PAT_MRT4530_28955C.1
atgtcgggccaagcaggggatgggatcgatggtgataagggagctaagatcccttatgactatccccctacatctacatcttataatcccgaagatcccaccaaggaggacgacgagaacgagcacaagaacgctcaagccgctaatgcaatacttagcgccttgagtggaagtgagttcaaccgtgtggatggcattgagagtgccaaagtgatttgggacacgcttcggaacttgcatgaaggcacggatagtgttcgtgagtccaaggtggagatcctcaaggggcaatttgagagatttgtgatgttggatggtgagagcccaagcgacatgtacgaccagttgagcaagatcgtcaatgagatcaagggacttggctccaaggacatgaccaatgatgttgtggtcaagatgatggttcgagcaatcactccaaggaactctaccttggtgatcatcattcgtgagcgtccggactacaagactctcacacctcgtgattttctcggacgcatccttgcccatgacatgctcgtgcaagagtccaaggatgtcatccaatacatcaaccaaagctcaaccgcaagcatcaagaaggaagacttggctttgaaggcaaaggaagaagaagaagagaaccgcaagagcaagagcaaggcggagatcgatgatgaagagatggctctcttcgtcaagaagttcggcaagttcatgagacgaagcggcttcttcaagggaggttcttccaagcactactccaacaagtcaagtggaagacactccgcaagagtgtgctacgtgtgcaaagagcccgggcacttcattgcggattgcccccacctcaaggatggttcccacatcaaggaagataagaagaagggtgagaagaaggatgagaagaaggagaagcacaagcataggaagcgggaacattatggccaagctcaccttgtgatgatcttcggctccgactccgagtcaagctcaagtgatgaagaaggagtcgtcgcgttcgccgtcaagccttcatcaccaccaagactcttcgacaactcaagtgatgaggatgctcccatttgcctcatggcaaaggagcctaaggtaccttctcctctcaagtcatttaatgttgatcttgttagtgatgaggaggatgaggccaaaagtatccttactaatgattatgcttcacatggttcttttgatgcatcttatgttcttaggaagaatgctagtggttatgttgttgctaacgcgtgtcaagccggcaaacaaattggagcacatcaccccgtcaagaatgtgatgaccactacaagaccattagagcttctccacatggacctcttcgggccaattgcttatctaagcattggaggtaacaaatatggtcttgttattgttgatgacttttcacgcttcaccgacaacggcaaggagttcaagaacacgtgcatcgagagtttccatgatgaagaaggcatcaagcacgagttctcggctccatattcacctcaacaaaatggagtagcggagaggaagaataggactctcattgagatggcgaagatcatgttggatgagtacaagacatcggaccgtttttgggccgaagccgtcaacaccgcatgccacgccatcaaccgcctttatcttcaccgccttcttaagaagactccctatgagcttcttaccgtgaatgagggattcttgcttgggtatgggtcaaatgaatgcacataccgcgttttcaacaaaacctccagtattgttgagatcgcgcgtgatggagccacaacaaggagcctcttcctcaacacaagtagaaccacctacatcaacccaagccgacgatccctctacctcaagcttgaatcaagggtggaagaagctcttaatgatccggattgggtaatggcgatgcaagaggagttgaacaatttcacctggaatgaagtgtggactttggtggagcgacctcggcaaaatgtgattggcacaaagtggatcttccgcaacaagcaagacgaggccggggtcgtaataaggaacaaggtgaggcctatcaacgagttggtatatgtggagcaatcaccgggcttcgaggatccaaaatatcccaaccacgtgtccaagctccataaggcactctacgggcttaagcaagcccctagagcttgtagaatgatgaccaagcgttttgagatgtccatgatgggtgaattgaagttcttcctcggccttcaaatcaagcaactcaaggaaggaactttcatttgccaaataaagtatttgaaggacatgctcaagaagtttggaatggagaatgcgaagccaatccacactcccatgccatcaaatggccacctcgacctcaatgagcaaggtaaagacgtcgaccaaaagggagcgaggtttgatctcattggctacgccgatgcggattatgccggatttgtgagcacttgcatcatctctgggagttctttgcatcatcttttactcttggaggttgaggactcctag

SEQ ID NO: 23923 - DNA, 600 bp, Oryza sativa
  unsure (1)..(600): unsure at all n locations
  Clone ID: PAT_MRT4530_28956C.1
aattagcttggtggtaaatatcttctttcttcacatcctcctctcttttcttttgcgtattgaatacgtttgtttctttatttgttttttttgttctgtccccttatctttctttcataaaaaggaatgaatggctcggctaaataaaataaccganccaaaacanaaaaaaacagtanaacaggtttaaataaaaaaatcttanttaaaaggggtcntnttaaaaacaggctccaaatcacaatcnattcccttttcaaatcctgctgcancagcccgggctcttcctcctgccgaattcctgcagcccgggggattcactatttctaaaacggccgccaccgcgggggaaccccnccttttgtccccttattganggttaattccaacttggggttatcnggtccaactgtttccgttttaantgtttcccccccatccccccaattcaaaccgaacctnaatttttcccnggngccaaaaattaaccaccccttattgtttgccccgccccttcattnggaacttttcccttcttaaaacccccccgggaaagggtggttttggccccccccccccccaaacccccccgggggtgcc

SEQ ID NO: 23924 - DNA, 3576 bp, Oryza sativa
  Clone ID: PAT_MRT4530_28957C.1
atggacctcttcggaccaattgcttatctaagcattggaggtaacaaatatggtcttgttattgttgatgacttttcacgcttcacgtgggtgttctttttgcatgacaagagtgagacacaagctatcttcaagaagtttgcaagaagagcacaaaacgagttcgacctcaagattaagaacattcaaagcgacaacggtaaggagttcaagaacacgtgcatcgagagtttccttgatgaagaaggcatcaagcacgagttctcggctccatattcacctcaacaaaatggggtagccgagaggaagaataggactctcattgagatggcgaggaccatgttggatgagtacaagacatcggaccgtttttgggccgaagccgtcaacacttcatgccacgccatcaaccgcctttatcttcaccgccttcttaagaagactccttatgagctttttaccggtaacaaaccaaatgtatcttacttttgtgttttcggtagtaagtgttacattcataataagaaggctagatcctctaagttcgctcctaaagtggataagggattcttgcttgggtatgggtcaaatgaatgcgcataccgtgttttcaacaaaacctccggtattgttgagatcgcgcgtgatgtgacatttgacgaatctaatggctctcaagtagagcaagttgactcacatgtgttaggtgaagaggaggatctgagcgaagcaatcaaaagattggctcttggggacgtacgtcctagggagccacaacaaggagtctcttcctcaacacaagtagagccacctacatcaacccaagccgacgatctctctacctcaagcttggatcaaggtgaagaaggcgagcaagtgccaccctcaccgatcaacttagctcgcccaagaatccaccaaagcacccaaagagatcatcccaccgacaacatcttaggagacatcaacaagggagtatccactcgttctcgtatcgcaaatttttgtgagcattactcgtttgtgtcttttcttgaacctctaagggtggaagaagctcttaatgatccagattgggtgatggcgatgcaagaggagttgaacaatttcacccggaatgaagtgtggactttggtggagcgacctcggcaaaatgtgattggcacaaagtggatcttccgcaacaagcaagacgaggctggggtcgtaataaggaacaaggcgaggttggcgcaagggttcacccaaatcgaaggattagatttcgatgaaacttttgcgccggtagctagacttgagtcgattcgcatattgcttgcttttgctactaacctcaattttaagctatatcaaatggatgtcaaaagcggcttcctcaacgggcctaccaatgagttggtatacgtggagcaaccacggggcttcgaggatccgaagtatcccaaccatgtgtaccagctccacaaggcactctacgggcttaagcaagcccctagagcttggtatgagtgtcttcgcaattttcttgtgaaaaacggctttgaaatcgggaaagccgattcaactctttttactaaaagacatgataatgatatttttgtgtgccaaatatatgtcgatgacattatatttggttctactaacaagtcttttagtgaagagtttagtaggatgatgaccaaacgttttgagatgtccatgatgggtgaattgaagatcttcctcggccttcaaatcaagcaactcaaggaaggaactttcctttgccaaacaaagtatttgaaggacatgctcaagaagtttgggatggagaacgccaagccaatccacactcccatgccatcaaatggccacctcgacctcaacgagcaaggtaaagacatcgatcaaaaggtataccgttccatcattgactcacttctttacctttgtgcatctaggcccgatattatgcttagtgtgtgcatgtgtgcaagatttcaagccgctccgaaggagtgtcaccttgtggccgtgaaaagaattcttagatatttagtgcacacacctaaccttggtctttggtatcctaagggagtaaggatgcctccctgcgagcaaatctcccacaagtccaagcgcccgagggaccgctctcccactccatcctctcatgatgattcggacagtgattggtccggtggagaggatgcggttcctcagggtgtgcgggtggctcggggcggcaacctccctcctcggcgatctactcctggtggtggtggtgatggtgatggtgagggctcctctcgtcaaccgcaaacgccgccgcaccaacccaatgtccccattgggcccctccgcattcatacccccgagagggatccggcggtgattcgccaagtgtatgattggaggcgcaagtctgaggttgttgctccttgccgggatgaggatccacgctccctttgccgaaccgtcacggatccgcggttttggattaagtccaaagctcatcccactgttcccatgcaatggatcaattgggaggagttgcaggagcacaatgatccggtgatagactctgtgattgccaattgtgatctcatgggtattcgctccttcatgacgttgcagcaaaattggtgcaacgagatcattgctcagttttatgccaccgtctactttgatcgttatcgtgccatgcactggatgactcaggggtcctggtattctgtttcttatcagcagttggctgagatttggggcttccgtcttcgttctttgctcaaccttgatgaccttcataatcttcaaatacctgtcaacacagaattgctccctctttacactccaaatgatcctaatgtagtgttgggcaaggtcgacggtctcaagccgtactttgcctacttgaaccggatgtttcgccggtcctttgtgcctaaggatggtgatgctagcagcattaaccacctctctaggaccgtgcttctcagatttgatccccctcctcatcgctttcatgtttatcactttgtgtgggaggagatccgcatggcttccatccagtacaagaaggggttggtctatgcccctcacattatgcggatgatcgagactatcactcagctgcagtttcgccatgatgtgactcattctcagcttcacttgcgccttattaaggccccccgctcctcagctgctcgggacatccccttctcttccactcaaccacctcctgctcctgagcgccctgcctctgtggctcgtcgtgagccgtctcccttattccgcattttgcggagtctttttggtctttgctctgcggaggctaaaaagaaccgccaattgcggacgaagaaaacggctcgtgacgtcaagttcctcaaggcacggtattatgaggaccaccacattgatatgcctccttctcctccgggttttgaggccgagccagatgagccagaggatgaagagattgaggatccatttgctgggttgcctcctgacttcgacttctttggatatggacatgactatggctatcctcctccaccacctccagaggatcctcctcaggcgcccttcgcttga

SEQ ID NO: 23925 - DNA, 429 bp, Oryza sativa
  Clone ID: PAT_MRT4530_28958C.1
atggtgtctacagatactgtcaggagagacaaaagcactgcctttgatctcgccggatgcggattcgaagaggaaggctaccctgttgtcgactacgagtcaacacttcagaacgccaagggcctgaacctgtataaaaatcctcgggtgttgaagcctgcggcgagcttccttccaggcgtctgccctcttgcggtggcggcttgccgccgtaagatggccacgctagacgggcgagtgcgggggagaggggatccattcttctctctcaccctctccctctccaacccaaccacgtggatggacgtgaagcacggtgaaggtggagactcttgtttgatgcctggccctcggcgaggcgtcggcgcagtggctgcacgtcgaaggggattagatggtggttctgctaaaatggcaagcactgtttaa

SEQ ID NO: 23926 - DNA, 999 bp, Oryza sativa
  Clone ID: PAT_MRT4530_28959C.1
atggcgatgcaagaggagctgaacaatttcacccggaatgaagtgtggactttggtggagcgacctcggcaaaacgtgattggcatgaagtggatcttccgcaacaagcaagacgaggccggggtcgtaataaggaacaaggcaagtaacctcaattttaagctatatcaaatggatgtcaaaagcgccttcctcaacgggcctatcaacgagttggtatacgtggagcaaccaccgggcttcgaggatccgaactatcccaaccacgtgtacaagctccacaaggcactctacgggcttaagcaagcccctagagcttgtgaagagtttagtaggatgatgaccatacgatttgagatgtccatgatgggtgaattgaagttcttcctcgaccttcaaatcaagcaactcaaggaaggaaccttcatttgccaaacaaagtatttgaaggacatgctcaagaagtttgggatggaaaatgccaagccaatccacactcccatgccatcaaatggccacctcgacctcaacgagcaaggtaaagacgtcgaccaaaaggtataccgttccatcattggctcacttctttacctttgtgcatctaggcccgatattatgcttagtgtgtgcatgtgtgcaagatttcaagccgctccgaaggagtgtcaccttgtggccgtgaagagaattcttagatatttagtgcacacacctaaccatggtctttggtatcctaagggagcgaggcttgatctcattggctataccgatgcggattatgccgggtgcaaagtggatagtaaaagcatatcgggtacttgccaattcttgggtaggtctgttgtttcttggtcttccaagaagcaaaactctgtcgccctatccaccacggaagcggaatatgtttcggcgggggagttgttgtgctcaacttctttgggtgaagcaaaccttgagagactatggcctcaatgtatccaaaatcccactcctatgtga

SEQ ID NO: 23927 - DNA, 3716 bp, Oryza sativa
  Clone ID: PAT_MRT4530_2895C.1
ggtaccgcctccacctgctggacggtaaaaattctcttcatttatatgtcgatacagtactttaggctcgaatgagtcttacttgagaataattgtggctagtagctagtgagatagtgtccacatataatagataaacaaaatgcactcaaatgctaattttatattgctcctgtaaaagagaaataatccttcctgatgctcttgagcttcacgaccacatcacttattcccatccgttctgcaggtgagctactgcaacacatcaagccaagctcgaaaattggcaaaagaaggccttcatttggccaggtagcagaacgcggcaaggaggtagcattgttctgacgaacaccttgttctattaatgtttcagcctgtagaagcctaccatccacaatatctgcgagcctggctggaaatgcttcagaaacccacttcctaaggctcatgtcaccaacaaacatggcatccgtaggcctcttcccggtgaagacttcgagcaacatgatcccatagctgaacacatcgctctttcgtgatgcttttcccataaatgcatattctggagccatgtatcctattgtcccgggcatgctggctgaaactgcagagttgtcatcacctaacagtaattttgcaatgccaaagtccgccacatgcgccgtcatctcctcatcgaacagcacattgctaggcttgaggtcacagtgcaaaacaacctcagaatgatgatagtgaaggtgctccattgccattgatacgtccagcataatgtcaagtctctttaggaatcctagtggagggtgcccttgcttgtgcaggtatgtctccaagctgccattgggcatgtactgaagcagcagtgctctgaagtctgtgttggagcatatgtttagtatccttatcaagttgcgatgctgaaccatgcgtagaacctggcactcaacatcaaagcttctcatagcttgttctacctgcatgtttagaactttaaccgcaaccaccattccatcatccaaatgacccttgtaaaccttgccaaaacttccagctcccaacatattatcctcattgaaactttccgtggcacgaacaatctcttgatatgatactaacctataagaagtaggtgtagtagtatctagcttccttttaatcttctttctagtcatttggtacaaacaaagagcaagtgcgccaactgctattgtgatggcagggagtataaacttcaggtagtggctaccattagttgagtgtgacttgtctaggcatggtaaaaatcctagacgaggaagaccacacaaggcagcattgcccatcaaagatatcaaggttatatttgagaaaacaccaccatttggtatttcgccttttaggttgttagaagagaggttcagagtagtgaggtaggtaaagtttgctaagtacttaggtatagtgcctgaaagattgttataagaaaggtccaatacttctaagctggtcagatggctaatagagttcgggattgaatctgtgaatgagttgtgagacaggtttaggtaggctaacatctgatggtatccaaatgaatttgggagctgaccaactaataaattgtctgaagtatctagggcaaacatatcttggatgtggctgagatcagatggtaatgtaccattgaggttattattggagagaaagagctgcacgataccaagataaaataaacttgttgggatagtcgatgacaacttgttatcagatagagaaatgtattgtagcatggtgagattaccaatgctatcaggtatggaacctgagagcttattatcggtcaggtacaaccatacaaatcttgccgtaccaatctcttcagtgataggaccagatattccattcgaggtaagatcaagtccctgcaaattctccaacttcatgagggaagctggtatggaatcactgagttggttgtatgacaaatttagcgctcgcagattagtaaggtttgacagtgtagctggaaggccaccagttaagtggttgtcgtctccttcgaatcctaagagttcagttgagaggtttccaacatagtttgggagagacccggtgaaagagttatgtgatatcaagaggtactgaagttggcgacagttacaaaggctagacaggaagctgagatccccttggaggtgattgcctccaattttaatttcaacgagaggcctgatgtttccaaacgttgatggtacaggccctgtcagctggttatatcccaatcccaagaatgtcaattcagagaagtttccaacaaaagctggaaaggcgccgttgagctggttaaatgaaagatcgagatacgtaagttttgtcagtgttcccagctccaccggaatgtggccgcttaggttggagtctgagaggtcaagctcactgagcatggggagatttcccaacagactcgggattgtaccaacgagctcattgccatccaaaaagagtaaagtgagacgtgacatcttagccagccatggcggcacgacacctgaaaaaagattttctgacagagaaattgtctcaagattctggcatgaagcaagccctgacgggattagtcctgtgaatttattcgtgtctagttctatgtcttgcaacatagggagattaaagctccggttagtaggtatagggccagtcagattgttcttccatataagtatggcttcaaggctagacatgttgaaaatggcaggaggcactggaccagagagctgattgtcactcaggtaattgctcgtgagaaccatttgcctaaggctatgtagattttgcagctcggctggtatgtgccctgagatgtggttgccatagagatttagaatctcaagctttgtaaggttccctagtgcagagggaatagtatctgacatagtattgtgggcaagacggagaatcctaagacgatgcagcctcccaagatcagctgggatggggccagtgaggtttatgccaccgaggttgaggacacggaggaaagagaggttaccgaggtgaggcgtgagctctccttgcagaggaacgtcccacagcttcaacccgacgacccgcggccgccgccggctgcacgacacgccgacccagcggcacatggacaccttggttgtccagttgccggcaaggactccgagaggatcggacagccgcgctttgaaagccagcagcgcggacaggtcgtcgccggtgccattgctgctgctaccaccgtcacgcgggatggaaccagaagcatatggtatggtaagtggcagtacaagcatgagaagacgaatgctgttgaatggtggaagaagtagccaggccatgttaggcactctcattgagagggcctgaacctgtctaaatcctttgtctccgcatccatccacttttaggtctcgtgcgttacccccttttattattgccgaattcatgtttcgacagttggcgcgccaggtagggattgcgtcgagtttcctatcaacgagcgcgatggaatcaatttcatgagtcgccgacttcgctttcgctttgggagttttcgcttcctttccgtcgaccacttcttcaagctcctcttctctgacttgatccaaatcagtcagggggaaactcaatcgccggcctgcctccgtcgccgccgactggtgtccccgcctacacggtcggttggtcacaccaccgttgatgggcat

SEQ ID NO: 23928 - DNA, 3111 bp, Oryza sativa
  Clone ID: PAT_MRT4530_28960C.1
atggcgatgcaagaggagctgaacaatttcacccggaatgaagtgtggactttggtggagcgacctcggcaaaacgtgattggcatgaagtggatcttccgcaacaagcaagacgaggccggggtcgtaataaggaacaaggcaagtaacctcaattttaagctatatcaaatggatgtcaaaagcgccttcctcaacgggcctatcaacgagttggtatacgtggagcaaccaccgggcttcgaggatccgaactatcccaaccacgtgtacaagctccacaaggcactctacgggcttaagcaagcccctagagcttgtgaagagtttagtaggatgatgaccaaacgatttgagatgtccatgatgggtgaattgaagttcttcctcgaccttcaaatcaagcaactcaaggaaggaaccttcatttgccaaacaaagtatttgaaggacatgctcaagaagtttgggatggaaaatgccaagccaatccacactcccatgccatcaaatggccacctcgacctcaacgagcaaggtaaagacgtcgaccaaaaggtataccgttccatcattggctcacttctttacctttgtgcatctaggcccgatattatgcttagtgtgtgcatgtgtgcaagatttcaagccgctccgaaggagtgtcaccttgtggccgtgaagagaattcttagatatttagtgcacacacctaaccatggtctttggtatcctaagggagcgaggcttgatctcattggctataccgatgcggattatgccgggtgcaaagtggatagtaaaagcatatcgggtacttgccaattcttgggtaggatgcctccacgcaagcaaacctcccacaagtccaagcaccaaagggaccgctctcccaccccatcctctcatgatgatttggacagtgattggtccgggagagaggatgcggttcctcaggttgcgcgtgtggcttgggccgacactctccctcctcggcggtccactcaagctcttggtggtggtggtgatggtgagggctcctctcatcaaccgcaaacaccaccgcaccaacccaatgtccccacaggtccttttcgcattcatacacccaagagggatccggcggtgattcgccaagtgtatgattggaagcggaagactgaggaggagctgcaggcgcatgatgatccggtgctaaactttgtgattgcaaattgtgagctcatgggaattcgctctttcgtgactttgcagcagaattggtgcagcgaagtcatcgctcaattatatgccaccgttttctttgatccttattgtgccatgcattggatgacccaaggctcttactattatgtctcctgtccgcgatttgttgagatttggggttttgacgtctgttccttgctaaaccttcctgatatgcatgatcttcccattcctgccaacactaatctcctccctctttacactccaaatgatcctaatgtggtgttgggtaaagtcgacggtctcaaaccgtactttgcctgcttgaaccggatgttttgccggtcctttgtgcctaaggatgatagcctcaagataactttgggaggaaacgaattctcagttgcattctcgcgggcatggttcgccttgaccggctctctcctagagattgagtctgcggaggaggttagagcagttccccctcacgagtctcccgaggcccttctggaaaatgaagtccctgacttcatcaaggaagaagcggaacctagtgagactctcgaacttccaatcatggaactgccacctcgacctccgtttgagcttaaacctctacctgaaggcctacgctatgctttcttgcacaatgacagagaagcccctatcataatcagtgacaagctttctgaagacgagactcaacgtcttctgtctatgttagaaaagcatcgtgttgttcttggctattcccttcaagacctcagagggattaatcctgcactttgcactcatcgtatccctattgaccttgagagtactccctccagggaacctcaacaacgactcaataatgcgatacgagaggttgtaaagaaagaggtcctgaaactcctgcatgccgggattatttaccccataccatacagtatcatcaaattcccatccatacggaggaccaaagaccttcggtcattgtctgcaaacgctcgacctctgaccaacctgttagccaaagatggtcccattgagttcgatgacgcgtgcctaaaatactttgaaattctcaaaaaggcactcatctctgctccaatcattcaacctcctgattggactctgcccttcgagattatgtgtgatacaagcgatttcactgttggcgcggtcttgggccaaaccaaagacaaaaaacatcatgcaatctgctatgctagcaaaactttaaccagagctcagttgaattatgcaactaccgagaaagagctgctcgcgattgtttttgctatcgataagtttagatcttacttgatgggactgaactacatggtatcaaaatacataccaccgggagaaaatcaaaggaagttgaaatacgatagccgccgtaacatatgggatgagccatacctatatagggtctgctccgttggtttactaagaagatgtgtgccgactgaacagggacttaagattatagaacgatgccatgcctcaccttatggtggccattatggcgcattccgcacccaagccaagatttggcaatgcggtttcttctggccaacgatgtatgaagattcaaaagaattcgtcagaagatgtccaagttgtcagaggcaaggaggaatcactgctcgtgatgcaatgcccctcacatacaacctgcaagtcgagatattcgatgtttggggtattgacctttttctaagtcatgtaactgcgagttgcaagtttattctggtggcagtcgactatgtctccaagtgggttgaggctatgttgtgcagcgctgcggatgcgaagcataccaagaagatgttgatagagatcatcttcccaaggtttggtaccccaaggatggtcataagtgacggaggttcgcacttcattgacaaaaccttttga

SEQ ID NO: 23929 - DNA, 2571 bp, Oryza sativa
  Clone ID: PAT_MRT4530_28961C.1
tacaccaacaccacacgttgatgcatagtgaccagctaacttgcatttcgtgcacaccttgatcactttgttcttcgatgtgttctccggatttgtggggcatccagttctatagtgccccttcagatgacagttcgaacaaatgcgcttttttcggactccaccatctactggggacttcagcctggtggacctaggtcggccacgctttgcccgacgatcaggtggcagtggcaagctttgtacggcctgatgagccgcggggtcttcattttgttcacctccttgatccggtccagcaggttcatcatttgggggatcagtgtaccccatgggagattcgttggtaccggccactagtttaatctcatccagtgcgtcagttatatgtttcatagcaaggtggaaagcatcaaccgatatgtcaccttgtttggacaagtctatacatgcatggtagagcagtgtgtggcggtgtgtcctggaagaggcagcatctttgtcattcctgaagctctcaaggttgctgccagatccttctctggcactaatactccatcttcttagaatgtacttatctgggatgcttctgcagcctatgtgtgtcattaccttgataacgtggcaacacagtatgcccatgtgctcaaacaacttgcaaacacatttgtaatcttcttcatctttgtctacctgaactttgaatgacaacttactccatgattctctcgcctcactgtcagcatgcacaaccagccatggaaaaaaaaaggaacaataagggtacttactatgtgaaacatgaaaatcaggcagcaaacatatacgtgtaggaaaataacctgtgttatttgatggtgagtagtcaatatttagatcaaatgatggaggatcgaagtccagaccagtataagtcctgtgtggaacagtgcgattcaagtcgattgattcttctttcaagttgtgagtatgaaccatcggtgtacaattggcagcagctgcactcacatcttctacatcatttcctaaagatggtgtttggttgacctctattccattctcagcatcatcgttgacagttgtgcatgtataacctttagaaacatcaacttcatcgctgattggtatggtcacgctgggcatgttcttcgaagcttctgtcaccttaactagactctctgttgccttatcaaggttgccaatgcaggaaatccaaaaacttttcaattcttgggccttctgtattaattcagcagcatgctgagactcaatctgaacattttcatttcccccgctgtcagtgacagatgttctttcgcacgttcttttgtagcagacttcatttttgggccgtagctttaattttccaaactgtgttgcctggtaatagttcctttcgctgatgtccagctgatatctttcctttattgtatcacgatcatataatgcaattcgaggaaatatattatgctccaagtttagatcacctccaaagtccacgttatccaaataatggacctgcaaataaatagagcaaccagtgatataaccacatttagtgccatcagcgtgcttcttttgaacagttgccgctgcgtccaatatctcgttcaacacatacccagaccaattgaactttgctatttcattggggtcaagtagtgcagaaaaatatcttggacatttattgtccatatttgattgtggcgcaagaaatttcatcataacaagcattaggaatgctgttttgaaactttctttctcagcctttgacatttgccctctatggtgtttatctaatacatcctccaatacctccttgttaacgtccttaaaactagcaactttcattctttcagcaattaacctcttgacatgagaaacaaactcaacattgggtgcttgcagctcctcccctacgcaaggaatcccaagcaccttcttaacatcctcaggagacagtggcaaaacctcaccactttctagttcgatagccgaacgtgttggggatacccgtgacaaaagccagtagctgaagtcacgatggtttgttatgaggggcatatgcagcagcccctcaaaacccatctcagctaccagctctttcttttcagcactaaatctctgtatgataggtgtgatggaagatggtacacaacgcgaaaccggtgccacgaatttaacacgaacagccttcttccttgaaggtggagtgacaaagtcatcatcatcatgaatggaacgacgcttcacatttcttctcacgctcgcacactttggaagccgcggcatgctttcaggtaatgcagctcgctggtgaataatgtctgttccgaagctcacgaacaaccagcgacggcagcgaaaaggcacttggacatcaggcgctgtgatggcttgacaaaaatggttgaggagttctggtttccagcaagaggcttgtggacgaacgtcgtcggtgacgaaaaccacggacgtcggccctcttcacggcatggcgagcaatcccggcgaggtaactcggtgaagacgatgtggatagctagccggacgcgtgggcggacgcgtggg

SEQ ID NO: 23930 - DNA, 3063 bp, Oryza sativa
  Clone ID: PAT_MRT4530_28962C.1
aaaaatgaccataatttctgaattgagaagcccccataaaatttgtatggataacatcatgcaggattgaacgaggaactcatgatcatttaatgtacagaaaacctgatgaagttacaacatttcctaaagcagaaggattaagaacctgtatcacagtcaaaactggaattcttggggtatgccgaataagagctaaagggcttctctgatctgaaaagtcttcaaaatagctctagctttatcatattcattcagttctaccaatatgtctttcaaacgacgagccagcccacgtgtctcttcctcacttatgcctgacatgtgtcgcctctccaacttgtttcctagttctaccacgagatctatgaaaggctgcaacttttggcttggtgaagaccacactcctttaagtaatgcagatatccgctcagccctagcaattgcatcatgggcatccaaaatgatactcttcatatgaggaagaattttccccttcaacaattcttccagagcaagcttctctaaaacaggttttgcaaaaatatccttccacaaacacacatttttaagaagacgtatcgcaactccaaatctatgagcagcatactgcgaagcacctggaacagtccttgtcaccattgatccccaagctggcactgaaatgtcagcaatggcctcagtcagacgactattgacagcggccaatagttgatgcaatgccttgcttgaggttggtaaatagctaatgaccatattaattgcatccacagcgtttttggttctttgggtgcttaaaatatcccaacagtgcataatacggtggtgcaaaataggaagagccaccttctctactaatactggaatgaggtccttgtccacattgttagggtcagtgccactttcactgttttgctcaccataatcaaaaagaatcttgtgccactccatgccaaagaaatcagttgtttcatggagaggatcccacttcaaaagctccagtctgacataaggggtgaacacagatggcgcactcagagctacatgagcatctcggtaagccagaggatactgagttttccatccttcaaacttgtccttaacaattctaaggcttgagtattcctcggcagcatcactgaatacaagatcagcagtcttgagcaactcatcacggctggacagataggcactgctctcactatcactctcatcagtgcttagttccccttcgatatgttcattatttgcactcctcccttcagatgacaaccttttagattctgatcgaatttttcttcgcctcctgtcttcttccctacgcttaagatccattcgcttctgcatattgatatctctgccgaattcatccagctcaggtggtaggtttgaactttccctagcagcagctgccgccgcttgtgcagcattagatgcagcagatagataagctgagcttgatcctttgctaaggacagatactgctgcattgacggcagcttcgataacacttgattcatcagctagatcagctgccctcctctctgagacagcagtcactcgattctcatgcagcttctgcatgtgctcctccaattcctctatatagaatgccttatcattcaagaaatcacacatgacagaaatgtaatttcggagctcctgcatgtacacaaacttcctttctgcatcttgtaaaccactctcaaggctagatatctctgaaagagcttcagtaagatgtgtgtcagtcttgactaaagcatccactgttgtcttatgggtctccttaagcttcctgatgttctcctgcagggctttgcttgctacatcagcttgttgagcgattgacaggaactctgcactcccagatgcaaaaatagaagtcccaggcaaaaccccgctaaaggaaggctggtaacggggatcgattgagtatccggatggttgcggctggacctgcacaggagctggtccaccattcgctgctctctgagcagaagcatcatccaccctcctaccaagccccttcctgaactgctcctcctcccatttcctctcttcctcatcctcatcgtcatccttttcatcctcaacctccctgaaaccatcattgataacccccaaactggcagcaggacctctattattgatcacgccaaatacacctttcgtgctcctctggctatctgacttctcagcgtacattgcaatacggccgcgtgtctcatcatcatcctcgtcgctggatccaccagcagcttcacgactgctaagcacaccacctccatcaagggagatgtaatccggtgctgcatgcctcggctgttgaagctgctgccgctttgctcggatagcttcaattgttgcgcggtcaggtatgactggtccttcttcctcctcctcctcttcctctgactcatcttcgtctttgtcctcgttctgcgatggattccttggtccaatgctagcttgtgacataggttttaccagacctttgagaatcaccacgggctctacagcagcagcagtggtgtttgtagcaggagcaggactggcggcagctccaggcaaacgctgtcgtggggcttcagcggttggagggggagggggcggcggtgcacgcatgaggctcccagggagtgggcgggcgttcttctggagctcacggaggcgctccggcgtgtactctccagcatgcgactggaagttggacggcttcggcgcgggaaccgccgctgccacggccgtagagctcttgaggcggtccctggcgggcgtgagccggtggagagtcgccgcagctggcgatgccgtgcgggcctgccggaccgtagcagccgggcggcggcgctgcgacaaaggtccctcctcggcgtcatcgtcgtcctcgtcctcgacgaagctgaggcggctcgcgccctgacgtctcggcgacctgggcttgggaacgggaggggtttgggtcttggtggctgtgggcttggagttgctcgagtcgtccccgtaggcgtcctcggcgtcgtccgtgcggcggcggaagttcttccggtggctgctcat

SEQ ID NO: 23931 - DNA, 3156 bp, Oryza sativa
  Clone ID: PAT_MRT4530_28963C.1
atgtcgggccaaacgggggatggcaaagatggtgataagggagctacgtttccttatgactatccatccacatctacctcttatgtgagtacctatagcggcaaagctccatacttcaatggcacggactatgccgcttggaaacataagatgaagatgcatttgaagtctattaatccatctatttggagaatagtcgaaaaaggctatgttttgcagaaacccgaggatcccaccaaggaggatgacgagaacgaacacaagaacgctcaagccgctaatgtaatacttagtgccttgagtggaagtgagttcaaccgcgtggacgacattgagagtgccaaggtgatttgggacacgcttcggaatttgcatgaaggcacggatagtgttcgcgagtccaaggtggagatcctcaaagggcaatttgagaggtttgtgatgttggatggagagagcccaagcgacatgtatgaccatttgagcaagatcgtcaatgagatcaagggacttggctccaaggacatgaccgatgaggttgtggtcaagaagatggttcgagcaatcactctaaggaactctaccttggtaactatcattcgtgagcgtccggactacaagactctcacacctcatgatttgctcgggcgcatccttgcccatgacatgcttgtgcaagagtccaaggaggtcattcaatacatcaaccaaagctcaacgacaagcatcaagaaggaagacttggcattgaaggcaaaggaagaagaagaagagagccgcaagagcaagagcaaggaggagatcgatgatgaagaaatgactctcttcgtcaagaagtttggcaagttcatgaggcgaagcggcttcttcaagggaagttcttccaagcatcactccaacaagttaagtggaagacattccgcaagggtgtgctacgtgtgcaaagagcccggacacttcattgcggattgcccttacctcaaggatggttcccacatcaaggaagataagatgggcgagaagaaggatgagaagaaggagaagcacaagcatagcaagcgggaacgttatggccaagctcaccttgggaagattttcggctccgactccgagtcaagctcaagtgatgaagaaggaattgccacgttcgccgtcaagccttcatcaccaccgaggctcttcaactactcaagtgatgaggatgctcccatttgcctcatggcaaaggagcctaaggtaccttcctccctcaagtcattcaatgttgatcttgttagtgatgaggaggatgatgttgaggatgaggttatggatgaggaattgttcaagtccataaccaaggagtctctaccacacttgagtgagttgcttgggagaattgaggatcaatatgcaacccttgagaggcaagaggcattactcattcgtgagaaagagcggtctcatgaactcaagggtgagcttgctaaggagagagagaaaaatgaggctttggtacggctttacaagcaaaccaaagagtctcacgctaatcttgaggtgacgaatgctcaacttcaagagagagtggatggcttggataaagcttatctctctcttgaagagaagttcgaaaccttaaagaatagtgtctctctccctagcgaggcatcttgttccaaaattgttccaagcaatgaaccatgtgctaggtgtaaggatattgatattgatgcatgtgctactaactctacttccttgagtgccttgcaaaagcaaaatgagaagcttatgggactccttcacaatggcttgcttaagtgccatatgggtagtaaggccctaaaggagtacctaggctatcaaagggaccacttcaaccatgaaggccttgggtatgttcctccaccaaaaggaaaggtggacaagagtgtgttgatcaagaagccccaaggtcttagcaactttgttaaggccaaaagtatccttcccaatggtcatgcatcacattgtttttttgatgcatcttatgttcttaggaagaatgctagtggtcgtgtggttgctaaatatgttggacctaggggcaaaaatgtttccatcaagagagttctttgggtacctaaggcacttgtcactaacatgagaggacccaagcaagaatatcactccggtggaagaagttgggtgattgatagtggatgcacaaatcacatgaccggagaagaatcaatgttttcttcccttgatccaaatggctcttcgcaagagaacatagtcttcggggacgatggaaagggaaaagtaatgggattgggtaagattacaatctccaatgatctttccatctccaacgtcctcttgtctttaagggtgttctcaaggacaagcttttatcttgtggatttttcctcaactaaagccaaacataagacatgcttagtggctaagtccgacatggggtggctttggcatcggaggctagcctatgtcggtatgaggaatcttcacaagcttctaaagcacgatcacatccttggactaacaaatgttcaatttgagaaagataggatgtgtagtgcatgtcaagccgggaaacaaattggagcacatcacccggtcaagaacgtaatgactactacaagaccgttggagcttcttcacatggacctcttcgggccaattgcttatctaagcattggaggtaacaaatatggtcttgttattgttgatgacttttcacgcttcacgtgggtgttcttcttgcatgacaagagtgagacacaagccatcttcaagaagtttgaaagaagagcccaaaacgagttcgacctcaagatcaagaatattcggagcgacaacggcaaggagttcaagaacacttgcatcgagagtttccttgatgaagaaggcatcaagcatgagttctcagctccatactcacctcaacaaaatggagtagccgagaggaagaattggactctcatcgagatggcgaggacaatgttggacgaatacaagacatcggaccgcttttgggccgaagccgtcaacaccgcatgtcacgccatcaactgcctctatcttcaccgccttcttaagaagactgcctatgagcttcttaccggtgaagaggaggaccctagcgaagcaatcaaaaggttggctcttggagac

SEQ ID NO: 23932 - DNA, 322 bp, Oryza sativa
  Clone ID: PAT_MRT4530_28964C.1
agcctgcttcttgattgccaataagggtttcatcggggtttcagctgatgagttatctggacgttgcatcggctcataaggattgcatccgattggtttatactggattatattgttattttattacatcatcatcagccgattgcctttatattattatctacattggacatatagccgattgcttaaaccctatcgctatcggctggatcaaactgactggcacgctcgcatttcaccaagatttggacctgcactggagttaagcagatctcccaggccggtgtattcgattttttcgtcaacacctacccagattgtt

SEQ ID NO: 23933 - DNA, 4548 bp, Oryza sativa
  Clone ID: PAT_MRT4530_28965C.1
atgtcgggccaagcgggggatgggaatgatggtgataagggagttaagattccttatgactatccccctacatctacatcttatgtgagtacatatagcggcaaagctccgtacttcaatggtacagactatgccgcttggaagcataagatgaagatgcatttgaagtctattaacccatctatttggagaatagtcgaaaaagtctatgttttgcagaatcccgaagatcccaccaaggaggacgacgagaacgagcacaaaaatgctcaagccgctaatgcaatacttagcgccttgagtggaagtgagttcaaccgtgtagatggcattgagagtgccaaaatgatttgggacacgcttcggaacttgcatgaaggcacagatagtgttcgtgagtccaaggtggagatcctcaaggggcaatttgagaggtttgtgatgttggatggacttggctccaaggacatgaccgatggggtggtggtcaagaagatggttcgagcaatcactccaaggaactctaccttagtgaccatcattcgtgagcgtccggactacaagactctcacacctcacgatttgctcggacgtattcttgcccatgacatgctcatgcaagagtccaacgatgtcatccaatacatcaaccaaagctcaaccacaagcatcaagaaggaagacttggcattaaaggcgaaggaagaagaagaagagaaccgcaagagtaagagcaaggcggagatcgatgatgaagagatggctctcctcgtcaagaagttcggcaagttcatgaggcgaagcggtttcttcaaaggaggttcttccaagcactactccaacaagtcaagtggaaaacactccgcaagagtgtgctacgtgtgcaaagagcccggtcacttcattgcggattgctcccacctcaaggatggttctcacatcaaggaagataagaagaagggtgagaagaaggagaagcacaagcatagcaagcaggaacattatggccaagctcaccttgggatgatcttcggctccgagtccgagtcaagctcaagtgatgaaggagtcgccacgttcgccgtcaagccttcatcaccaccgagactcttcgactactcaagtgatgaggatgctcccatttgcctcatggcaaagaagcctaaggtaccttctcctcccaagtcatttaatgttgaccttgttagtgatgaggaggatgaggttatggatgatgaattgttcaaatccataactaaggaatccctaccacacttgagtgagttgcttgggagaattgaggaccaatatgctactcttgagaggcaagaggttttgctcattcgtgagaaagagcggtctcatgaactcaagagtgagcttgctaaggagagagagaaaaatgaggctttgcaaaatgagaagcttatgagactccttcacaatggcctacttaagtgccatatgggtagtaaggccctaaagaagtacctaggctatcaaagggacaacttcaatcatgagggtcttgggaagaatgatagtggtcgtgttgttgctaagtatgtaggcccaaggggcgagaatatttctatcaagagagtactttgggtgcctaaggcacttgttactaacatgagaggacccaagcaagaatatgtttccggtggaagaagttgggtgattgatagtggatgcaccaatcacatgaccggagaagaatcaatgttttcaactcttgatccaaatggcacttcacaagataatatagtcttcagggatgatggaaagggaaaggttatgggattggtggctaagtccaacacgaggtggctttggcatcggaggctagcccatgttggtatgaggaatcttcacaagcttctaaagcacgatcacatccttggactaacaaatgttcaatttgagaaagatagggtgtgtagtgcgtgccaagccggcaaacaaattggagcacatcatcccgtcaagaatgtgatgaccacttcaagaccattggagcttcttcacatggacctcttcaggccaattgcttacctaagcattggaggtaacaaatatggtcttgttattgttgatgacttttcacgcttcacgtgggtgttctttttgcatgacaagagtgagacacaagccatcttcaagaagtttgcaagaagagcacaaaacgagttcgatctcaagatcaagaacattcgaagcgacaacggcaaggagttcaagaacacgtgcatcgagagtttccttgatgaagaaggcatcaagcatgagttctcggctccatattcacctcaacaaaatggagtagccgagaggaagaataggactctcattgagatggcgaggaccatgttggatgagtacaagacatcagaccgtttttgggtcgaagccgtcaacaccgcatgccacgccatcaaccgcctttatcttcaccgccttcttaagaagactctctatgagcttcttactggtaacaaaccaaatgtctcttactttcgtgttttcggtagtaagtgttacattcttaataaaaaggctagatcctctaagttcgctcctaaagtggatgagggattcttgcttgggtatgggtcaaatgaatgcgcataccacgttttcaacaaaacctccggtattgttgagatcgcgtgtgatgtgacatttgacgaaactaatggctctcaagtagaacaagttgactcacatgtgttaggtgaagaggacccgagcgaagcaatcaaaaggttggctcttggggacgtacgtcctagggagccacaacaaggggcctcttcctcaacacaagtggagccacctacatcaacccaagccgacgatccctctacctcaagcttggatcaaggtgaagaaggcgaacaagtgccaccctcaccgatcaatttagcttgcccaagaatccaccaaagtatccaaagagatcatcccaccgacaacattttaggagacatcaacaagggagtatccactcgttctcgtattgcaaatttttgtgagcattactcgtttgtgtcttctcttgaacctctaagggtggaagaagctcttaatgatccggattgggtgatggcgatgcaagaggagttgaacaacttcacccggaatgaatggatcttccgcaacaagcaagacgaggccgaggtcgtaataaggaacaaggcgaggttggtggcgcaagggttcacccaaatcgaaggattagatttcggtgaaacttttgcgccggtagctagacttgagtcgattcgcatattgcttgcttttgctactaacctcaattttaagctatatcaaatggatgtcaaaagcgccttcctcaacgggcctatcaacgagttggtatacgtggagcaaccaccgggcttcaaggatccaaagtatcccaaccatgtgtacaagctccacaaggcactctacgggcttaagcaagcccctagagcttggtatgagtgtcttcgcaattttcttgtgaaaaacggctttgaaatcgggaaagccgattcaactctttttactaaaagacatgataatgatatttttgtgtgccaaatatatgtcgatgacattatatttggttctactaacaagtcttttagtgaagagtttagtaggatgatgaccaaacgttttgagatgtccatgatgggtgaattgaagttcttcctcggccttcaaatcaagcaactcaaggaaggaaccttcatttgccaaaccaagtatttgaaggacatgctcaagaagtttgggatgaagaatgccaagccaatccacactcccatgccatcaaatggccacctcgacctcaacgagcaaggtaaagacgtcgatcaaaaggtataccgttccatcattggctcacttctttacctttgtgcatctaggcccgatattatgcttagtgtgtgcatgtgtgcaagatttcaagccactccgaaggagtgtcatcttgtggccgtgaagagaattcttagatatttggtgcacacacctaaccttggtttttggtatcctaagggagcgaggtttgatctcattggctatgccgatgcggattatgccgggtgcaaagtggataggaaaagcacatcgggtacttgccaattcttgggtaggtcccttgtttcttggtcttccaagaagcaaaactccgtcgccctatccaccgccgaagcggaatatgtttcagcggggagttgttgtgctcaacttctttggatgaagcaaaccttgagagactatggcctcaatgtatccaaaatcccactcctatgtgacaatgagagcaccattaagatagccaacaaccccgtccaacactcccaaaccaaacatatagatattcgccatcatttcttgagagaccattccacaaaaggcgacatagatatccaacatgtgagaaccgacaaacaattggcggatatcttcaccaaaccactagatgaaactaggttttgtgagttgagaagtgaactaaatatcttggattctcggaatgtggcttga

SEQ ID NO: 23934 - DNA, 4971 bp, Oryza sativa
  Clone ID: PAT_MRT4530_28966C.1
atgtcgggtcaaacggggaatggcaaggatggtgataagggaggtacgtttccttatgattatctctccacatctatatcttatgtgagcacctatagcggcaaagctccgtacttcaatggtacggactatgccgcttcgaaacataagatgaagatgcatttgaaatctattaaccctttgatttggagaatagtcgaaaaaggctatgttttacagaatcccgaggaacccaccaaggaggacgatgagaacgagcacaagaacgctcaagccgctaatgcaattcttagcgccttgagtggaagcgagttcaaccgtgtggacggcattgagagtgccaaagtgatttgggacacgcttcggaatttgcatgaaggcacggatagtgttcgcgagtccaaggtggagattctcaaggggcaatttgagcgcaagatcgttaatgagatcaagggacttggctccaaggacatgaccgatgaggttgtggtcaagaagatggttcgagcaatcactccaaggaactctaccttggtgaccatcattcgtgagcgtccggactataagactctcacacctcatgacttgctcggacgtatccttgcccataacatgctcgagcaagagtccaaggaggtcatccaatacatcaaccaaacctcaaccacaagcatcaagaaggaagacttggcattgaaggcgaaggaagaagaagaagagagtcgcaagagcaagagcaaggcggagatcgatgatgaagagatggctctcttcgtcaagaagttcggcaagttcatgaagcaaagcggcttcttcaagggaagttcgtccaagcattcctccaacaagtcaagtggaagacgctccgcaagggtgtgctatgtgtgcaaagagcccgggcacttcattacggattgcccccacatcaaggattgcctccacttcaaggaagacaagaagaagcttgagaagaaggagaagcacaagcatagcaagcatgatcgctatggccaagctcaccttgggatgatcttcggctccgactccgagtcaagctcaagtgatgaagaaggagttgccacgttcgccgtcaagccttcatcaccaccgagactcttcaactactcaagtgatgaggatgctcccatttgcctcatggcaaaggagcctaaggtaccctctcccctcaagtcatttaatgttgatcttgttagtgatttggaggaagatgttgaggatgaggttatggatgacgagttgttcaaatccatagccaaggaatccataccacacttgagtgagttgcttaggagaattgagaatcaatatgcaactcttgagaggcaagaggaattgctcattcgtgagaaagagcggtctcatgaactcaagagtgaacttgctaaggagagagagaaaaatgaggctttggtacggctttacaagcaaaccaaagagtctcatgctaatcttgaggtggcgaacgctcaacttcaagagagagtggatgacttggacaaagcttacctctctcttgaagagaagttcgaaaccttaaagaatagtgtctctttccctagcgaggcatcgtgctccaaaattgtcccaagcaatgaaccatgtgtgaggtgcaaagatattgatattgaaacttgtgctactaactctacttctttgagtgctttgcaaaagcaaaacgagaagcttatgggactccttcataatggcttacttaagtgccatatgggtagtaaggccctaaaggagtacctaggctatcaaagggacaacttcaaccatgaaggtcttgggtatgttcctccacctaaaggaagggtggacaagagtgtgatgatcaagaagccccaatgtcttagcaactttgttaaggccaaatgtatccttcctaatgataatgcttctcattgttttgatgcatcttatgttcttaggaagaacgctagtggtcgcgttgttgctaagtatgttggcccaaggggtaaaaatatttctatcaagagagtgctttgggtgcctaaggcacttgttactaacatgagaggacccaagcaagaatatgtctccggtggaagaagttgggtgattgatagtggttgtactaatcatatgaccggagaagaatcaatgttttcatctcttgatccaaatggcacttctcaagagaacatcatctttggggacgatggaaagggaaaggctagcccatgttggtatgaggaatcttcacaaacttctaaagcacgacacatccttggactaacaaatattcaatttgagaaagatagggtgtgtagtgcatgtcaagccgggaaacaaattggagcacatcacccagtcaagaacgtaatgactactacaagaccgttggagcttcttcacatggacctcttcgggccaattgcttatctaagcattggaggtaacaaatatggtcttgttattgttgatgacttttcatgcttcacgtgggtgttcttcttgcatgacaagagtgagacacaagccatcttcaagaagtttgcaagaagagcccaaaacgagttcgacctcaagatcaagaacattcgaagcgacaacgtcaaggaattcaagaacacgtgcatcgagagtttccttgatgaagaaggcatcaagcatgagttctcggctccatactcacctcaacaaaatggagtagccgagaggaagaatcggactctcatcgagattgcgaggacaatgttggacgaatacaagacatcggaccgcttttgggccgaagccgtcaacaccgtatgtcacgacatcaaccgcctctatcttcaccgccttcttaagaagactccctatgagcttcttaccggtaacaaaccaaatgtctcttactttcgtgttttcggtagtaagtgctacattcttaataagaaggctagatcctcaaagtttgctcctaaagtggatggggggttcttgcttggatatgggtcaaatgagtgcgcataccgcgttttcaacaaaacctccggtattgttgagatcgcgcctgatgtgacatttgacgaaactaacggctctcaagtagagcaagttgactcacatgtgttaggtgaagaggaggaccctagagaagcaatcaaaaggttggctcttggagacgtacgtcctagggagccacaacaaggggcctcttcctcaacacaagtggagccacctacatcgacccaagccaatgatccctctacttcaagcttggatcaaggtgaagaaggcgagcaagtgccaccctcttcaataaatctagctcacccaagaatccaccaaagtatccaacgagatcaccccaccgacaacatcttaggagacatcaacaagggagtatccactcgttctcatattgcaaatttttgtgagcattactcgtttgtgtcttctcttgaacctctaagggtggaagaagctcttaatgatccggattgggtgatggcgatgcaagaggagttgaacaatttcaccaggaatgaagtgtggactttggtggagcgatctcggcaaaatgtgattggcacaaagtggatctttcgcaacaagcaagacgaggccggggtcgtgataaggaacaaagcgaggttagtggcgcaagggttcacccaaatcgaaggattagatttcggtgaaacttttgcgccggtagctagacttgagtcaattcgcatattgcttacttttgctactaacctcaattttaagctatatcaaatggatgtcaaaagcgccttcctcaacgggcttatcaacgagttggtatacgtggagcaaccaccgggcttcaaggatccaaaatatcccaaccacgtgtacaagctccacaaggcactctacgagcttaagcaagcccctagagcttggtatgagtgtcttcgaaattttcttgtgaaaaacggctttgagatcgggaaagccgattcaactctttttactaaaagacatgataatgatatttttgtctgccaaatatatgtcgatgacattatatttggttctactaacaagtcttttagtgaagagtttagtaggatgatgaccaagcgttttgagatgtccatgatgggtgaattgaagttcttcctcggccttcaaatcaagcaactcaaggaaggaactttcatttgccaaacaaagtatttaaaggacatgctcaagaagtttggaatggagaatgcgaagccaatccacactcccatgccatcaaatggccacctcgacctcaacgagcaaggtaaagacgtcgaccaaaaggtataccgttccatcattggctcactcctttacctttgtgcatctaggcctgatattatgcttagtgtgtgcatgtgtgcaagatttcaagccgctccgaaggagtgtcaccttgtggccgtgaagagaattcttagatatttagtgcacacacctaatcttggtctttggtatcctaagggagcgaggtttgatctcattggttatgccgatgcggattatgccgggtgcaaagtggataggaaaagcacatcgggtacttgccaattcttgggtaggtcccttgtttcttggtcttccaagaagcaaaactccgtcgccctatccaccgccgaagcggaatacatttcgacggggagttgttgtgctcaacttatttggatgaagcaaaccttgagagactatggcctcaatgtgtccaaaatcccactcctatgtgacaatgagagtgccattaagatagccaataatcccgtccaacattcccgaaccaaacatatagatattcgccaccatttcttgagagatcattccacaagaggcgacatagacatccaacatgtgagaatcgacaaacaattggcggatatcttcaccaagcctctagatgaagctaggttttgtgagttgagaagtgaactaaatatcttggattctcggaatgtggcttga

SEQ ID NO: 23935 - DNA, 237 bp, Oryza sativa
  unsure (1)..(237): unsure at all n locations
  Clone ID: PAT_MRT4530_28967C.1
ctaacatcatatcaaaaggcaatggcatcatcttttaaaaaaaatgaaaatggagggaatacgagtttgttgtntatatagatagtgatataagggagtatcgnattgcnctttnntncatggtnntcttatgnttaatngggtttgcagtacgcgtgggtgctcgacaagctcaaggccgagcgtagagannaggtatcaccattcnntatcgacntgtagnagtttcagngacca

SEQ ID NO: 23936 - DNA, 4242 bp, Oryza sativa
  Clone ID: PAT_MRT4530_28968C.1
atgtcaccgacagggccaattgcttatctaagcattggaggtaacaaatatggtctcgttattgttgatgacttcacgtgggtgttcttcttgcatgacaagagtgagacacaagcaatcttcaagaagtttgcaagaagagcccaaaacgagttcgacctcaagatcaagaacattcgaaccgacaacggcaaggagttcaagaacacgtgcatcgagagtttccttgatgaagaaggcatcaagcacgagttcttggctccatattcacctcaacaaaatggagtagccgagaggaagaataggactctcatcgagatggcgaggaccatgttggatgagtacaagacatcggactgtttttgggccgaagccgtcaacaccgcatgccacgccatcaaccgcctctatcttcaccgccttcttaagaagactccctatgagcttcttaccggtaacaaaccaaatgtctcttactttcgtgttttcggtagtaagtgctacattcttaataagaaggctagatcctcaaagtttgctcctaaagttgatgaggggttcttgcttgggcatgggtcaaatgaatgcgcataccgcgttttcaacaacacctccggtattgttgagatcgcgcgtgatgtgacatttgacgaaactaacggctctcaagtagagcaagtcgactcacatgtgttaggtgaagaggaggaccctagcgaagcaatcaaaagattggctcttggagacgtgcgtcctagggagccacaacaaggggcctcttcctcaacacaagtagagccacctacattaacccaagccgacaatccctccacttcaagcttggatcaaggtgaagaaggcgagcaagtgccaccctctccgataaatctagctcacccaagaatccaccaaagtatccaacgagatcaccccaccgacaacatcttaggagacatcaacaagggagtatccactcattctcgtattgcaaatttttgtgagcattactcgtttgtgtcttctattgaacctctaagggtggaagaagctcttaatgatccggattgggtgatggcgatgcaagaggagttgaacaatttcacccagaatgaagtgtggactttggtggagcgaccttggcaaaatgtgattggcacaaagtggatcttccgcaataagcaagacgaggccggggtcgtaataaggaacaaggcgaggttagtggcgcaagggtttacccaaatcgaaggattagattttggtgaaacttttgcgccaatagctagacttgagtcaattcgcatattgcttgcttttgctactaacctcaattttaagctatatcaaatggatgttaaaagcgccttcctcaacgggcccatcaacgagttggtatacgtggagcaaccaccgggcttcgaggatccgaagtatcccaaccacgtgtacaagctccacaaggcactctacgggcttaagcaagcccctagagcttggtatgagtgtcttcacaattttcttgtgaaaaacggctttgagatcgggaaagccgattcaactctttttactaaaagacatgataatgatatttttgtgtgccaaatatatgtcgatgacattatatttggttctactaacaagtcttttagtgaagagtttagtaggatgatgaccaaacgttttgagatgtccatgatgggtgaattaaagttcttcctcggccttcaaatcaagcaactcaaggaaggaaccttcatttgccaaacaaagtatttgaaggacatgctcaagaagtttggaatggagaatgcgaagccaatccacactcccatgccatcaaatggccacctcgacctcaacgagcaaggtaaagacgttgaccaaaaggtataccgttccatcattggctcacttatttacctttgtgcatctaagcccgatattatgcttagtgtgtgcatgtgtgcaagatttcaagccgctccgaaggagtgtcaccttgtggccgtgaagagaattcttagatatttagtgcacacacctaatcttggtctttggtatcctaagggagcgaggtttgatctcattggttatgccgatgcggattatgccgggtgcaaagtggataggaaaagcacatcgggtacttgccaattcttgggtaggtcccttgtttcttggtcttccaagaagcaaaactccgtcgccccatccaccgccgaagcggaatacgtttcgacggggagttgttgtgctcaacttctttggatgaagcaaaccttgagagactatggcctaaatgtgtccaaaatcccactcttatgtgacaatgagagcgccattaagttagccaataaccccatccaacattcccgaaccaagcatatagatattcgccaccatttcttgagagaccattccacaagaggcaacatagacatccaacatgtgagaaccgacaaacaattggcggatatcttcaccaagcctctagatgaagctaggttttgtgagttgagaaggtggtttccctccctcaactccttccaaatcactggttccccagtgattctcttagtggttcttgagtgtatcctcatgatcacgggtcagttcaagaatcaagtttactctcgccgtgggacaatgagttctcgaggtcgctctcccgcttccaaggctcgtcatgctatacggcgtatgtccgaatctcgcaaagatgccattgacgcgcaagctcaagcctctgaccaagcagctcaagtggctaatgtggagcatggtgctcctcttcctcctcgccgcagccgagtcagtggagaaagatcaagtgcacctgctaaaaaagtaaggagaggcaatcctacggattcttctgagccgggtcaaggtagtggttctcatgcaccatcctttgaggaagagattcatttagaagaggacattgccgctcagcaagccgctcaggaagaagggcctttctttatcactgctccctctagagatcctaattatcatcggagagtcataaggtggaaccgcaagtggactgaagtggagaaagagcgtaagaaagatctctacaaatttcaacagttgtccactgatcctcggttttggaacctttttcagcaggattactatgagacagtgaatgcacctaagaaggggcctattcttatgcagtgggttgattggaagtatatggaggagttgcatgattcaattattgatgaagtcattgaagcttgtgctcggcaaaacttgaaggaactcatgggcttgcaatacccatggtgcaaagaaatcttcgcacaattctatgccacactttattttgagcccaacaaagaaaagattattcattggatgacagatggcatcatatactccgtgacatatgctaagtttgctgccattttggggtttccgactcgctctcgcaccaatcgtgtcaagattcatgatgagaagcccatggacacaaattctcttcacttcttgtaccaagatgtggactatgagttaggcaccatcaaaggtctccttcccttctatgcctatctcaacaagctcttgcgcaaaactctcaatcccaaggaaggtgatgctagcaacgtccttgcctatacaagaaatttgctttacaagatgaaggctcacccacagctctttgacgcctttgacttcatctttgaagaaatccggcttatctccatgatgcctaagcgaggacttggctatgggccttacattatgaagatgattgagattgtgtccaagaagaagtttcacaaggaggtggcacataccgattaccaagtccgtcccatcaaggttgctgctgtgccggctggacgaaccactcgtgcttcttctcgtgccggtccctccgctaccgtcaccaagccggactccaactcgtccttgaggttcttcaagtccatcttcaacttatgcaagaccatctcagttcggcaagccaaggaacgcagagcaaggaagaaggacactcgacggatcaagaccctccttcgcaacacccatttgccgtgttctcccgatggttctgaggttgaggacagtggggaggatgtgattgaggacccttttgcagctgaggcaagctcctctcgtgcggatcatggcaaggctcctatggaggaagaagaagaggaggaggaaggtgactatgctgaggagtcaagtgaggagggcgaggattctgataaggatgagtga

SEQ ID NO: 23937 - DNA, 378 bp, Oryza sativa
  Clone ID: PAT_MRT4530_28969C.1
ataacagggcggatccttgagagcctgagaatggatccacgaaaagctgtggacgcttcttatgacctatacgaggaagagagagacgacttgctaaagcgtttatatcgtcgagcaaaggcaatggagggtgcatttaacagtattgttagaatcacatgcatcatgacggaatgcgcgatgtatctgttcccacggatttatctaccacagaaggcatgtgaggctgactgggctgtgaactaagcacctgatgcatgctacggtgtacacctctgtgatacgaccggcatcgtagtgactactggatcagtgtttggacaagttgcaaggacatggcacgtgagatgcacgatcctgccacaggaagagaagata

SEQ ID NO: 23938 - DNA, 634 bp, Oryza sativa
  Clone ID: PAT_MRT4530_2896C.1
caatgctaagactcctctggaaaaattggttgcagaggttgggtgtgagcccattttgcatatgcgacatttccaggcaacaaagagattaccagacaagctcgtgcaccatgttatccatggtaaaggagaacctacatcatagatgttcctggagctctattaatttcgtccacctggttacggaaaacaccacagttaccccgactgaatgcaaccttcagctcaagagtgcaactaccaactttgtggccgatgatgagatatccctgttcatggctttgctactggtggaaaaaagggaaaccagaatttgcaaggttagataacattgagctgaaaattggcggatatgtgtaagtgctagagtacacttgcgatgtacaacaattttgacattttgtgtgttgcatgagaccgatagtaaaaacagcaccggtatgtaaccgaaaccagtagtgtttggagcctcggagctggactgcggtggtttgaaaaggtgaaagttgattaaaagtacactcgaaacacttagtgaacttttttttagacatcagttaattactattacccggctttttggagagagccgaaaccacaagggtcaccaaagctcgctagtcgacggccgcaa

SEQ ID NO: 23939 - DNA, 4536 bp, Oryza sativa
  Clone ID: PAT_MRT4530_28970C.1
atgtcgggccaaacgggggaaggcaaagatggtgataagggagctacgtttccttatgactatccaactacatccacatcttatgtgagtacctatagcggcaaagctccgtacttcaatggtatggactatgccgcttggaagcataagatgaagatgcatttgaagtctattaacccatctatttggagaatagtcgaaaagggctatgttttgcagaatcccgaagatcccaccaaggaggacgacgagaatgagcacaagaacgctcaagccgccaatgcaatacttagtgccttgagtggaagtgagttcaaccgtgtggatggcattgagagtgccaaagtgatttgggacacgcttcggaacttgcatgaaggcatggatagtgttcgtgagtccaaggtggagatcctcaaggggcaatttgagagatttgtgatgctggatggtgagagcccaagtgacatgtatgaccggttgagcaagattatcaatgagatcaagggacttggttccaaggacatgaccgatgaggttgtggtcaagaagatggttcgagcaatcactccaaggaactctaccttggttaccatcattcatgagcgtccggactacaagactctcacacctcatgatttgctcggacgcattcttgcccatgacatgcttgtgcaagagtccaaggaggtcatccaatacatcaaccaaagctcaacgacaagcatcaagaaggaagacttggcattgaaggcaaaggaagaagaagaagagaaccacaagagcaagagcaaggaggagatcgatgatgaagaaatggctctcttcgtcaagaagttcggcaagtttatgaggcgaagcggcttcttcaagggaaattcttccaagcatcactccaacaagtcaagtggaagacattccgcaagagatggttcccacatcaaggaagataagaagaaggatgagaagaaggagaagtataagcatagcaagcgggaacattatggccaagctcaccttgggatgattttcggctctgattccaagtcaagctcaagtgatgaagaaggagttgccacgttcgctgtcaagcctccatcaccgccgagactcttcgactactcaagtgatgaggatgctcccatttgcctcatggcaaaggagcctaaggtaccttctcctctcaaatcatttaatgatgatcttgttagtgatgaggaggatgaggttgaggatgaggttatggatgacgaattgttcaagtccataactaaggaatctctaccacacttgagtgagttgcttgggagaattgaggaccaatatgcaactcttgagaggcaagaggctttgctcattcgtgagaaagagcgatctcatgaactcaagagtgagcttgctaaggagagagagaaaaatgaggctttggcacggctttacaagcaaaccaaagagtctcatgctaatcttggggtggcgaacgctcaatttcaagagagagtggatggcttggacaaagcatacatctctcttgaagagaagttcgaaaccttaaagaatagtgtctctctccctagcgagccgtcttgttccaaaattctcccaagcaatgaatcatgtgtgagatgcaaagatattgatattgaagcttgtgctactaactctatttctttgagtgctttgcaaaagcaaaatgagaagcttatgggactccttcacaatggcctacttaagtgccatatgggtagtaaggccctaaaggagtacctaggctatcaaagggacaacttcaaccatgagggtctttggtatgttcctccaccaaaaggaaaggtggacaagagtatgacgatcaagaggccccaaggtcttagcaattttgttaaggccaaaagtatccttcctaatgattatgcttcacattgttcttttgatgcatcttatgttcttaggaagaatgctagtggtcgtgttgttgctaagtatgtaggcccaaggggcaaaaatgtttccatcaagagagttctttgggtgcctaaggcacttgtcactaacatgagaggacccaagcaagaatatctctccggtggaagaagttgggtgatcgatagtggatgcacaaatcacatgaccggagaagaatcaatgttttgctcccttgatcctaatggctctttgcaagagaacatagtcttcggggacgatggaaagggaaaagtaatgggattgggtaagattgcaatctacaatgacctttccatttctaacgtcctcttggtaaaatctctaaactataatctcttgtccgtttctcaattgtgttccatgggctacaattgtctttttaccgatgttgatgtgaccgtatttagaagggatgactcctcgatagtctttaagggtgttctcaagggcaagctttatcttgtggatttttcctcaactaaagccaaacatgagacatgcttagtggctaagtctgacatggggtggctttggcatcggaggctagcacatgttggtatgaggaatcttcacaagcttctaaagcacgatcacatccttggtctaacaaatgtactttttgagaaagatatggtgtgtagcgcgtgtcaagccaggaaacaaattggagctcatcacccggtcaagaacgtaatgacaactacaagaccgttggaatttctacacatggacctcttcgggccaattgcttatctaagcattggaggtaacaaatatggtctcgttattgttgatgatttttcacgcttcacgtgggtgttctttttgcatgacaagagtgagacacaagcaatcttcaagaagtttgcaagaagagcccaaaacgagttcgacctcaagatcaagaacattcgaagcgacaacggcaaggagttcaagaacatgtgcatcgagagtttccttgatgaagaaggcatcaagcacgagttctcggctgcatattcacctcaacaaaatggagtagccgagaggaagaataggactctcatcgaaatggcgaggaccatgttggatgagtacaagacatcagaccatttttgggccgaagccgtcaacaccgcatgccacgccatcaaccgcctctatcttcaccgccttcttaagaagactccctatgagcttcttaccggtaacaaaccaaatgtctcttgctttcgtgttttcggtagtaagtgctacattcttaataagaaggctagatcctcaaagtttgctcctaaagttgatgaggggttcttgcttgggtatgggtcaaatgaatgcgcataccgcgttttcaacaaaacctccggtattgttgagatcgcgcgtgatgtgacatttgacgaaactaatggctctcaagtagagcaagttgactcacatgtgttaggtgaagaggaggaccctagcgaagcaatcaaaagattggctcttggagacgtgcgtcctagggagccacaacaaggggcctcttcctcaacacaagtggagccatctacatcaacccaagtcgacaatccctccacttcaagcttgaatcaaggtgaagaaggcgagcaagtgccaccctctccgataaatctagctcacccaagaatccaccaaagtatccaacgagatcaccccaccgacaacatcttaggagacatcaacaagggagtatccactcgttctcgtattacaaatttttgtgagcattactcgtttgtgtcttctattgaacctctaaaggtggaagaagctcttaatgatccggattgggtgatggcgatgcaagaggagttgaacaatttcacccggaatgaactatatcaaatggatgtcaaaagcgccttcctcaacgggcctatcaacgagttggtatacgtggagcaaccaccgggcttcgaggatccaaaatatcccaaccacgtatacaagctccacaaggcactctacgggcttaagcaagcccctagagcttggtatgagtgtcttcgcaattttcttgtgaaaaacgactttgagaacgggaaagccgattcaactctttttactaaaaggcatgataatgatatttttgtgtgccaaatatatgtcgatgacatcatatttggttctactaacaagtcttttagtgaagagtttagtaggatgatgaccaagcgttttgagatgtccatgatgggtgaattgaagttcttcctcggccttcaaatcaagcaactcaaggaaggaactttcatttgccaaacaaagtatttaaaggacatgctcaagaagtttggaatggagaatgcgaagccaatccacactcccatgccatcaaatggccacctcgacctcaacgagcaaggtaaagacgtcgaccaaaaggcccttagtgatcgtcaaggttgctacggccccgtcgtcatcttcgtccatgcctccgcgtcgtcaagcgttgcgccggtcgtgtctcgccttcgtccaaagatcaccggcgcaatgtggggcccgcctgtcaggtcgttgtctacctccggctgcccgccgcccgagccctag

SEQ ID NO: 23940 - DNA, 3933 bp, Oryza sativa
  Clone ID: PAT_MRT4530_28971C.1
atgtcgggtcaaacggggaatggcaaggatggtgataagggagctacgtttccttatgactatccctccacatctgcatcttatgtgagcacctatagcggcaaagctccgtacttcaatggtacggactatgccgcttggaaacataagatgaagatgcatttgaaatctattaaccctttgatttggagaatagtcgaaaaaggctatgttttgcagaatcccgtggaacccaccaaggaggacgacaagaacgagcacaagaacgctcaagccgctaatgcaattcttagcgccttgagtggaagtgatttcaaccgtgtggacggcattgagagtgccaaagtgatttgggacacgcttcggagtttgcatgaagttacggatagtgttagcgagttcaaggtggagattctcaaggggcagtttgagcggtttgtgatgttggatggtgagagcccaagcgacatgtatgatcgattaagcaagatcgttaatgagatcaaggtacttggctctaaggacatgaccaatgaggttgtggtcaagaagatggttcgggcaatcactccaaggaactctaccttggtgaccatcattcgtgagcgtccggactacaagactctcacacctcatgacttgctcgggcgtatccttgcccatgacatgcttgagcaagagtccaaggaggtcatccaatacatcaaccaaacctcaaccacaagcattaagaaggaagacttggcattgaaggcgaaggaagaagaagaagagagtcgcaagagcaagagcaagagcaaggcggagatcgatgatgaagagatggctctcttcgtcaagaagttcgacaagttcatgaagcaaagcggcttcttcaaggaaagttcgtccaagtattcctccaacaagtcaagtggaagacactccgcaagggtgtgctatgtgtgcaaagagcccgagcacttcattgacgattgcccccacatcaaggattgcccccacttcaaggaagacaagaagaagcttgagaagaacgagaagcacaagcatagcaagcatgatcgctatggccaagctcaccttggggtgatcttcggctccgacttcgagtcaagctcaagtgatgaagaaggagttgccacattcgccgtcaagccttcatcaccaccgagactcttcaactactcaagtgatgaggatgctcccatttgcctcatggcaaaggagcctaaggtaccctctcccctcaagtcatttaatgttgatcttgttagtgatgaggaggaagatgttgaggatgaggttatggatgacgagttgttcaaatccatagccaaggaatccataccacacttgagtgagttgcttgggagaattgagaatcaatatgcaaaccttgagaggcaagaggaattgctcattcgtgagaaagagcggtctcatgaactcaagagtgaacttgctaaggagagagagaaaaatgaggctttggtacggctttacaagcaaaccaaagagtctcatactaatcttgaggtggcgaacgctcaacttcaagagagagtggatggcttggacaaagcttacctctctcttgaagagaagttcgaaaccttaaagaatagtgtctctctccctagcgaggcatcgtgctccaaaattgtcccaagcaacgaaccatgtgtgaggtgcaaagatattgatattgaagcttgtagtactaactctacttctttgagtgctttacaaaagcaaaatgagaagcttatgggactccttcataatggcctacttaagtgccatatgggtagtaaggcgctaaaggagtacctaggctatcaaagggacaacttcaaccatgaaggtcttgggtatgtttctccacctaaaggaaaggtggacaagagtgtgatgatcaagaatccccaaggtcttagcaactttgttaaggccaaatgtatccttcctaatgattatgcttctcattgttcttttgatacatcttatgttcttaggaaaaatgctaatggtcgtgctgttgctaaaagggatgactcatccgtagtctttaagggtgttctcgagggcaagctttatcttgtggattttttctcaactaaagccaaacatgagacatgcttagtggctaagtccaacatgaggtggctttggcatcggaggctaacccatgtcggtatgaggaatcttcacaagcttctaaagcacgatcacatccttggactaacaaatgttcaatttgagaaagatagggtgtgtagtgcatgtcaagccgggaaacaaattggagcacatcaccccgtcaagaacgtaatgattactacaagaccgttggagcttcttcacatggacctcttcgggccaattgcttatctaagcattggaggtgacaaatatggtcttgttattgttgatgacttttcacgtttcacgtgggtgttcttcttgcatgacaagagtgagacacaagccatcttcaagaagtttgaaagaagagcccaaaacgagttcgacctcaagatcaagaacattcgaagcgacaacggcaaggagttcaagaacactaagtgctacattcttaataagaaggctagatcctcaaagtttgctcctaaagtggatgaggggttcttgcttgggtataggtcaaatgagtgcgcataccgtgttttcaacaaaacctccggtattgttgagatcgcgcgtgatgtgacatttgatgaaattaacggctctcaagtagagcaagttgactcacatgtgttaggtgaaggggaggaccctaacgaaacaatcaaaagggtggaagaagctcttaatgatccggattgggggatggcgatgcaagaggagttgaacaacttcacccggaatgaagtgtggactttggtggagcgacctcggcaaaatgtgattggcacaaagtggatctttcgcaacaagcaagacgaggccagggtcgtgataaggaacaaggcgaaattagtggcgcaagggttcacccaaatcgatggattagatttcggtgaaacttttgcgccggtagctagacttgagtcaattcgcatattgcttgcttttgctactaacctcaattttaagctatttcaaatcgatgtcaaaagcgtcttcctcaacgggcctatcaacgagttggtatacgtggagcaaccactgggcttcgaggatccaaaatatcccatcaacgtgtacaagctccacaaggcactctacggtcttaagcaagcccctagagcttggtatgagtgtcttcacaattttcttgtgaaaaacggctttgagatcgggaaagccgattcaactctttttactaaaagatatgataatgatatttttgtgtgccaaatatatgtcgatgacattatatttggttctactaacaagtcttttaatgaagagtttagtaggatgatgaccaagcgttttgagatgtccatgatgggtgaattgaagttcttcctcggccttcaaatcaagcaactcaaggaaggaactttcatttgccaaacaaagtatttaaaggacatgctcaagaagtttggaatggagaatgcgaagccaatccacactcccatgccatcaaatggccacctcgacctcaacgagcaaggtaaagacgtcgaccaaaaggtataccgttccatcattggctcactcctttacctttgtgcatctaggcccgatattatgcttagtgtgtgcatgtgtgcaagatttcaagccgctctgaaggagtgtcaccttgtggccatgaagagaattcttagatatgtgcacacacctaatcttggtctttggtatcctaagggagcgagttttgatctcattggttatgccgatgcggattatgccgggtgcaaagtggataggaaaagcacattgggtacttgctaa

SEQ ID NO: 23941 - DNA, 1910 bp, Oryza sativa
  Clone ID: PAT_MRT4530_28972C.1
atggcgcagttcccgctcatgtcgaagagccggaagatccaccgcatggtgatggagcacgaggcagagcaaccggcgggccagcggcggcgaaggaggaggaggaggagggggagtgagggaagcaatgctggagaggaaggtgatgagcagacggagatagaggaagcagaggaggaggaggaagacgaggaagaggaggaggaggggcaggcgttctgcattgcgttcccggacttccccggcgggccgggcacgttcgagacggcggcgaagttctgctacggcgtccgcgtcgagctcaccgcctggaacgtcgcgccgctgcggtgcgcggcggagtacctggagatgacggaggagcacgcggaggacaacctcgcggcgcgcgcggaggccttcctggagcaggccgtgctccggcaccccggcgaggccaccaaggcgctcaagtcctgcgaggagctgctgccgcacgccgaggagctcggcattgtcggccgctgcgtggaggccatcgccgcgcgctcgtcggccgcgtcgcgctcctggttcgacgacctcgccgtcctcgggctgcacatgtacaagcgggtgatggcggccatggccgcgcgcgccgacgtgaggacggaggccagggagagctgcctcgtgtcgtacgccaggggcaccatccccggcctgtcgaggtcgatgcggcggcggctcgcgtcggcgccggtgtcgtcggaggtggagcagagggacctcctggaggcggtggtcgccagcctccccgccgacaagtgctcggggcgcgtcgtcaccgccaagttcctgttcgcgctgctgcggacggcgcacatcctgcgcgcgtcggacgcggcgtgcgcggcgctcgagcggaaggccgcgacgcagctggagcacgccacgctggaggacgtgctcatcccgagctactccggcgccacggagacgctctacgacgtggactgcgtcgagcgcgtggtcaggcacttcctcgccgaggaggaggaccacggcgaggccgaggcgtcgacctcggcggccgctgcgatcaccgaggaggcgccggcgccggcagccacgacgctgtcgcggccgtccgccgtggccatggtgcacgtcggcaagctggtcgacagctacctcgccgagatcgcgtccgacgccaacctgaagcccgccaagttctgcgagctcgcgctggcgttgccggaccacgcccgcgtctacgacgacggcgtgtaccgcgccgtggacatctacctcaaggcgcacccgcggctggcggcggaggagagggacagggtgtgcggcgtggtggactgcaggaagctgacggtggaggcgtgcacgcacgcggcgcagaacgagcgcctcccgctgcgcgcggtgctgcaggtgctcttcttcgagcagctgcagcttcgccgcgccatcaccggcacgctgctgtcatccgccggcgccggggccacgcagacgcggctccacctccaccgctaccagcagccacggccggcggcgatggcggcccggcactccgccgacgccggcggcggccgcggcgaggcggcgtggcggtcgacggcgacgcaggacagccaggtgctgcggctggacatggacagcatgaggaaccgggtgcaggacctggagcgggagtgctccagcatgaggagggccatcaagaagatcgatggccgcagcgccgcggcgtcgccgcgccacagcgacgccggagacgacgacgccgcgtcggccgacgggtcgtcgaggccggcgaactggcggtcgcggtacggctgcaagttcagcacgcaggtgtgcgactcgcacgcgcgcaacgtcgtggcgtcgagagcgtcacggatgggaatgagcccataggcgaatcgtct

SEQ ID NO: 23942 - DNA, 1098 bp, Oryza sativa
  Clone ID: PAT_MRT4530_28973C.1
atgacggggcctgccacaaggcagcagacagctgtcccgtggtctagagtaaaaatgtccgcaagtgctagtccagaggccgccccgaagatagtgccagctagggcacctttaatttctagatatggacatcgaacggataagctccaccgtgaagacgatggcctctcgcgtacgagccccacggccgccgcctgtgccgtctgggctcagcgccgccggcgacgcttgggctgcgcacctactgcccacgccattgccgcctgcgccgtccaggttcttggatcctatttaggaacacttgtcaggaagccacatctagctccactgaacattcttaaatggaatgataaactttataagagaatatatcatccaaaattgatttctgaagtacagagaaagtttgcaattcatggaagagctaaggattggcttctccaccagttagatggaaaatggaggcaatacaagtcaaatctgaagaaaaagtattacaaggctaacttacccatggaacgagtattgcaaacggtaccccaaactgttaatgaatctcaatggcctacactagtttcttactggtactcagaggactctaagaaaatcagtgatcaaaaccaagagaatgcacaaaatattaagcatccacacacattaggaagaaagagctttgcaagaaagaggaaagagctggaacatgatggagtggaggtggacagagcaaccttctttgatgaatgccataagacaaaagatggcagatatgttaatgatgctacacaagacaaaatgaatgaggtatatatgaaattggctgagaaaagagtagatggccaagaactcagtgaagctgattttgaacaagctatgttagaagtgtttggaaaggatcataatggtagagttagaggcatgggtccaaccattactccaacagactattatggtggaagattttcgaatatgtcaggaagaagtgaacaagggagtagctccagtaatgtaaatggcttcattagttttatggtatcatatcttgctgagaaatatccagaagataatttgatgtctaggctgccaccttcactttgctag

SEQ ID NO: 23943 - DNA, 2674 bp, Oryza sativa
  Clone ID: PAT_MRT4530_28974C.1
ctagcttatatacgatcactatagggaccactttgtacaagaaagctgggtacgcgtagcttgggcccctcgagggatactctagagcggccgctgctcctgaagggagaagaggaaaaaacccgactggttttggccggccaagtcgcgaagcgcttgccaagaggggtggtatagcgactgtacaatatcaatatggcagggtcttaatctctctcacatgttatgatggaatcgctctcacatgaagtagctcagtgctttcttcttcctcgaaccgccctcgccatataggtcgttccattgaagaagttcattcatgtttgctgaatcagatgaaacgcttgcacaaacctgctcatgggcagatttgaaatcatctaaggtcagaggacgaatgtcctcactaccatacaatgcaggctcaggcctgccttctgcttttgccacatttttctccttcttttccttctcaaggatttctcgaatggggtaatgagctgcggtcacgcatagattcttcaggtcacttcctgaatatccatcggtcatagtggcaagagaatccatatcaatacctggagccaactcttcctttgccaatattactttcagaatcttttctctattcgatgcgtcaggtaagttaaccattaacctgcgcgggaacctcctaatgacagcctcatccaggtcgaaaggcctatttgtggcaccaagaaccagtacacgttctttatctttagtgcgtaatccatcccaattcaccataaattcgtttttcatcttgcgcatcgcttcatgctcccctggattctctctccttcctagcatactatcaacctcatcaatgaatataacgcttggagctattttacttgctaatgagaaaacagcttttacatatttctctccttcgccaaaccacttcgatgtaatgcttgacattgatatgttaatgaagttagcacctgcttcagttgctactgccttagcaagcatggttttcccagtaccaggaggtccaaacagcaatattcccttgcaaggcttcgttagctgtcctttgcagcacaattcaggcctttgcagaggaagcatcaccagctccttcaatgctgtcttttacattttccaaggctccaatatcatcaaaggtgactccaatgtcattaggtggtataacatctgccagaagccttttctcaaattcgttctctgtgacaacatccttcagtgatttttttgagctcttgttatcactttgcatattctgcagcatgttgagcccatgcttaaggctttcgctcgccaatacaagtttaccatccttggagatctcgactttattgtgcttaaggtgataactaacagcatagccaactatcttgtccacattttcgttggtcagtgattgatctttgatgaataattcttcaaggtcactgcattcaattccattgcggctcagaaacgtgcgaatgctaccaacattggatttagctttaagggtttcaacgtcacgatccagttgttgcttccaatctgtgagtaatgtttcatcctgtggaagttggatcgaaattttgttagggaaaagtttatttagatgtttcattgccttcggactttctttgttcctttcatgcaaccgactaccaaaactatccgggaaaaggtcaaatagcgtctggctgctactagcaaactttgtaaaaagaaatccacctgggtgggccttctctttgcggctgtccatttgagtgtgagatcctataataagcacaccagatggaagcgcttcaagcttattcctcaaagatgaaagtgactctgtaattccagtgaatgatttctctacatccttaagtaacactatcatagggccagctttgtgttcctctgagatgacttcaattaactcggccattgctagcctttcaacctcttcaccaccagaaaagtcagggcgaagtaagtcagcagagcagaagaaaccatgatcttcctcgcacaaaccaccaagatcattaccatcagggatctgcttgtcaaatcgaactccaattttggaagacccattttcttcaaaagcaagcatcactctgcctcgataaccataactgggtcccctttgcgacaatgacgattgctgagctggacccacatatcttaccctatccccttctctaaaagtatagctcttggatgtagctgttgatgattcctgtttgggcaaagatgcagaatgcagagtcgatgtacccacgatatcagcatgcacactagaaggttgtacagctggcctcctgaagtgcatagcgtctgccaaggaagagcggttcttatgaagaattgccaacttctcactaccagccttatcccctgacttatcagacttcgcagcatctttctgcgactctgggtcctttgaaggcgccccaggcaacaaaagcgaatcaacaacaagtagcctagcaccgaaatgttttgcaagtgcctttatcaatgtttcctgataaatctccgaacctgctggaccagataatagaatccgttggtttattgatgaaatttctgagaattgtttgatgaattccttcttttccaagtgtatgaatgcacatgataacagcacattctttgtgttatcgctgaggtaataaggataata

SEQ ID NO: 23944 - DNA, 166 bp, Oryza sativa
  Clone ID: PAT_MRT4530_28975C.1
cgtcgtcccgaccgatgtcgcccgtaaaacctccgctgcctccacaccatctgggccaccatctccacaccgtcctcgctgccagatctggtggaggggaggtccagcctgccgcctccacaccgtccaccactaccgcagctcccatcctactggatctggctga

SEQ ID NO: 23945 - DNA, 269 bp, Oryza sativa
  Clone ID: PAT_MRT4530_28976C.1
gtctagaaaaccattggatggtaaggttctcaagctgttgttccccattctggcaatcacaattcagagacaacataaggtgctctagttcaggtagagagatacaaagtcgagcatatatagcccctatttgaaatgaatgcacacccctagataaagaaaagctgtaatgtagagtgaactctgagataacaatgtggacaaaccttagatccttgagtgatgggaaggtgagcctagctcctcttgaaaagaagagattcaaccta

SEQ ID NO: 23946 - DNA, 195 bp, Oryza sativa
  Clone ID: PAT_MRT4530_28977C.1
atgcagcacgagggccacaccgacaccagcgctccgccacacaccgcgcttgcagggggcctgcgtgcctgggcctgtggctccgcatcgttcccgcactcatcgtcgttgcagcatgagggccacgccagcgttggacatgtcatagccaccgcgccgttggagctatatgcgagccgcacatggcaagcaagg

SEQ ID NO: 23947 - DNA, 455 bp, Oryza sativa
  unsure (1)..(455): unsure at all n locations
  Clone ID: PAT_MRT4530_28978C.1
gcgcggacgcgtgcgttctctttgtatggctacaacaagatagttcttgtaacacttagcatcagaattcattattnccaaactgataatggtgaataccatgatctgccaatggaactcaacanctcatcacttctaattaccataggagataatcaagttaatgctttgattgctcctgcatcactgcttgcccataatgctgaattggacgggaagttgcggttcataacatcgatgacagcgagtgttaagtcatttacaatgcgatgaacattaagtttgataactctatcaacgcaagttttatcaacccatctaaggtgagaagatacatgctccataactcatcctgaatggttcaatggtcctcaccttacaggccatgggtagtgagcatccaaatcccaatgcttctttttattatctaacagtaggtaccatcacactatttc

SEQ ID NO: 23948 - DNA, 530 bp, Oryza sativa
  Clone ID: PAT_MRT4530_28979C.1
gctcagtggttaacaaatccgattagaaaccatgaggttgcgaggtttgatccctggccttgctcagtgggttgaggatccgtcgttgccgtgagctgtggtgtaggttgcagacacagctcggatcccacgttgctgtggctctggcaaaggccagggactacagctccgattcaacccctagcctgggaacctccatatgccgtgggagcggtcctagaaaaggcaaaaagacaaaaaataaataaataaaaaattttagtgaagctattaacttagcaagtttttttcatctctgttatttgcttctcacaattgagcttgggagaagagtggattattaagtttttgctgtttttttctctgtgtttattcaatagagctaatatatcctttaagctttttgctattaatgagtattataattaactttctagaaaagagtctaatcgtggaaggcaagagggaaaagaaaaaagtagagaggttgacaatgcaagtctcttccttacaaagagagccatttacaa

SEQ ID NO: 23949 - DNA, 1008 bp, Oryza sativa
  Clone ID: PAT_MRT4530_2897C.1
atgggcgtccatgtcttcaccgaccagctggccttcgccgccgccgactggtgtttccgcctgcacggctggcctattatgccgccgctgttgggcgtctacgacttcaccaccggcctgcctccatcgccgccgactggtgtccccgcctatacggcatcagtatcttcaacacaagctgcctacgtttgccatggctgccgactggtgtttccgcctgcacgctggcctattatgccactgttgatgggcgtctacgtcttcaccgaccggcttgccttcgccgccgccgactggtgtctccgtctgcacggctggcctattatgccgtcgttgttgggcgtctacgactccaccaccggcctgcctccatcgtcgccgactggtgtttccgcctgcacgctggcctattatgccaccgttgatgggcgtctgcgtcttcaccgaccggcttgccttcgccgccaccgactggtgtctccgtctgcacggctggcctattatgctgtcgttgttgggcgtctacgactccaccaccggcctgcctccatcgccgccgactggtgtttccgtctgcacggctggcctattatgccgtcgttgttgggcgtctacgactccaccaccggcctgcctccatcgtcgccgactggtgtttccgcctgcacgctggcctattatgccaccgttgatgggcgtctgcgtcttcaccgaccggcttgccttcgccgccgccgactggtgtctccgtctgcacggctggcctattatgctgtcgttgttgggcgtctacgactccaccaccggcctgcctccatcgccgccgactggtgtttccgtctgcacggctggcctattatgccgccgttgttgggcgtctacgtcttcatcgaccggccgcctcgtccgccgccgactggtgtcaccgcctacacggctggcctattatgccgccgttgttgggcatctacatcttcatcgccggtcgtctcgtctgctgctgactag

SEQ ID NO: 23950 - DNA, 879 bp, Oryza sativa
  Clone ID: PAT_MRT4530_28980C.1
gcaaactaaggctaggctcgccgcgagaggaaggtaagtaagtacgtacatttgcgcgaggtggacgagcttgacgatggcgagtgggcaacgagcggtcggcgaggggagcggtggcctccgcccgacgacgcacgtcgcgggcggcggcgggagcgcgcgcggggagtatttcaggtgcaagacgtgcagcaagacgttcacgtcgttccaggcgctcggcgggcaccggacggggcacacgcggatggcggcgcggcagcggcaggagcacggcgccgcgggggccgccgtcgtgggggctaccaacaaccagcggcgggtggtttccgcccaccagtggcacctgtgcgccgtgtgcggggtcgagttccgcatggggcaggcgctcggcgggcacatgcggcggcacagaggcgaggcggcagcggcgacgccgccgccggcggctgcggctgcgagcgccggcgccgtgtccagcatggagccgccggagatgatcgacttgaacagcccgccggcggtcgaggaggccggtgaaggtgatcagaggttgagcgtgcggaacaggagccccatctgcttaatctgctcgtgtagggtggtgttctctgtttggtgattgtgtgcgcgcggttgcgtttccaatgccattctagtgggaccaaggaagttataaaataaagtggggccaaggatctcgatccgtcttaaaaaaaacttaatttagtaattggataggacaaaaaatggatatcccccccccttgtattagattatgtcctatccaagtactaggttgagttttttttggccggagggagtatgtagtataatatgtttgtgcattttccgtgtaaaaaaaaaaagtgccctagc

SEQ ID NO: 23951 - DNA, 573 bp, Oryza sativa
  Clone ID: PAT_MRT4530_28981C.1
tatatcagatcaatccagggtcgagtcaattgcaagcaacgcgaagtcaaacgacaaatcgaaatgcatgtctcatatatatatcacaattaaataggagtaaattacgttcagggtaagaacttaggattttttttttaccatatgtatcagccggacacagcattccatatattttccacaaagagtaaattggcaccaggatatattggaccatacaaaattcaagctagacgtgaagaagttgcatatcagttggaattactagaagaatttgcaggtatacatctagtatttcatgtatcacaattaaggaagtgtctcagaaaaccaacaaatcaagttccactacaagaactagaactacaaccagacctaaaatatgaagaaatgcctgaacggattttagagacagatgaaagaagacccaggaatagaagtactacattttgttgagttcaatggaaaaatcacactgaagatgaagctacttgggaaaaacggttggaattgtagcgtgatttttcagaactattcttcctttgagctgaatctcggggaagtgattctctt

SEQ ID NO: 23952 - DNA, 331 bp, Oryza sativa
  Clone ID: PAT_MRT4530_28982C.1
accttgttcaggccatcagcgcacgcagctacactccagcagtttgctgatctctactttcgactcggaatctggctcaagctcacagcatctattggccttttaacgtgccatctagactatggtatctaccctagcgtcactatggtgcacccagtaccattaccacccttggcggtgctcttgtatatgagttttaacagtactagtggattcggcaagttaaaacataagctcagatatcatcatatctgacatgtgaaaccttctgcggtcgatataaactagaacataaagtctgtctttcatatttaaaaaaaaaaaaaaaaaa

SEQ ID NO: 23953 - DNA, 330 bp, Oryza sativa
  Clone ID: PAT_MRT4530_28983C.1
atggaattgtacccgatggttgaaaaacctgttgaactccttggagctcagctcttccatcgttgcatatcgatgatgagcaggacggacgtggacttccagaggttgcgccagcgcctggataggatgcaggtcatcatggcctcatccgccggcagcaagctctgtcgagccctgaactctaacaaaccacgatttagcgttttgaagttgggaggtggtgaaaaagttagggggcaaggcggctttagagggatgaccgtaggcattgatggagctgtgagattggaggagagcattggccaagggataaaacaaagagtgttctaa

SEQ ID NO: 23954 - DNA, 600 bp, Oryza sativa
  Clone ID: PAT_MRT4530_28984C.1
tgcagggaaaagatgataaagttagttgacctgtattatttggctttggatgctccaaagactgggaacaaggttagttccaatcttgggcttacacattcttcagtttcaaatgcttttacacagtactgaatccttattacaatgattcatgaacggatgaaccaagtgtagttatctgaacaactcgtgattcattacaatgattcatgaactgccaatattttatacggatagctgcagtgggtgtccagtacatagtaataagctgattattggataatgttgtaattaacatagttcaatataagttagaaatggaccagctacccggtgtccagagcaccatggtggttggaatagttgcatggtgacaggaatacgtttaacgtatgaagcagtgagatcaagtagggctacaagataaagataatagatgaaatgtgcaggtgtatctttattattttatatttgatgctttgtaagaccaaagttcattacatgggaatgcatattgcacttcaacagtttatctgctgtcccaacaggtcaatattccaagtgatctgatggtaaaacaatacccccacttcatgggcc

SEQ ID NO: 23955 - DNA, 714 bp, Oryza sativa
  Clone ID: PAT_MRT4530_28985C.1
atggaagacacccatgacaatcaacatacacccaccagaagctacaacatacaagccaacatacgccaagacacgctgccggatatcgacttcagggataggcatggctattcccctacggtgtctccagataccgtcaggagatacgaaagcgctatctctgatatcgccgggcatggattcgaggaggaagactaccctgttgtcgactacgagtcagaccttcagatcgacatgtcgacaactcaatctcttacaccgcaacattcattggtgttcgagagtccgctcgctcactggttctcgcaccagtacgcagcaatctctcacaccgcaacttccatcggtgttcaagggataattctgctcgctcactggttctcgcaccagtacgcagcaatctctcgcaccgcaccttccatcggtgttcgagggataattctgctcgctcactggttctcgcaccaggacgcagcaatctctcgcaccgcaccttccattggtgttcgagggataattctgctcgcttactggttctcgcaccagtacgcagcaatctctcgcactgcaccttccatcgcaatctctcgcaccgcaccttccatcggtgttcgagagataattctgctcgctcactggttctcgcaccagaaaattctattcgacattgtggaatactccatgtctctatggttctacaccgagatcgactaa

SEQ ID NO: 23956 - DNA, 1065 bp, Oryza sativa
  Clone ID: PAT_MRT4530_28986C.1
ctacttgtcttcctctcccctcctgcatggggatccaacggggaaggagggcttgacccccttccggtacccacctttggattcacccctgccggccatgtggacagatgcaatcctgccatctcctgttgtccctattcctgctgacaccgagacctgccatatggagacggaggcggccggcgggatggaggcgccgaggcggaggcgcgctggctggagatgaaggtggtgcgatggcggcatcaaggcggaggtgggctcgatgtcgttggaggcggcggcgaggtggaggcaggctggctggagggcggaggtggcgcagcggcgcgatggaggtggagggtggaggcagcgccggtgtgatggaggcggaggcgacgtgaccgcgggtccacgctgcgtgagctcgagcgcgatggatgggcgaggcggcgacgcggcgttgtggctctccctagcccccagccttgtcatcagagaatcgttctcggaggagaaggctcttggacccttgacatggtcttttgtctctacaggatccgacaaagccttatcggctctgggcgtccccagccgaagttcccttaggttcctcggaggcctgctgtcaactttgttgaaatagaggtagtaggagagtcgttacaccgctggtcgagaaccaggcagtagtcataactcgaccatggtcgagaaccaggcagtagtcgtaactcgaccacttaaagtggaaatagtgggagaaacgctacatcgctggtcgaggaccaggcagtagtcgtaactcgaccacttaaagtggaaatagtgggagaaacgctacatcgctggtcgaggaccaggcagtagtcgtaactcgaccacaggcagtagtcgtaactcgaccactagaagcaaatgtacgagagattactacgatcaactggttgagaaccggtgagtaggtgtccctcgatcatttggagtcgtggtacgagaaccgctacgctgccggtcgaagaccagtcgtagctgttcctcaacctctgaagtcatggtgcgaggaccgctacgatgccgtag

SEQ ID NO: 23957 - DNA, 204 bp, Oryza sativa
  Clone ID: PAT_MRT4530_28987C.1
ctaatagattaaaacttcggaaaatcataactaaataaccgtagatccgttttaggtggttcaagtttctaaatttttctaaaatcaagatctacatgttaaaaatatccacatgtactgtttatgcttgtttttgtactgttttgttgattttgtttatttgctttagtttccgacgtttccggaggagagccgtttccgttg

SEQ ID NO: 23958 - DNA, 1290 bp, Oryza sativa
  Clone ID: PAT_MRT4530_28988C.1
atggaagacacccatgacaatcaacatacacccaccagaagctacaacatacaagccaacatacgccaagacacgctgccggatatcgacttcagggataggcatggctattcccctacggtgtctccagataccgtcaggagatacgaaagcgctatctctgatatcgccgggcatggattcgaggaggaagactaccctgttgtcgactacgagtcagaccttcagatcgacatgtcgacaactgatttcgacgagatgtgttcaaaagacagattctccgacaacaagctactcgacgacttcgctgtggggagtatgtcccgaccagagtatgtctcccgacgagatcggaaccttcgtcgtcaacaactcaatctctcgagatcgaccaaccttcaagacgtcatcaccgtggagggttttggtcgagtacactccattatcgagaacattcttgacagatgcggagttatcgcacccaacctaccaacaaagaccgacgacctatctcatagcactggccatggctggactactcgagaaaagcaatctcttacaccgcaacattcattggtgttcgagagtccgctcgctcactggttctcgcaccagtacgcagcaatctctcacaccgcaacttccatcggtgttcaagggataattctgctcgctcactggttctcgcaccagtacgcagcaatctctcgcaccgcaccttccatcggtgttcgagggataattctgctcgctcactggttctcgcaccaggacgcagcaatctctcgcaccgcaccttccattggtgttcgagggataattctgctcgcttactggttctcgcaccaatggtcaaggtatgactacggcagcgtagcggtcctcgtaccacgactccaaagatcccttaccacgacgacacctagcgttgaaacctatcctgctgtccctttacgccgtcttgacaaggcctccgaggaacctaagggatcttcggctggggacgcctagaaccgataaggccttgtcggatcccaccatgagacaatcaacacccaacacaatcgacatagaagccacaacatagaagcctacatacgccaagacacgccgccggatatcgactttagggataaacacggctagtatcctacggtgtctccggatactgtcaggaaagacgaaagcgctatctctgatctcgccgggcacggattcgaggtggaaggctaccctgttgtcgactgacaactcaggggcccgaacttgtataaaaatcctcgtctccat

SEQ ID NO: 23959 - DNA, 426 bp, Oryza sativa
  Clone ID: PAT_MRT4530_28989C.1
atgacggacagcggaggggttcggatggagggaaggcgatgccgaggacgacgtcgctggctcgccgctgcgatgccggaggtggtggtggcacggccaacggcgcacgggcacggcggaaggggttgccgaaggaactccagcgagaccgagggagaggcgccgcgggcgacggttttccggcaaaaccgatggcaggccggggtggagggcgatgcgccgactccgagggaggatggcgatgacgacagccgctgcaccggcgaggcggcacaggcggctggaggcggtggagtggtggcgacaccactggtcgtcggcgaggacgtcgctccgataatttccccgcgaaacggaggcgacgccagggaagaagaggcagctgcgaggccgctgggggcgacggcacggccggcccacacctga

SEQ ID NO: 23960 - DNA, 231 bp, Oryza sativa
  Clone ID: PAT_MRT4530_2898C.1
atggcgtcggcgccgaccggcggcgtccagatccggtgccgtggtgcccggatccggtcccccaacgacgggcggcggcgtcctggcagctcggcggcgaggtttggcgcggccgtggtggtcgaggcgtcgtggaggcggtcgtgcggcctcgtaggtggcgaggcctgccgtgcaggcgtcgtggaggccggcaacgtgtggctattggaggccagcgtcgtgcggtag

SEQ ID NO: 23961 - DNA, 2088 bp, Oryza sativa
  Clone ID: PAT_MRT4530_28990C.1
tctcggcgggtacaccatctcttcattccgtattccttgtcgagatccagcaaccgttctcgagcgatcgagaaggcgtagagtatggtcttttgtctctacaggatccgacaaggccttatcggctctgagcatccccagccgaagttcccttaggttcctcggaggccttgtcaagagggcgtaaagggacagtaggataggtttcaacactaggtgtcgtcgtggtaagggatctctgggtaaaacacttagcgatattgtgtacctgctatcaactttgttgaaatagaggtagtaggagagtcgctacaccgctggtcgaggaccaggcagtagtcgtaactcgaccacactggtcgaggaccaggcagtagtcataactcgaccacttgaagtggaaatagtgggagaaacgctacatcgctggtcgagtaccagacagtagtcgtaactcgaccacttaaagtggaagtagccggagaaacgctacatcgctggtcgaggaccaggcagtagtcgtaactcgaccactcaaggtggaagtagccggagaaacgctacatcgctggtcgaggaccaggcagtagtcgtaactcgaccactcagcgagaaccagtgagcgagcggaattatctctcaaacaccaatggaagttgcggtgcgagagattgctacgtattggtgcgaaaaccagtgagcgagcggaattatctctcgaacaccaatggaagtgctagagttggtttattgcaacaaccttttctcgactagtccagccatggccggtgctatgagataggtcgtcggtcttcgttggtaggttgggtgcgataactccgcatttgtcgagaatgttcttgataatggagcgtactcgaccacaacctactcgagtgctcagttgttcctgaaaattatttttatctgacgatattgaatcattatccttcacggcgactgtattttggagcttgtccgatctcgccggatcaaatagttgatgacgattatccagtctcgtcgggagagatgtattctggccgggtggatctcctcacagccgaagtcgtcgagtagcttgttgtcgaagaatccatctcttaaacccatctcgtcgaaatctgttgtcgacatggcggtctgaaggtctgactcgtagtcgacaacagggtagccttcctcctcaaatccgtgtccggcaagatcagagatagcgctttcgtatctcctgacggtatccggagacaccgtaggggaatagccatgcctatccctgaagtcgatatccggcagcgtgtcttggcgtatgtaggcttgtgtgttgtggcttctggtgggcgtgtgttgattgtcatgggtgtcttccatggatccgacaaagccttatcggctctgggcgtccccagccgaagatcccttaggttcctcggaggccttgtcaagacggcgtaaaggaacagtaggataggtttcaacgctatgtgtcttttgtggtaagggatctctgggtaaaacacttggcgatattgtgtatctgatgtcaactttgttggagtagaggtaatggaagaatcgccacacctctggtcgaggaccaggtggtagtcgcaactctaccactagaagtagaaatagtgggagaatcgctacaccgctcgaccatctgaggttgcggtgcgagaggttcgaggaccagcgagcgagtagaattatctctcgaacaccaatggaggttgcggtgtgagagattgcaacgtacttttctcgagtagtccagccatggccggtgctatgagataggtcgtcggtcttcgttggtaggttgggcgcgacaactctgcatttgttgagatcgttctcgataatgcggtgtacttgaccacaacctactcgagtgctcaattgttccttgttgcgtactcgttcgatatcatgcgatctgacatcttttggtacgccgcggagcttgaggcttggatgatctcgatagaccaagttgtcgatgacgatgatggctccgatctggttaggttggatctccccctcagctgaagtcgtcgagtagctcgttgtcggagaatccat

SEQ ID NO: 23962 - DNA, 479 bp, Oryza sativa
  Clone ID: PAT_MRT4530_28991C.1
cttaaggaagaacaaacacgcccatggttacaaaagtttggacagctaaaaaagaacccacctagatacctaaacatggggggattgaattttttttgcttaaccaaagttaatcagttagcttacgcgggcttagctcctacttcgccggcacctgataaataacccatggcttcctctgcttcgccgacttgttattctcctcccacctttcgccctatgatctcctaaggcccacttgttcttcttcttcttctccggccaggacgggaggatcaccgcctgattctgcgccagaaccaggttcctcatcgccttgggggggacaccgaacgcggaggtgagctccgtcccaaacagggcgcggaccacggaggagccgtctactaaaaacaaagggtggttccgccgcgccaacgtcgtgaacccgaagaaaacgaacggtccgccccgcgattccacgtggcataacgggaagt

SEQ ID NO: 23963 - DNA, 1050 bp, Oryza sativa
  Clone ID: PAT_MRT4530_28992C.1
atggacggcgatggggagcggcagcggcggcggtgggaacggcggcggcggcggtcggaatacgcccagaacctgttccccatgagtccacgacggaggagagaatatcttcaagggcttctcgtctcgtctcgtgaaatcctcatggaggtacagtgcagccccatgtttctcttccccatctccatgctggctctccccgccggagcgctcgtcggcgtccccggtgccacgttcgtcgccatggtggcgccgggcggtggtgcttgtgcgatgacgacgaccgcgaggcgcatggtgctggccgcggcgcccagcgtcgcgctgcaccagggcggtggtggggggccggccggcgcatgccttcgccgcggcatcgtctgcttcaaggcgggcgacactccgtcatctggagacgacgaggctaagttatatatccaatccaccggccaccgcgctctttgtctttttcttttgcgcgatcaatgtcatcgacgatgtgtggggtgtgcgttcttggattgttcggcgcctagccaagaatttttctgccttggcgagggcgaaggtggacggctcggggctaaagccggtgcggcggtaggcgaagcggaagaactagagggcgaggtcggcgcagccggcggcggctgccccggagatgacgccatggacgagcggcgcggcgagcatcgaggagagcaggcggatggagttctcgaggcggcaagcctcgtccccaccgcaatcgccgccgctcacgaccaccgccccgtcgctccccaccgccgtcgtcccgaccgctccccgtcgccaccaccaccggctccgccgccgccgctccccaccacctcgtcccgaccaccgccgctgccacttcgtgccacccccgccgccgcgctagccagtcgtcggcgactccgacccccccaccggggcggctcccctctcgtacccctccctccctcccgacggccgcgggctatagccgtcacctccaccgtgcgttccccaccgtcactgccgccaccgccgccgctcctgaagtga

SEQ ID NO: 23964 - DNA, 1087 bp, Oryza sativa
  unsure (1)..(1087): unsure at all n locations
  Clone ID: PAT_MRT4530_28993C.1
atggctcctcttccggccgccggcgcggcggggcgcatcatcctggcgcacggcgcgtgccacggcgggtggtgctggtacaaggtcgccgcgctgctccgcgccgcggggcaccgcgtggacgcgccggacctcggcgcggccggtcagcgaggcctgggcgtgggcggcgcgccggcgtcgtcgttcgcggaccacgcgcgcccgctgctcgacgccgtccgcgcgctccccgacggcgagcgcgccgtgctggtgggccacagcttcggcggcatgagcgtcgcgctcgccgcggagacgttcccggacaaggtcgccgccgccgtgttcgtcgccgccttcctgccggactgcgccaacccaccctcccaccccatcgacacggtaataaactcataccatgatgacaaaattacgctttcttttcctcttattttcgccatgaatttctgccactgccagtatcaagaatcagattggatggacaccgtgatcgatccaagccacgtcccaccttccatcctgttcgggccggagttcctgaagaagaagctctaccagctaagctcaccggaagattacacgcttgcgaagagcttggttcgagcgagctccttgtacgtggatgagctgcggcggcgggcggcgttcagggaggacaggtacggcgccgtgagaaaggtgtatgtggtggtcgagaatgacatggccatcgtccaggagcaccagcggtggatggtcgccaacgccgaggtggcggaggtgagggtgatggacgccggcgaccacatggccatgctctccgcgccggaggagctggctgggcacctcgccgacgtcgccaacacatacatctaaaattaatgcgattgatggagaattagttaatttgttttcttttggatgacattatggtgaaacttgatttgggtataggattagtactaagtagggttaattggatccagccattataaatttgtctatttgaaaatatgacattacaaacacatattgtaaatatttacaatatttttaatatgtacaatagtttttttancaaaaaaaaaaaaaaaaaaaaaaa

SEQ ID NO: 23965 - DNA, 1829 bp, Oryza sativa
  Clone ID: PAT_MRT4530_28994C.1
cgaatttcttcatttaaattttaatataaaaaggatttattgcgtcagccgagggggaggggcgcgcggaccgggtccacgggagtggggcccacgcgaacccaagccgacgatccctctacttcaagcttggatcaaggtgaagaaggcgagcaaatgccaccctcaccgatcaatctagctcgcccaagaatccaccaaagtatccaacgagatcaccccactgacaacatcttaggagacatcaacaagggagtatccactcgttctcgtattgcaaatttttgtgagcattactcgtttgtgtcttctcttgagcctctaagggtggaagaagctcttaatgatccggattgggtgatggcgatgcaagaggagttgaacaatttcacccgaaatgaagtgtggactttggtggagcgacctcgacaaaatgtgattggcacgaagtggatcttccacaacaagcaagatgaagctggggtcgtaataaggaacaaggcgaggttagtggcgcaagggttcacctaaatcgaaagattaaatttcggtgacacttttgcgccggtagctagacttgagtcaattcgcatattgcttgcttttgctactaacctcaattttaagctgtatcaaatggatgtcaaaagcgccttcctcaacgggcctatcaatgagttggtatacgtggagcaaccaccgggcttcgaggatccaaaatatcctaaccacgtgtacaagctccacaaggctctctacaggcttaagcaagcccctagagcttggtatgagtgtcttcataattttcttgtgaaaaacggctttgagatcgggaaagccgattcaactcttttaactaaaagacatgataatgatatttttgtgtgacaaatatatgtcgatgacattatatttggttctactaacaagtcttttatagtgaagagtttagtaggatgatgaccaagcgttttgagatgtccatgataggtgaattgagttcttccttggccttcaaatcaagcaactcaaggaaggaactttcatttgccaaacaaagtatttgaaggacatgctcaagaagtttggaatggagaatgccaagccaatccacactcccatgccatcaaatggccacctcgacctcaacgagcaaggtaaagacgtctaccaaaaggtataccgttccatcattggctcactcctttacctttgtgcatctaggcccgatattatgcttagtgtgtgcatgtgtgcaagatttcaagccgctctgaagaagtgtcaccttgtagccgtgaagagaattcttagatatttagtgcacacacctaaccttggtctttggtatcctaagggagcgaggtttgatctcattggctatgccgatgcggattatgctgggtgcaaagtggataggaaaagcacatcgggtacttgccaattcttgtgtaggtcccttgtttcttggtcttccaagaagcaaaactctgtcgccttatccaccgccgaagcggatttgttgtgctcaacttctttggatgaagcaaaccttgagagactatggcctcaatgtgtccaaaatcccactcctatgtgacaatgagagcgccattaagatagccaataaccccgtccaacattcccgaaccaaacatatagatattcgccaccatttcttgagagaccattccacaagaggcgacatagacatccaacatgtgagaaccgacaaacaattggcggatctcttcaccatgtcactagatgaagctaggttttgtgagttgagaagtgaactaaatatcttggattctcggaatgtggct

SEQ ID NO: 23966 - DNA, 471 bp, Oryza sativa
  Clone ID: PAT_MRT4530_28995C.1
tattttatgaaatattttctctacagaagttttaaaaaacaaaaataattttcaaatttagaatagttaattctcaatttaatcatacactaacaacttgttttcgttgtgtataaggccaagccaatatacgtagggtctgtttggcaaagtttcaactcctaattttagctacgtgagttgagtctggagtgaggatcggtttagcacagctccagctctatctccatctcttctggagctagagctgaagctcagccaaacagtttcagctccacttaaaatgggagtggagctggattgagctctctcaaaaaaattgaactataagggtggacctaaacccagcttcacctcactaatttattttataacaacgttctatccaactacactgctattttaggtgaaactaaaactggttggctagctctaaaagacgcggagcaagatgtgtgcttctacttggac

SEQ ID NO: 23967 - DNA, 4953 bp, Oryza sativa
  Clone ID: PAT_MRT4530_28996C.1
atgtcggttcaaacgggaaatgacaaggatggtgataagagagctatgtttccttatgactatccctccacatctacgtattatgtgagcacctatagcggcaaagctccgtacttcaatggtacggactatgccgcttggaaacataagatgaagatgcatttgaaatctattaaccctttgatttggagaatagtcgaaaaaggctatgttttgcagaatcccgaggaacccaccaaggaggacgacgagaacgagcacaagaacgctcaagccgctaatgcaattcttagcgccttgagtggaagtgagttcaaccgtgtgaacgcagtgatttgggacacgcttcggaatttgcatgaaggcatggttagtgttcgcgagtccaaggtggagattctcaaagggcaatttgagcggtttgtgatgttggatggtgagagcccaagggacatgtatgatcgattgagcaagatcgttaatgagatcaaaggacttggctccaaggacatgaccgatgaggttgtggtcaagaagatggttcgggcaatcactccaaggaactctaccttggtgaccatcattcgtgagcgtccggactacaagactctcacacctcatgacttgctcgggcgtatccttgcccatgacatgctcgagcaagagtccaaggaggtcatccaatatatcaaccaaacctcaaccacaagcatcaagaaggaagacttggcattgaaggcgaaggaagaagaagaagagagtcacaagagcaagagcaaggcgaagatcgatgatgaagagatggctctcaagggaagttcggcaaagcccgggcacttcattgcggattgcccccacatcaaggattgctcccacttcaaggaagacaagaagaagcttgagaagaaggagaagcacaagcatagcaaacatgattgctatggccaagctcatcttgggatgatcttcggctccgactccgagtcaagctcaagtgatgaagaaggagttgccacgttcgccgtcaagccttcatcaccaccgagactcttcaactactcaagtgatgaggatgctcccatttgcctcatggcaaaggagcctaaggtaccctctcccctcaagtcatttaatgttgatcttgttagtgatgaggaggaagatgttgaggatgaggttatggatgacgagttgttcaaatccatagccaaggaatccataccacacttgagtgagttgcttgggagaattgagaatcaatatgcaacccttgagaggcaagaggaattgctcattcatgagaaagagcggtctcatgaactcaagagtgaacttgctaaggagagagagaaaaatgaggctttggtacggctttacaagcaaaccaaagaatctcatgctaatcttgaggtggcgaacgctcaacttcaagagagagtggatggcttggacaaagcttacctctctcttgaagagaagttcgaaaccttaaagaacagtctctctctccctagcgaggcatcgtgctccaaaattgtcccaagcaatgaaccatgtgtgaggtgcaaagatatttatattgaaacttgtgctactaactctacttctttgagtgctttgcaaaagcaaaatgagaagcttatgggactccttcataatggtctacttaagtgccatatgggtagtaaggccttaaaggagtacctaggctatcaaagggacaacttcaaccatgaaagtcttgggtatgttcctccacctaaaggaaaggtggacaagagtgtgatgatcaagaagccccaaggtcttagcaactttgttaaggccaaatgtatcattcctaatgattatgcttctcattgttcttttgatgcatcttatgttcttaggaagaatgctagtggtcgtgttgttgctaagtatgttggcccaagggacaaaaatatttctatcaagagagtgctttgggtgcctaaggcacttgttactaacatgagaggacccaagcaagaatatgtctccggtggaagaagttggatgattgatagtggttgcactaatcatatgaccggagaagaatcaatgttttcatctcttgatccaaatgccacttctcaagagaacatcatcttcggggacgatggaaagggaaaggtaattggattggtctttaagggtgttctcaagggaaaactttatcttgtggatttttcctcaactaaagccaaacatgagacatgcttagtggctaagtccaacacgggatggctttggcatcggacgctagcccatgttggtatgaggaattttcacaaacttctaaagcacgatcacatccttggactaacaaatgttcaatttgagaaagatagggtgtgtagtgcatgtcaagccgggaaacaaattggagcacatcacccggttaagaacgtaatgactactacaagaccgttggagcttcttcacatggacctctttgggccaattgcttatctaagcattggaggtaacaaatatggtcttgttattgttgatgacttttcacgcttcacgtgggtgttcttcttgcatgacaagagtgagacacaagctatcttcaagaagtttgcaagaagagcccaaaacgagttcgacctcgagatcaagaacattcgaagcgacaacggcaaggagtttaagaacacgtgcatcgagagtttccttaatgaagaaggcatcaagcatgagttctcggctccatactcacctcaacaaaatggagtagccaagaggaagaatcggactctcatcgagatggcgaggacaatgttggacgaatacaagacatcggaccgcttttgggccgaagccgtcaacaccgcatgtcacgccatcaaccgtctctatcttcaccgccttcttaagaagactccctatgagcttcttaccggtaacaaacctaatgtctcttacgttcgtgttttcggtagtaagtgctacattcttaataagaaggctagatcctcaaagtttgctcctaaagtggatgaggggttcttgcttgggtatgggtcaaatgagtgcgcataccgcgttttcaacaaaacctctggtgaagaggaggaccctagcgaagcaatcaaaaggtcagctcttggagacgtacgtcctagggagccacaacaaggggcctcttcctcaacacaagtagagccacctacatcgacccaagccgacgatctctctacttcaagcttggatcaaggtgaagaaggcgagcaagtgccaccctctccgataaatctagctcacccaagaatccaccaaagtatccaacgagatcaccccaccgacaacatcttaggagacatcaacaagggagtatccactcgttctcgtattgcaaatttttgtaagcattacttgtttgtgtcttctcttgaacctctaagggtggaagaagctcttaatgatccggattgggtgatggcgatgcaagaggagttgaacaatttcacccggaatgaagtgtggactttggtggagcgacctcagcaaaatgtgattgacacaaagtggatctttcgcaacaagcaagacaaggccggggttgtgataaggaacaaggagaggttagtggctcaagggttcacccaaatcgaaggattagatttcggtgaaactattgcgccggtagctagacttgagtcaattcgcatattgcttgcttttgctactaacctcaattttaagctatatcaaatggatgtcaaaagcgccttcctcaacgggcctatcaacgagttggtatacgtggagcaaccaccgggcttcgaggatccaaaatatcccaaccacgtgtacaaactccacaaggcactctacgggcttaagcaagcccctagagcttggtatgagtgtcttcgcaattttcttgtgaaaaacggttttgagatcgggaaagccgattcaactctttttactaaaagacatgaaaatgatatttttgtgtgccaaatatatgtcgatgacattatatttggttctactaataactcttttagtgaagagtttagtaggatgatgaccaagcgttttgagatgtccatgatggctgaattgaagttcttcctcggccttcaaatcaagcaactcaaggaaggaactttcatttgccaaacaaagtatttgaaggacatgctcaagaagtttggaatggagaatgcgaagccaatccacactcccatgccatcaaatggccaccttgacctcaacgagcaaggtaaagacgtcgaccaaaaggtataccgttccatcattggctcattcctttacctttgtgcatctaggcccgatattatgcttagtgtgtgcatgtgtgcaagatttcaagccgctccgaaggagtgtcaccttgtggccgtgaagagaattcttagatatttagtgcacacacctaatcttggtctttggtatcctaagggagcgaggtttgatctcattggttatgccgatgcggattatgccgggtgcaaagtggataggaaaagcatatcgggtacttgccaattctttggtaggtcccttgtttcttggtcttccaagaagaaaaactccgtcgccctatccaccgccgaagcggaatacgtttcggcggggagttgttgtgctcaacttctttggatgaagcaaaccttgagagactatggcctcaatgtgtccaaaatcccactcctatgtgacaatgagagcgccattaagatagccaataatcccgtccaacattcccgaaccaaacatatagatattcgccaccatttcttgagagaccattccacaagaggcaacatagacatccaacatgtgagaaccgacaaacaattagcagatatcttcaccaagcctctagatgaagctaggttttgtgagttgagaagtgaactaaatatcttggattctcggaatgtggcttga

SEQ ID NO: 23968 - DNA, 2814 bp, Oryza sativa
  Clone ID: PAT_MRT4530_28997C.1
atgtcgggccaagcaggggatgggatcgatggtgataagggagctaagatcccttatgactatccccctacatctacatcttataatcccgaagatcccaccaaggaggacgacgagaacgagcacaagaacgctcaagccgctaatgcaatacttagcgccttgagtggaagtgagttcaaccgtgtggatggcattgagagtgccaaagtgatttgggacacgcttcggaacttgcatgaaggcacggatagtgttcgtgagtccaaggtggagatcctcaaggggcaatttgagagatttgtgatgttggatggtgagagcccaagcgacatgtacgaccagttgagcaagatcgtcaatgagatcaagggacttggctccaaggacatgaccaatgatgttgtggtcaagatgatggttcgagcaatcactccaaggaactctaccttggtgatcatcattcgtgagcgtccggactacaagactctcacacctcgtgattttctcggacgcatccttgcccatgacatgctcgtgcaagagtccaaggatgtcatccaatacatcaaccaaagctcaaccgcaagcatcaagaaggaagacttggctttgaaggcaaaggaagaagaagaagagaaccgcaagagcaagagcaaggcggagatcgatgatgaagagatggctctcttcgtcaagaagttcggcaagttcatgagacgaagcggcttcttcaagggaggttcttccaagcactactccaacaagtcaagtggaagacactccgcaagagtgtgctacgtgtgcaaagagcccgggcacttcattgcggattgcccccacctcaaggatggttcccacatcaaggaagataagaagaagggtgagaagaaggatgagaagaaggagaagcacaagcataggaagcgggaacattatggccaagctcaccttgtgatgatcttcggctccgactccgagtcaagctcaagtgatgaagaaggagtcgtcgcgttcgccgtcaagccttcatcaccaccaagactcttcgacaactcaagtgatgaggatgctcccatttgcctcatggcaaaggagcctaaggtaccttctcctctcaagtcatttaatgttgatcttgttagtgatgaggaggatgaggccaaaagtatccttactaatgattatgcttcacatggttcttttgatgcatcttatgttcttaggaagaatgctagtggttatgttgttgctaagtatgtaggcctaaggggcaagaatatttctatcaagagagaatatgtctccggtggaagaagttgggtgattgatagtggatgccccaatcacatgaccagagaagaatcaatgttttcaactcttgatccaaatggcacttcacaagataacatagtcttcggggacgatgaaaagggaaaggttatgggattgggtaagattgcaatctctgatctttccatggccaacgttctctttgggtgttctcaagggagagctttaccttgtggatttttcctcaacgcgtgtcaagccggcaaacaaattggagcacatcaccccgtcaagaatgtgatgaccactacaagaccattagagcttctccacatggacctcttcgggccaattgcttatctaagcattggaggtaacaaatatggtcttgttattgttgatgacttttcacgcttcaccgacaacggcaaggagttcaagaacacgtgcatcgagagtttccatgatgaagaaggcatcaagcacgagttctcggctccatattcacctcaacaaaatggagtagcggagaggaagaataggactctcattgagatggcgaagatcatgttggatgagtacaagacatcggaccgtttttgggccgaagccgtcaacaccgcatgccacgccatcaaccgcctttatcttcaccgccttcttaagaagactccctatgagcttcttaccgtgaatgagggattcttgcttgggtatgggtcaaatgaatgcacataccgcgttttcaacaaaacctccagtattgttgagatcgcgcgtgatggagccacaacaaggagcctcttcctcaacacaagtagaaccacctacatcaacccaagccgacgatccctctacctcaagcttgaatcaagggtggaagaagctcttaatgatccggattgggtaatggcgatgcaagaggagttgaacaatttcacctggaatgaagtgtggactttggtggagcgacctcggcaaaatgtgattggcacaaagtggatcttccgcaacaagcaagacgaggccggggtcgtaataaggaacaaggtgaggcctatcaacgagttggtatatgtggagcaatcaccgggcttcgaggatccaaaatatcccaaccacgtgtccaagctccataaggcactctacgggcttaagcaagcccctagagcttgtagaatgatgaccaagcgttttgagatgtccatgatgggtgaattgaagttcttcctcggccttcaaatcaagcaactcaaggaaggaactttcatttgccaaataaagtatttgaaggacatgctcaagaagtttggaatggagaatgcgaagccaatccacactcccatgccatcaaatggccacctcgacctcaatgagcaaggtaaagacgtcgaccaaaagggagcgaggtttgatctcattggctacgccgatgcggattatgccggatttgtgagcacttgcatcatctctgggagttctttgcatcatcttttactcttggaggttgaggactcctag

SEQ ID NO: 23969 - DNA, 3837 bp, Oryza sativa
  Clone ID: PAT_MRT4530_28998C.1
atggtttcatggggtgtatttccatcgcggtgtgacggcgcccgagagagggacgtgacactaaaggagtacctaggctatcaaagggacaacttcaaccatgagggtcttgggaagaatgctagtggtcgtgttgttgctaagtatgtaggcccaaggggcaagaatatttctatcaagagagtactttgggtgcctaaggcacttgttactaacatgagaggacccaaacaagaatatgtctccggtggaagaagttgggtgattgatagtggatgcaccaatcacatgaccggagaagaatcaatgttttcatctcttgatccaaatggcacttcacaagataacatagtgttcggggacgatggaaagggaaaggttatgggattgggtaagattgcaatctctaatgatctttccattgccaacgttctcttggtaaaatctctaaactacaatcttttgtccgtttctcaattatgttctatgggttacaattgtctttttaccgatgttgatgtgaccgtctataaaaggaatgattcctcggtagtctttaagggtgttctcaagggaaagctttaccttgtggatttttcctcaagtaaagccaaacatgagacatgcttagtggctaagtccaacacggggtggctttggcatcggaggctagcccatgttggtatgaggaatcttcacaagcttctaaagcacgattacatccttggactaacaaatgttcaatttgagaaagatagggtgttctttttgcatgacaagagtgagacacaagccatcttcaagaagtttgcaagaagagcacaaaacgagttcgacctcaagatcaagaacattcgaagcgacaacggcaaggaattcaagaacacgtgcatcgagagtttccttgatgaagaaggcatcaagcatgagttctcagctccatattcacctcaacaaaatggagtagccgagaggaagaataggactgtcattgagatggcgaggaccatgttagatgagtacaagacatcggaccgtttttgggccgaagccgtcaacaccgcatgccacgccatcaaccgcctttatcttcaccgccttcttaagaagactccctatgagcttcttaccggtaacaaaccaaatgtctcttactttcgtgttttcggtagtaagtgttacattcttaataagaaggctagatcctctaagttcgctcctaaagtggatgagggattcttgcttgggtatgggtcaaatgaatgcgcataccgcgtcttcaacaaaacctccggtattgttgagatcgcgcgtgatgtgacatttgacgaaactaatggctctcaagtagagcaagttgactcacatgtgttaggtgaagaggaggacccgagtgaagcaatcaaaagggtggaagaagctcttaatgatccggattgggtgatggcgatgcaagaggagttgaacaatttcacccggaatgaagtgtggactttggtggagcgacctcggcaaaatatgattggcacaaagtggatcttccgcaacaagcaagacgaggccggggtcgtaataaggaacaaggccgagctatatcaaatggatgtcaaaagcgcctttctcaacgggcctatcaacgagttggtatacgtggagcaaccaccgggcttcgaggatccaaaatttcccaaccacgtgtacaagctccataaggcactatatgggcttaagcaagcccctagagcttggtatgagtgtcttcgcaattttcttgtgaaaaacggctttgagatcgggaaagccgattcaactctttttactaaaaggcataataatgatatttttgtgtgccaaatatatgtcgatgacattatatttggttctactaacaagtcttttagtgaagagtttagtaggatgatgaccaagcgttttgagatgtccatgatgggtgaatttaagttcttcctcggtcttcaaatcaagcaactcaaggaaggaactttcatttgccaaacaaagtatttgaaggacatgctcaagaagtttgaaatggagaatgcgaagccaatccacactcccatgccatcaaatggccacctcgacctcaacgagcaaggtaaagacgtcgaccaaaaggtataccgttccatcattggctcactcctttatctttgtgcatctaggcccgatattatgcttagtgtgtgcatgtgtgcaagatttcaagccgctccgaaggagtgtcaccttgtggccgtgaagagaattcttagatatttagtgcacactcctaaccttggtctttggtatcctaagggaacgaggtttgatctcattggctatgccgatgcggattatgccgggtgcaaagtgaataggaaaagcacatcgggtacttgccaattcttgggatgcctcattgcaagcaaacttctcgcaagtccaagcgctctagggatcggtctcccactccttccccatcctctcatgaggactcggaccgtgattggtccgggcgagaagaagaggagaccggccctcaggtggccaatgttccccggggctcctctctcccacctcggcgctccactcatggggatgaagggtcctcgcggcagcctcgtgcttcctctggcgagggctcttctcgccaagctcacaccactgcgcctcctccggcgaggcttattggccccctcatgcttcatgctccctcacgccatcctcgccgagctgttcgtgactggcgccaaaagtctgacattgtggctgtggagcggaatcaggatcctcgctccatgccgcgcaccgcctctgatgacaggttctggacctctttccagcaagactacaatgcccatgcaatggatcgattgggaggctttggcgaccttggatgatcctgacctcaatgccgtcattggtgcttgtgagatgggggttcgcaatttcatgacccttcagcaagcttggtgcaaggagatcattgctcaattctatgccacagcctattttaatggtgatcgtgacattcattggatgactcagggctcgtggtattctatctcttatgaccagcttgccaatctgtggggttttaatgagaactggatgcggtacatgacccacttgcataacattgtgattcctcacaatcatgatttgcgccctctgtatcttcctggtggcaagttggggactactgaagggctgaagccttatcatatctatcaaaaccgcatccttaggcggaccttgactccaaaggatggtgatgctagcaacatcaaccatttctcccgctccatgctcctcagagggcttccctatgctcctcatataatgcggatgattgaacatgtcactcaccttcagtttgtgtgcgaggagccacataccgctctttccttgcgcttgcctaagcgcgggcctgtgcctcaggacatcccctccacatcctctcagtcgccttttgctcctgagtgtccttcctctgtggctcgtcgtgagccgtctcccttatttcgcattttgcggactctttttggcctttgctctacggaggctaaaaagaaccgccgattgcggaatttggcgaagaaaacggctcgtgatgtcaagtacctcaaggcgaggtatcacgaggaccaccacattgatatccctccttcccctccgggtttcgaggctgaacccgatgagcccgaggaggaagagatagaggatccatttgttggggtgcctcctgattatgatttctttggttatggccatggctatggctatccccctccgcctcctccagaggatcctcctcaggcgccccttgcttga

SEQ ID NO: 23970 - DNA, 2493 bp, Oryza sativa
  Clone ID: PAT_MRT4530_28999C.1
atggcggccgcagcagcactcaaccgtctcctccctctcgtcctcatagccgccgtcgtcgggaggcacggggcctccggggacggtggcttccccatcgtcttcaccgagaccaagtgcacgccggcgccgacgtggtcccgcgcgaacgacagcgcgtaccgcgccaacgtccgggcgctcctcggcgggctcccgtccgccgccgcgccgacgggcttcgcgtcgaccgaccggtccggcggcgccggccgcgaccgcgcgttcgcccgcggcatctgcttcggcgacccgccccccgcgctgtccccgcagtactgcctccgctgcctgtccgtcgccgccaaggagctcgccgacggctgccccgccaaacgccgcgccgccgtctggaccgacggctgcttcgcgtcgttcgccgacaccagcgccttgtcgcccgacgaggcggccttccactacaagatcgcggtcggggccctcgtggaggacgacgagagctccgcccgcttcaccgccacgctcgccgccctggccgagcgcctggcgccgcgcgccgccgccaatgcctcgcgcatgctggccaccgccacggtggacgttcctcgcgtggtcgccggcagctcgaggacggtgcaggtgcactcgctggcgcagtgcatgccagaccggccggcggcgagctgcgcccggtgcgtgcaggagtcggcgcgggagctgggcaagtgctgctggaacatgcagagtggtggcgtggccacggtgatcggctacaactgccatctgcggctggatgtgtccgttccgatgacgccgtccgtggcagaacctcaatctatccctgcccctaccgtgagcgtgagaactactggaggtcatgtacgaggaaatgttgctgctgtgaaggcagcgcagatcgtgccaactcagtgtaccgatgggctcagaagtttcggctcacctcaccacttcaccaacctatctggcccgctcactaccggcacaatccttctcttccggactctccccaaccacgccgcagcaacacgcgcccagactctagtcgagttcagcacttcagccccgccgccgtctccgccgctcaaagcgcccaaaccaaaatcccctagatttccccacgcccccgcctccaaatctctcgacatgtcggagaagaagcgccgcggcggggcaggcgcgggggccgcgtcgggctccgcctccaagaagccgcgggtctccacggcggcgtcgtacgccgagtcgctccgctcgaagctccgccccgacgcctccatcctcgccaccctccgctccctggcctccgcctgctccaaatccaagcccgcggggtcgtcgtcgtcgtcgtcgtccgcctcgaaggcgctcgcagccgaggacgacccggccgccagctacatcgtggtggccgaccaggactccgcctccgtcacctcccgcatcaaccgcctcgtgctcgccgcggcgcgcagcatcctgtccggccggggcttctccttcgcggtgccctcccgcgccgcctccaaccaggtctacctcccggacctcgaccgcatcgtgctcgtccgccgcgagtccgccaggcccttcgccaacgtcgccaccgcgcggaaggccaccatcaccgcgcgcgtcctctccttggtccacgccgtcctccgcagggggatccacgtcaccaagcgtgacctcttctacaccgacgtcaagctcttcggcgaccaggcgcagtccgacgccgtcctcgacgacgtctcctgtatgctcggctgcacccgctcctccctccacgtcgtcgcgtccgagaagggcgtcgtcgtcgggcgcctcaccttcgccgacgacggcgaccggatcgactgcacgcgcatgggcgtcggcgggaaggccatcccgcccaacatcgacagggtctcaggcatcgagagcgacgctctcttcatcttgctggtggagaaggacgccgcgttcatgcgtctcgccgaggaccggttctacaaccgcttcccgtgcatcatcttgacggcgaaggggcagccggatgtcgccacacggctgttcttgcggcggcttaaggtggagctgaagctgccggtgctggcattggtggactccgacccatatgggctgaagatcttgtcagtgtacatgtgtggttccaagaacatgtcatatgacagtgccaacctgacaacaccggatatcaagtggctcggagtgcggccaagcgatctggacaagtatcgggtgccggagcagtgccggcttccgatgactgatcacgatatcaaggtggggaaggagctgcttgaggaggactttgtgaagcagaatgaaggatgggtgaaggagctggagacgatgttgcggacgaggcagaaggctgagatacaggctctcagttcatttggtttccagtatctcactgaggtctatctacctctcaagctgcagcaacaggactggatttga

SEQ ID NO: 23971 - DNA, 549 bp, Oryza sativa
  unsure (1)..(549): unsure at all n locations
  Clone ID: PAT_MRT4530_2899C.1
acgccgcaaaacggtgcggggagggcgccaagaaggtgaagaggaggaggagcaagagncgggaggagagcgccgaggggagcacgttgacgacgctggcggcggtggtgcccgttcctgccgctgacagctgctgcatggcgctggcggtggtggacgacggggcggatcagacgctgccgccgacgacgtcgacggcgccggagacgcagcaggaggaagcggacgggaatgcggcggcggaggaggtgaacaagcgggcggaggagttcatctcggcgttccggcgccacctcagggttgactccttctcgtcgggaagccggcgagccggcggcgccagaatcgaaagtccctgcttttgactggaagttgcattgcaccgagcaaagtgtgcttcttgtttctgcacatttttctttcagtctcttgctgctttttttttattattattatttttacctttggaagctgagatgtacttactctactcttttgacatcagtttgatgaaaactagcttgcttggaactaaaaaaaaaaaaaaaa

SEQ ID NO: 23972 - DNA, 598 bp, Oryza sativa
  Clone ID: PAT_MRT4530_289C.1
ggggaggtgatgatgcttttaacaccttcttcagtgagactggtgctgggaagcatgtcccccgtgctgtcttcgtcgatcttgagcctaccgtgattgatgaggtgaggactggtgactaccgccagctcttccaccctgagcagctcatcagtggcaaggaggatgcagccaacaactttgcccgtggtcactacaccattggcaaggagattgttgatctgtgccttgaccgcatcaggaagcttgccgacaactgcactggtctccagggcttccttgtgttcaacgctgttggaggaggaacgggctccggtctcggttcccttctccttgagcgtctctctgtggactatggcaagaagtccaagctcgggttcaccgtgtacccgtcccctcaggtctccacctctgtggttgagccatacaacagtgtcctctccacccactccctccttgagcacaccgatgtcaacgagttccagaccaacctggtgccctacccgaggatccacttcatgctttcctcctacgccccggtgatctcggccgagaaggcctaccacgagcagctctccgtggcggagatcacaacagc

SEQ ID NO: 23973 - DNA, 470 bp, Oryza sativa
  Clone ID: PAT_MRT4530_28C.1
gcctcccacttcatcaattcgacatcgacaaataattggtgcctaaaaatctgtaaatttcatctccagataataccagcatgagctttggtggacttattagcacatcaaacattgtgagagaggagagtactgttgttacgatcacttcagattctgacctgatttggacaatatcgctccggcaccactcttgaaatacgtaacacaattgtatcatagttccaattttgtctcatctattttacgtcgttgagttctacccttagtagaagagtgaaaacatacatggcactgagagatcctataatagtttacacgaaacgttgccatgtgtgagtcgatggtgagttatcaaggtagtcgccgcgctggagtcttacattgttattgtgtggccagtgtgcccaaatactttcatgcgtaaacgacctgttgagagtgcttagcgatctctgactgtgttattc

SEQ ID NO: 23974 - DNA, 1081 bp, Oryza sativa
  Clone ID: PAT_MRT4530_29000C.1
atgtcggaccaaacggggaatggcaaggatggtgaaaagggagctacgttttattatgactatccatccacatcaacctcttatgtgagtacttatagcggcaaagctccgtacttcaacggcacggactatgccgcttggaaacataagatgaagatgcatttgaagtctattaacccatctatttggagaatagtcgaaaagggctatgttttgcagaaacccgaggatcccaccaatgaggatgacgagaacgagcattagaacgctcaagccgctaatgcaatacttagcgccttgagcggaagtgagtttaaccgcgtggacggcattgagagtgccaaagtgattcgggacacgcttcgaaattttcatgaaggcacggatagtgttcgcgagtccaaggtggagatcctcaaagggcaatttgagaggtttctgatgttggatggagagagcccaagctacatgtatgaccgtttgagcaagatcgtcaatgagatcaagggaattggctccaaggacatgaccgatgaggtagtggtcaagaagatggttcgagcaatcattccaaggaactctaccttggtaactatcattcgtgagcgtccggactacaagactctcacacctcatgatttgcttgggcgcatccttgcccatgacatgcttgtgcaagagtccaaggagttcatccaatacattaaccaaagctcaacgacaagcatcaagaaggaagacttggcattgaaggcaaagtaagaagaagaagagagtcgcaagagcaagagcaaggcggagatcgatgatgaagagatggcactcttcgtcaagaagttcggcaagttcatgaagcaaagtgtcttcttcaagggaagttcgtccaagtattcccctaacaagtcaagtggaagacacttcgcaagggtgtgctatgtgtgcaaagagtccgggcacttcattgtggattgaccccacatcaaggattgcccccacttcaaggaagacaagaagaagcttgagaagaaggagaagcacaagcatagctgaacgtgtagagataagatgagcatgcttggat

SEQ ID NO: 23975 - DNA, 281 bp, Oryza sativa
  Clone ID: PAT_MRT4530_29001C.1
cgttatttcacggctattaagacctccaaatccgggggggatgaataccaaatcctggagcggtctcagcaactccttcccaatccttctactcatcttcctcgcggcggcagcatccgttccccagatcgccatgtgggacgagcagtctgagcaggcggaccccgcggcgcatgaggcgaccgggcagatcgtctacctggaccgccccgcgggcgccgaccccgaggagttccacatccgcaccctcgcccccgtcctcggcagtgaggaaaaggtta

SEQ ID NO: 23976 - DNA, 783 bp, Oryza sativa
  Clone ID: PAT_MRT4530_29002C.1
atggccgaacccaaagaagtcgaagtccggaggcagcccaacaaatggatcctcgagctgttcctcctcaggctcatcgggctcagcctcaaagcccggaggggaaggcgggacatcgatgtggtggtcctcatgataccgcgccttgagatacttgacgtcgcgagccgttttcttcgccgcattccgcaatcggcggttctttttggcctccgcggagcaaagaccaaaaagactccgcaaaatgcggaacaagggagatggctcacgacgagccacaggagatggacgatcacaagcaggaggcggctgagtggaagaggaggggatgtccccagctgcagaggtgcctgcctgagaagagcgggaggccttaacaaggcgcaaatgaagctgggaatgagacacatcatgacgaaactgaagctgagtgacggtctcgatcatccgcataatgtgaggggcatagaccaaccccttccagtactgaatggaggccatgcggatttccgcccaaacgaagtgataaacatgaaagcgatgaggagggggatcgaacctgagaagcacagtcctggagaggtggttaatgctgctagcatcaccatctttaggcacaaaggaccggcgaaacatccggttcaaatagaaaaagtatggcttgagaccgtcgaccttgcccaacaccacatttggatcattaggaatgtagagagggagcaaatcagtgttggcaggaatttaaagattatgcaggtcatcaaggttgaacaaggaatctaa

SEQ ID NO: 23977 - DNA, 509 bp, Oryza sativa
  Clone ID: PAT_MRT4530_29003C.1
atgtcggattgaacgggggatggcaatgatggtgataagggagctaggtttccttatgactatccctccacatctacatcttatgtgagtacctatagcggcaaagcttcatacttcaatggtacggactaagccgcttggaaacataagatgtagatgcatttgaagactattaacccatttatttggagaatagtcgaaaaaggctatgttttgcagaaacccgaggatcccaccaaggaggacgacgagaacgagtacacgctttgagtggaagtgagttcaaccgcgtgaacagcattgagagtgccaaggtgatttgggatacgcttcggaatttgcatgaaggcacggatagtgttcccgagtctaaggtggagatcctcaaggggcaattgaagaggtttgtgatgttggatagtgagagcccaagcaacatgtactaccgtttgagcaaagatactcctgttgtctgcgggatgaacagttttgattgggccatacaagcg

SEQ ID NO: 23978 - DNA, 256 bp, Oryza sativa
  Clone ID: PAT_MRT4530_29004C.1
cgaccacgcgtccggcgttcacgaagaccttaacatagcttggagaggatgtacggcaataatggtgcgcatctttagtagaaccactggagctgcccatgctggcgccagggtacttcctgccttcagtggaaagctgactggaatgtgtgcccgtgttaacacagtcgctgtgtgcgatgttcatcgcgctgccacgcttaataaccgcggctccctgacctgttaacggtgcgataaatcccgaggctgacgg

SEQ ID NO: 23979 - DNA, 486 bp, Oryza sativa
  Clone ID: PAT_MRT4530_29005C.1
atgaagatgattgagattatgtccaagaagaagtttcacaaggaggtggcacataccggttaccatgtccgtcccatcaaggctgctgctgtgccggctggacaaaccactcgtgcttcttctcgtgccggtccctccgctaccgtcaccaagccggattccaactcgtccttgaggttcttcaagtccatcttcaacttatgcaagaccatcttagcttggcaagccaaggaacgcagagcaaggaagaaggacactcgacggatcaagaacctccttcgcaacgcccatttgccgtgttcccccgatggttctgaggttgaggacagtggggaggatgtgattgaggacccgtttgcagctgaggcaagctcctctcgtgcggatcgtggcaaggctcctatggaggaagaagaagaggaggaggaaggtgactatgctaaggagtcaagtgaggagggcgaggattctaatgaggatgagtga

SEQ ID NO: 23980 - DNA, 114 bp, Oryza sativa
  Clone ID: PAT_MRT4530_29006C.1
gatgtcggactgtctgacatcaagtcagactatccggccacaatcggacagtccgatttcaaatcggactatccgacgtggggccaagggcaaggggacttaacctccccgggg

SEQ ID NO: 23981 - DNA, 1551 bp, Oryza sativa
  Clone ID: PAT_MRT4530_29007C.1
attttctttcttcacttagaggtttgaaggatgcctctccgcaagcaaacctcccacaagtccaagcgcccgagggatcgctcttccactccatcttctcatgatgattcagacagtgattggtccggtggagaggatgcggttcctcaggttgcgcgggtggctcggcggtctactcatgctcatgatggtggtggtgatggtgagggctcttctcgtcaaccgcaaacgccgccgcaccaacccaatgtccccattgggcctctccgcattcatacccccgagagggatccggcggtgattcaccaagtgtatgattggcggcgcaagtctgaggttgttgctcgtcgtcgggacgaggatctgcgctcccttcgccgcaccgccacggatccgcggttttggactctctttcaacaagacttttatgagtctgtaattaagtccaaagctcatcccactgttcccatgcaatggatcaattgggaggagttgcaggcacacaacgatccggtgatcaactctgtgattgccaattgtgatctcatgggtatccgctccttcatgacattgcagcaaaattggtgcaacgagatcattgctcagttttatgccaccgtatactttgatcgctatcgtgccatgcactggatgactcaggggtcctggtactctgtttcttatcagcagttggctgagatctggggcttccgtcttcgttctttgctaaaccttgatgaccttcataatcttcaaattcctgccaacacagacttgcttccccgttacactcgaaatgatccaaatgtggtgttgggcaaggtcgacggcctcaagctatactttgcctatttgaaccggatgtttcgccggtcttttgtgcctaacgatggtgatgctagcagcatgaaccatctctctaggaccatgcttctccggtttgatcctcctcctcatcgcttccatgtctatcactttgtgtgggaggagatccgcatggcttcaattcagtacaagaaggggttggtctatgcccctcacattatgcggatgatcgagactgtgactcagctccagtttcgccatgatgtgactcattctcagcttcacttgcgccttcttaaggccccccgctcctcagctactcgggacgtaccctcctcttctactcagccgcctcctgctcctgagcgccctgcctctgtggctcgtcgtgagccatctcccttattccgcattttgcggagtctttttggtctttgctccgcggaggccaaaaagaaccgccgattgcggaattcggcgaagaagacggctcgtgatgtcaagttcctaaaggcacggtattatgaggaccaccacattgatatccctccttctcctctgggtttcgaggccgagcccgatgagccagaggatgaagagattgaggatccttttgccgggttgccttccgacttcgacttctttggatatggccatggctatggctaacctcctccacgcccttcgcttgagtcgtcagctcattgtcctctctttttggtgtct

SEQ ID NO: 23982 - DNA, 311 bp, Oryza sativa
  Clone ID: PAT_MRT4530_29008C.1
tcgttgtgatgagtcaggtacttgaacgtgagggggacaaatttgactctaaggagtgctgcaaaaatgaaccgaactccatccaatccataggccgatcaacacgccgaatgagtggatgaataaattactatggttcttgctcccataatatgcgtgctcctcgaactggaatcgctagagatatcatgctggagttgacccagacattaaacactattgcctgagaagttgagagcatctctcgactctttggacctgacgtgtcattgccaaacggttggacatacaaatttggtaggaagttgcct

SEQ ID NO: 23983 - DNA, 339 bp, Oryza sativa
  Clone ID: PAT_MRT4530_29009C.1
atggccgacgagcgaaggggcggcggcgtcgggaggaggaggcgtcggtcggggaagggcgggagcggcgctggcgttgaccgacatctgttgaggaagggcggggacggcatcgatcagggaaggacgggagctgcgccggcgtcgggttgggcgtcgtcggttggggaagggcgggggctacgccgacatcaggttgggcggcgtcggttggggaagggcgggggcggcgccgatggcggacacccgatgcgcccaatggccgacgctcgccccatgaagtcacgactcgcgagaaggaggagacgaggaaaagaatatcggaccgttttttcataa

SEQ ID NO: 23984 - DNA, 179 bp, Oryza sativa
  unsure (1)..(179): unsure at all n locations
  Clone ID: PAT_MRT4530_2900C.1
ataatcataattccaagatatctttttcttcccaagaggaaattacttggaatgaagcacaactaacaaggcaaggaacaaagggttcaaagaaccctgtaaagaataatacagatgcagatttgtacattgcaatgcaaggatgagcattaagaacttaagttgagtaanagagcatt

SEQ ID NO: 23985 - DNA, 107 bp, Oryza sativa
  Clone ID: PAT_MRT4530_29010C.1
aatatgttaaaagtacaaagcgtgggtacacgtcactttttgtgcctcacaatctggctagcaagacatcgaagttctagacattttaaacgtctctaattgttact

SEQ ID NO: 23986 - DNA, 752 bp, Oryza sativa
  Clone ID: PAT_MRT4530_29011C.1
attcggctcgagccggccccggggagcgggaggtcctttataattctgcgactgaatccgatggcgaatgagggaagcgacattgacgaagtgaactatgcgctggatggcgtgggagaagaagaagaggacgaaaatgcagcacaggaggaggatgacaatgacatggaagaagatgaagaggaatatactttcaggttcaaaaccgggatgaatcctttggactttgttgatgataatgatgattctggcattcaaccctaccagcggttcgtgcgtcttgaacgggaagcccttgctgataaaaagcgaaaagcacctgaacaatgccatagtgaagaaccaccttctaagatggccagggaaggtgatatttctggggcaaagatagctgagataatggaagcaatggattattatggtatgcgcaagagatcgagaaagcctaaaaaaagaggcaggcgaaaaggatcaaagaatagagttgaccctaagctaacacagatgcagggtgatgccacgtttcactatgcatgtggcgattatgaccgggctaaagctgtgttgtgtgaagttattaggctggcaccaaatttgcatgagtcgtatcacacccttggacttgtctatacttcactccaggattataaaagagctatggccttatacttgattgctgctcatttggatccaaaagagtcacctctttggaaaacgatttttacctggtccatagaacaaggttatgttga

SEQ ID NO: 23987 - DNA, 432 bp, Oryza sativa
  Clone ID: PAT_MRT4530_29012C.1
atgtttgtggtgggctcggggggggggtcgggcggccccaaggccggggagaaggtggttcggggtccagcggggtggaacaggcggggggcggaacagaacgaggatggtcacaagttcaaggggagaaaggacgcgcccccgcccctcccctaccggccggggctcggggggaggtcctcccccggccggccgcaagccggttctcccctggccgtttgggcggcacaggactgcggcgacaacggttcctcccgccgcccccgcccgccaccgatccgccagccaccgtgcgatcgcctgccgccaccggcgctccactccacctgccacgcaatcagctgacgctgctgctccacctgcttcggccgccagctccgctccaccgcagccgacgccctgctccactccgccggccgccgtcctcgccat

SEQ ID NO: 23988 - DNA, 1057 bp, Oryza sativa
  Clone ID: PAT_MRT4530_29013C.1
ttggccggcctcccgtcgctgctcccaaccgctgactcccactcgccgcgatccgatcgccacctgccctcccctcccagatccgccgccgcggaaacctcaccggcgccggcgacgcgagggcaccatgccgggcctcctcgagtattccgcgggcggcctgggcctcctggcgctcgcggcgctcgagtccctcccgctccgccccctcctcctccccgccgccgcggcgtcgcacctcccgcgccgcctcggcctcgccacgccgctgcacctccgccacctcctcgcggggatcgtctccgcgctcttcctcctctccgcgctcttctccgcgcgacaccacctctccctcccgacgctcgccgccaccgcgctgttcctcctctacgcgctggcccccctcgccccgctccgcgcgccgctcccgctccccttgctcgacctcgtcctcgccgccgcgttcgcgcaggagctcctgctcttcgcccaccgcaggccctccaccgccgccgggatcgagaaccggtacttcgacctcttcctcgtccccgtcgccgtctgcctcgtcgccacgctactcgccgcgcacgaccccgaggccgtgccgccccgcctcgcgcgcgccgcggggctggcgctgcagggcacatggatggtccagatggggttctccttcttcaccagcgccgtcgcccaggggtgcgcgctccacgcccagagccgcgtcgactacaccatcaagtgccgcacccacgacgactaccaccgcgcgcgctccgcggccacgctgcagttcaacggccacctcgcgctgctcgtgctcgccggcgcggcggcgtacggcgccgccgtctcaagaagaaaccagccgccgagcgggtacaggatgctgagcaaggaggtgcagatggaagggatgccgctgcattcgcagttcacattggattcagacgaagagaaggaagatgaaaggatcaccaattcggcaatgccggtggcgaatggatcggggtcgcatcacgagatcacggtgcaaacctctgattccaagtga

SEQ ID NO: 23989 - DNA, 342 bp, Oryza sativa
  Clone ID: PAT_MRT4530_29014C.1
atgtacgattcgccaggacggtttcttcgcgtcggacaagtaaaagccagcagggtggagcgtcccaacgccgcgaatggtggtgtcaccgatgctgcctcgcgagtgtcggcgaaaaaggtcaagacgttgcatggcctaactgtcgctataggaggcccaaaagcacggaaggcaattttgagccgtggcctgtgggctgattttagcaaagctgttgttgtgctcgtggcaaataattaccgcgcgtctggtggtggaagagttgcagtgaagaaagcagggcgttcgatcgccagcgagaacccttttatttcaccgccacgattggcgtgtgaatga

SEQ ID NO: 23990 - DNA, 490 bp, Oryza sativa
  Clone ID: PAT_MRT4530_29015C.1
ccaccaaaaagaaaatttttttgccatgtccatgtggatgccatgttatgacagggggtgggccctacaccatgggccccatttcaaataattaaaacccctttttgcttttttttcccaagatggggctttctcaatctataaggaaagataaaaaggccttgacctttcctggggaccataaaaaaaagtccccttcaggaaaaaggaatgccctaaaagggctccttcaccaaaggaaaaatagggttagacaaggtccccaaaggtgggcaaggcctttgccgtcttcgttaacgtgggcctcaatcagctgtttccgttttgctgcccaaagctgctttgatcctgagggcaaaaaggaaaagggtttctcaaagatgtcaaatccaggccgagggaagtcttcaacccccccgaagcagggatcaaagctcaatggcgagaaataggggggatcatcagcctttttcatgtcaaaatttgggat

SEQ ID NO: 23991 - DNA, 1460 bp, Oryza sativa
  Clone ID: PAT_MRT4530_29016C.1
gcacgagggacggcatgtgttgcgtgagcccttccccttccgcctccgcgacctcgtcgcggcggggtcagatcatcgccccggactcgccgccctccctgcgatcgtactccgacgactcgccgccgtcgacgcgggccccggccgtccaccctgaggtggaattcgaagccaagccggccaaacgcgctcgcgtggttcccggtggcggcggcggcggtggcggcgccgatgcggcggccggagacggcagggaccgcatcagcgaccttcccgacgccgtccttctgtcgatcctctctttcctccccttccgggacgccggtcgcacggcggtgctctccaggcggtggcggaaactgttcgacgaatccctgctggacttcaacgcgtgccagccgttcccgccggaggaaggccgcggctgcgagtgggtcatccgctccatcaccgacatcctagcagcccgcccggacgtccgcatccgcagcttccgcttcgtcatgtatgggcaggggttcgcggaccacctcgccgacgtcgatcgctggttccgcaccctagcgcaccgcggcgtccggcagctcgacgtcgacatgctgtacacggtcccggcaccgctcctcccgggttccattctcgagttctcctccctggaaatcctcagggtgttcaactgcaacttcctcgatctttccctgccggtgcttcggctccccgtcctcaggacgctcgacctgtccaacgtctccatgtcccagggcttcctgcaggctatgatgtccaactgcccatcgctagagtgcacaaagctgaagaacatcaccggactagacaagatatgcgtccgatcgaggaacctggtgcgcctgttcggtgatttcagttacctgaaggagctcgtcgtcgaggacgcccccaacctcgaagaattggtggggatcggcctcccgctcgctgcagcgaaggtcaagatcgtcttcgcgccgaagctgcgggtgctgggttacttggggaagagcgtccgcccgctcgtgatatatgacaccgtgtttgatgtgcccttctcagagaaggggcacaccatcttcgttgcccaattgctgaaatgcttcccatgccttgaggcccttcatatcgagccagacagccggtcaatttgccggccggtcgatgttgaagagtgggacacaataacatctgtccagtgcattgaacattccatgaacaaattggtcttcgaggattttggaggggaagactgccaatggaggtttctgacgtttctgcttgggatggctagagctctcaaggatattgacttccactgttcagaaagcaaagattgggcaagtctgaaactgtgtgagactgagagtagttcaattgttcaaagcagcacaaagaacaagtggcgatgttcctttgtcgattgtgggttaatccgtagtgttgtctga

SEQ ID NO: 23992 - DNA, 586 bp, Oryza sativa
  Clone ID: PAT_MRT4530_29017C.1
taatttcgagcaccacaaatcattcataaaatcatccacaaattattcgagcaccacaaaccattcataaaatcatccataatttatttggccctacaaccgcccagactttttgtttggttatggaagataaaatgtgtaatgaaaattaaggtttttgactggctgcttcactgacaaatgaaacaccagggatatgcttgatggaagacattgtacaaaagaagatgatgacttgacttgtgctttatgtcctggaggccacagagagactagaattcatctatttttcgctttcccgttcagtgttgcctgttggtagcatctgggaatttcctgggatcccacattggagttctttcaaatgatggtacttgaaaggattaattttagaaggaaggggttcctcgaaatctgtttcattgcaatgtgacatatcttgaagcaaaggaatggactgatctttcaaaatgttccaccaactttccagtcctggagaaatctttttaataatgagattcttctgcatatgtgcaggatgaaggatcctatgaagcaaatagtttttaattggttacaaacttta

SEQ ID NO: 23993 - DNA, 502 bp, Oryza sativa
  Clone ID: PAT_MRT4530_29018C.1
accttaacctgctgcttttgctttggttaattagctgagagagaaattaagagagagatgagttgcagcagcagcaacagcagcgtccatggcttcttgtggctgatgctcgtttatgcgttctgtgcagctgttcaagctcagcaagcagcgagaactgatccagcagaagtggctgcactgaacacgatcctggggagatggggcctgcgggcgtcgccggcgtggaacatcagcggcgagccctgcagcggcgtcgccatcgacgagaccggcgtcgacaacaaccccaacatcaacccggccatcaagtgcgactgctccttcaacgccggcaccgtctgccacatcatcagactgagagtgttctcgttgaacgttgttggtcaaatacctgaggagctgcagaatctctcttatctgaataacttggatcttcggcgaaattacttgacgggtcccctgccatcctttattggaaacttttctgccatgcagtact

SEQ ID NO: 23994 - DNA, 132 bp, Oryza sativa
  Clone ID: PAT_MRT4530_29019C.1
acctaaatccctggagagacccacgcgttcggttaactaatgcgctcatatagcactccaagtggaggagggccatgcgcattttaaatatttttgaccaggatttgatgtacagaaaaaatatatgaccaa

SEQ ID NO: 23995 - DNA, 1387 bp, Oryza sativa
  Clone ID: PAT_MRT4530_2901C.1
gcatgtggggttacaagcgtttcttcaaacggtctgccttggaaacatcagattatcttaaagatgattgccttttggtgaattgtactgttggtgttgtccaatcacatactgaagggccaaagatatatacaataccagtgccaccatccaatatgtctcagcatattggccagctactgacggatggaaagagaactgatattacatttgaagttgatggagaggtgttccctgctcacaaggttgttcttgcagcccggtcaccagttttcagggcacagcttttcggtccaatgaaggataaaaacatgaagcgtataacgattgaggatatggaggcttcagtttttaaggccttactccattttatgtactgggatgagttgcctgatatcgaagagcttactggcctaaatacaacttgggtatccactttgatggctcagcatttacttgcagctgcggatcgttatgcattggagagactaaagttgctctgtgagctcaagctttgtgaagatgttgcaataaacacagttgcaaacactttggcactggctgaacagcaccactgttatcagctaaaaactgtttgcctgagatttgtggctttgcctgagaatttaaaagctgtcatgcaaaccgatgggtttgattatttgcagcaaagctgcccatccttgctgaccgagcttctggagtatgtggccaaggtaggggagcattcggtgagcccctgcttgtattcgaacgaagtccttgatggtggcgatgccaatggaagacgtgtgaaaccgcggatttaacggcagccctgataaaaacctagctggatttccttgtgttgtttccgtgtaaagtgttatagttctataacggcacttttctggtgccatattatatcatgcatgttgtagtgtcttgtgacttctatacctccccctatcgttgctactctggagctgagttgttgctaatatatgtgttctactgactagtgtactgcaaaattgcattgctgcgaagcacatggagcttcgcagcctgtgaccataaagtgcactcaggtggcacggcaaaggtggactgggcgcaaggttttgtcggtggaaataacggcgcagaatgtttctatggaagtttaactttgtgcttaggtcagctttgtcgatttgtagtcgtctgtatgactgtaattcaattggaatggtgaaatgcaatgaaatgtatcggttagatcgtgtcaaaaaaaaaaaaaaaaacccgcggcccttttgcttttgtgttcggtttttctattttttctattttctttcttttttttattgctgtggcagagttgtaaactattcgcgatgattttgttgcagatatattttttccc

SEQ ID NO: 23996 - DNA, 411 bp, Oryza sativa
  Clone ID: PAT_MRT4530_29020C.1
atgcctggagcagctaccaccgccgttgttggcagccgccgtggcacacagcacgcggaaggcccggccactatcatcgccatcggcactgcaaacccagctaacattgtgccccaggatgagtttgccgactactacttcggtctaaccaagagcgagcaccttaccgagcttaaagacaagatgaagaggatatttaatacggtggatccatcattttacattgttagatctatgtatgttaaaagaaaatgtcaagtgaacccaataattgtaactactacatctcacagaaataaatccggtcagaaatcgggcatagagaagcgctacaaccatccttatgaggagatcatcactgcccacccagagatcattgattgtcacaccctaaaaatcctaaatatataa

SEQ ID NO: 23997 - DNA, 111 bp, Oryza sativa
  Clone ID: PAT_MRT4530_29021C.1
atgaagttgataacttgtgaggttgacgccgaagatatgaatcgtgaagagaagattccatccgcagcaggaggtcaagccaagcagttccgagtggtgaagttttgctga

SEQ ID NO: 23998 - DNA, 393 bp, Oryza sativa
  Clone ID: PAT_MRT4530_29022C.1
atgacggcagttcatcggagggtaaattcggcgaatcaaggccgaattaagaggggagaacgtgggggaattgatgatgaggaggagaggaaccgatttttggtagaggagaacgagtggggagggagatcaagaggggccgcggcgcttctgttctttggctgggagaagaacaggcggcggatggatttatcagggcgtgacaaattcaccccctacaagaatctcgcccttgagattcgaagggttagaaagaagcttttatctgagttgcgagcacttggaggtgttgcttcaattctgagtctgagatctacaacatttgtatatgtctttgatttggacaggggaggaggagatgaattagggttaaggggtctgcacgaatcttaa

SEQ ID NO: 23999 - DNA, 2283 bp, Oryza sativa
  Clone ID: PAT_MRT4530_29023C.1
atggcttcctatggtgagctaacaatatcatgtctcacggccatagctgttgctggggcggcgttgctcgccggcggcgcagaggcgcaatgcctgcacacctgcggcggcatagacatcccttacccttttggcatcggatctgacggcgactgtgcattgcctttttacaatatcgactgcaacaacaaaaaaccattctaccgagatgtggaggtcctcagcatctccctccagcttggtcagatcagggtgagcacccccatatcttcttcttgctacaaccccttctctaagaggatgtactccagcgggtgggggttcaacctgtcatacacacctttcatgctgtcggactccaacaagttcacggtcgtcgggtgccagtcattggcctacatttccgacccaaccagcaactacacgagcggctgcgcgtcctcctgcccgggtggtaaagtggtgagcgccaccaacagaacctgctccaggataggatgttgccagataaccatccccagaggcatggaattctgcaaggtgtcgttcggggagagcatgaacacatcgggaatctacgaacacaccccctgcagctatgcagcgataatggactactcgaatttcactttctcaaccagcaacttgacttctctgctagagtttaacaacacctacagtggccgagcgccggtgaagtttgactgggctatctgggtggagcaaaatcagcctacatgtgcaactgctccaaaggataccatggcaatccttaccttcaaggctcaaatggttgtgaaggcatggttagaattggttcttcatggggacataaaggggaggaggcttgtccccgtcggttttcacgagggtggggatggttcttcattccttgtccccactccccgtggagctccacataggtatccaagtttaatggatggcgatgcattccccgacggtgaattccctgttgccatctctacctcggatccaatgtgtttctatatattaatgaatgtgaacatcctgagagttacccgtgctatggagaatgccacaataaagacggcggatttgattgtttctgtcgtgatgcacggaggacagctattgctagaaatgatgaaagtagagggcaatgcagggtttacactctacggtagacaagagattgagactgccacaaataacttcaacaaagcgaacatcattggggaaggagggcagggaactgtttatagggcggtattgggtggaatcgccgtcgcaattaaaatgtgcaaggagattgacgagaacaggaagatggaatttgtgcaggaactggtcatactttgccgtgtcaaccatcccaacattgtcaagttgctcggttgttgcctgcagtttgaggcacccatgcttgtgtacgagtttgtgcaaaacaaaacactgaaagagttgttggatctccaaaggagcacgaggttccatgtcacactaggaacccgcctaagaattgctgcggaatctgccggggcatttgcgcatctgcactcattgtcgcaccctatactccatggtgatgtgaagccggccaacatcctactggctgagggattggtcgcaaaggtgtcggactttggctgctcaacaattgatgagagtactccggctgtgccaaaaggcacgccagggtatattgatccagactacctactcgagtatcaactcacagccaagaatgacgaggctatggtaaatggcacactccaggacctccttgacagtgacatagtcgatgaagctagcatgagagtaatccatcgagttgcagtgctggcaagaattttgaagactatgcttcttgttgagaacacattgcccaagacgacatacgaagtaaagcagattctatgtccactggggttagaggtggaggccggatcaggctgcccccctgagccagttgtcgaggagatcttctggccgtcgccggggtcggggtcactcgggacaggccaccattgctatccgtggacacagcccaaggccaccctccacctcttcgataagccggtggctagggaggagcccgcctgggcgaggcgggagagaagggcgacgccgcgacggcggccgcagtggggaagcacggcggagctctgcggcagccaaagatgggtgaggggggctcatgccagcgacggcggcgcacgcgcacgaggggacagcgcaggcccggagggcaacgtcggtgacgagacagacccaggggtggccgtcggcgggcgcgcgtga

SEQ ID NO: 24000 - DNA, 1365 bp, Oryza sativa
  Clone ID: PAT_MRT4530_29024C.1
gcacgagggagtctccactccaccgccgccgccgcctccgcgaaatggcgaatctgccgccgtcgctctccatcggcgccgcctccttcgccgcgccctcgcccccgccgccctcgcctggcgcctcctcgtcgtcgtcggcggcggcggcggcggctccgggggccgccaaggaccggaagatggcgtccgcggagcagctcgtgctcgacctctgcgaccccgagctgcgggagaacgccctcctcgacctctccaagaagcgagagatttttcaggatcttgctccactcctgtggcactcttatggaacaattgctgcactactccaggagattgtgtcaatctatccatcactttcacccccaacattatctccaggggcttcaaaccgtgtctgcaatgcacttgcacttcttcagtgtgttgcctcacacagtgacacaaggattcctttcttgaatgctcacatcccactgtatctgtaccctttcttgaatactactagcaagacaaggccttttgagtacttgaggcttaccagcttgggtgtcattggcgcacttgtgaaggttgatgattctgaagtcattgggtttctgctgcaaactgaaataattcctctgtgtctccgtactatggagatgggcagtgaactttcgaaaacggttgccacctttattgttcaaaagattctgcttgatgatgttgggcttcgctacatatgtgctactgctgaacgtttctttgccgtagccagtgttctatcacagatggttcaggcacttgctgatcaaccttctccaagactgctgaagcacataattcgctgctacctcaggctgtcagaaaattccagggcatgtaccgcgctgaacagctgcctccccaacgcgctgaaagatggaaccctcaacaacttcctccaggatgatcatgtcacaaggcgttggctccagcagctgctgcacaacatgactatggccggcatgggaggagctcctcatggaggccttgatcacatcatggggatgtgatcatctgaaacgaagctggctgtttgcaactcatcatatgcctgaagtcaggactcaggactagtccatctgtagttagcctaccaaaaggattatacttttagttttacctttaaaaagaaatggcgtgtgccattgaaggataagaaatgtgttggttgtagttaaaaggtactgcttgctatcctgtgatgctgtaaaaatgcaacagaattgcgcagctctctgcacaagtagttctcagcttttggtgaacagtccgaaatggagaaacaaaggtaaaaacatcagacttacatgttctcttcaaaaaaaaaaaaaaaaaaaa

SEQ ID NO: 24001 - DNA, 634 bp, Oryza sativa
  Clone ID: PAT_MRT4530_29025C.1
atgaatattaagaccgaaaaaattgcggtgttatatggcggtacttcacaagaacgtgaagtgtctctacactcaggtgcagcagtcacagaagcattaaaaagcctaggttacaatgtagaaggtattgatacaaaagatatcgctattgagaaattaaaagaaaaaggcattcagcgagtcttcaacattctacatggcggaataggtgaaaatggtgtattgcaaggtgctttagaacaaatggggattccatacactggttgtggtgtaatggcttcagctatcacattagataaattccgtaccaaattattatggaatgctgtcggtttacccacagcagatatggtagtagtgcaacgaggacaagcaatcgatattaatcaaattattgcaaaattaagtttacctgtttttgtcaaaccatcaagtgaaggttcaagtgtcggcgttttcaaagtcaaaacaaaagaagaattactgcccgcgattaccgcagcactggaatttgatactatcgtattagtagaggaatttttgaccggtgctgaatattcagtccctgttttagatggcgaagttttacctgcggtgcaaatcattcctgatggtgaattttacgattatcacg

SEQ ID NO: 24002 - DNA, 617 bp, Oryza sativa
  unsure (1)..(617): unsure at all n locations
  Clone ID: PAT_MRT4530_29026C.1
ctaactgttcatgaagctgcttatgaacctcaatttgcattcgcagagcttctgccacttgtaagttccttccttagtctctggaagatattttgcgaggcgatacttctttatagttgagcccaagaccggagccagcacgttgccctgaaaaggaccattattaacagtccaggaacccagatttaagaaagtattcttaactttcatgagacctttccaactgctaagttttttttcaattctttgctcaattgttttccagtctttattacttaatttcattggtcggctgccagccttggtcttcttcaagacaagcatgctaacacaagtggtttgcgtggtatctgagaaagaaagattgatggtgcaaattgcgtggtatcgtcgcaatctcctctgctccctggacgacatcggcaaaaattgacagatgtttgatacatgtctttaatggattgtatttgatcatgtaaattcagtctctatccgtcgatttaaaattgtagcattcattcataatctctggagataattttcgttttaaaatataatctgtcctacgcatatatatatcatgattttttatganggctttcaaaaaaaaaaaaaaa

SEQ ID NO: 24003 - DNA, 327 bp, Oryza sativa
  Clone ID: PAT_MRT4530_29027C.1
gccataccagcgggaccagagagtctcatggaaaaggagaaacatagagatcttggtgacaaacaagaaaaagaagaacagctacacactgtacggctttaatgcacagatgcacaggctgcccacctggcaataaatggaggagcgcatgccactttctgggggcaccaagctgggaggttccaggtgacccactacactaagtggtcgaccagggtgcctatacctaaatgacgccctagactaacaggttcttgccaggcaccaataattattggaggagagccccctgtctggcagaagcttgccgatgaatatggacataat

SEQ ID NO: 24004 - DNA, 3810 bp, Oryza sativa
  Clone ID: PAT_MRT4530_29028C.1
atgtcgggccaagcgggggatgggaacgatggtgataagggagctaagatcccttatgactatccctctacatctacatcttatgtgagtacctatagcggcaaagctccgtacttcaatggtacggactatgccgcttggaagcataagatgaagatgcatttgaagtctattaacccatctatttggagaatagtcaaaaaaggctatgttttgcagaatcccgaagatcccaccaaggaggacgacgagaacgagcacaagaacgctcaagccgctaatgcaatacttagcgccttgagtggaagtgagttcaaccgtgtggatggcattgagagtgccaaagtgatttgggacacgcttcggaacttgcatgaaggcacggatagtgttcgtgagtccaaggtggagatcctcaaggggcaatttgagagatctgtgatgttagatggtgagagcccaagcgacatgtacgaccggttgagcaagatcatcaatgagatcaagggacttggctccaaggacatgaccgatgaggttgtggaactctaccttgagcgtccggactacaagactctcacacctcatgatttgctcggatgcatccttgcccttgacatgctcgtgcaagagtccaaggatgtcatccaatacatcaaccaaagctcaaccgcaagcatcaagaaggaagacttagctttgaaggcaaaggaagaagaagaagagaatcgcaagagcaagagcaaggcggagatcgatgatgaagagatggctcccttcgtcaagaagttcggcaagttcatgaggcgaagcggcttcttcaagggaggatcttccaagcactactccaacaagtcaagtggaagacactccgcaagagtgtgctacgtgtgcaaagagcccgggcacttcattgcggattgcccccacctcaaggatggttcccacatcaaggaagataagaagaaggatgagaagaaggagaagcacaagcatagcaagagggaacattatggccaagctcaccttgggatgatcttcggctccgactccgagtcaagctcaagtgatgaagaaggagtcgccacgtttgccgtcaagccctcatcaccaccgagactcttcgactactcaagtgatgaggatgctccggtttgtctcatggcaaaggagcctaaggtaccttctcttcttaagtcatttaatgttgatcttgttagtgatgaggaggatgaggttgaggatgaggttatagatgacgaattgttcaagtccataactaaggaatccctaccacacttgagtgagttgcttgagagaattgaggaccaatatgcaactcttgagaggcaagagactttgctcattcgtgagaaagagcggtctcatgaactcaagagtgagcttgctaaggagagagagaaaaatgaggcattggaatatgtctccggtggaagaagttgggtaattgatagtggatgcacaaatcacatgaccagagaagaatcaatgttttcaactcttgatccaaatggcacttcacaagataacatagttttcggggacgatggaaagggaaaggttatgggattgggtaagattgcaatttctaatgatctttccattgccaacattctcttggtaaaatctctaaactacaatcttttgtccgtttctcaattatgttctatgggttataattgtctttttaccgatgttgatgtgaccgtctatagaaggaatgattcctcggtagtctttaagggtgtcctcaagggaaagctttaccttgtggatttttcctcaagtaaagccaaacatgagacatgcttagtggctaagtccaacacggggtggctttggcatcagaggctagcccatgttggtatgaggaatcttcacaagcttctaaagcacgatcacatccttggactaacaaatgttcaatttgagaaagatagggtgtgtagcgcatgtcaagccggcaaacaaattggagcacatcaccccgtcaagaatgtgatgaccactacaagaccattggtgcttctccacatggacctcttcggaccaattgcttatctaagcattggaggtaacaaatatggtcttgttattgttgatgacttttcacgcttcacgtgggtgttctttttgcatgacaagagtgagacacaagctatcttcaagaagtttgcaagaagagcacaaaacgagttcgacctcaagatcaagaacattcgaagtgacaacagcaaggagtttaagaacacgtgcatcgagagtttccttgatgaagaaggcatcaagcacgagttctcggctgcatattcacctcaacaaaatggagtagctgagaggaagaataggactctcaatgagatggcgaggaccatgttggatgagtacaagacatcggacaatttttgggccgaagccgtcaacaccgcatgccataccatcaactgcctttatcttcaccgccttcttaagaagactccctatgagcttcttaccggtaataaaccaaatgtctcttactttcgtgttttcggtagtaagtgttacattcttaataagaaggctagatcctctaagttcgctcctaaagtggatgagggattcttgcttgggtatgggtcaaatgaatgcgcataccgcgttttcaacaaaacctctagtattgttgagattgcgcgtgatgtgacatttgacaaaattaatggctctcaagtatccgagcgaagcaatcaaaagattggctcttggggacgtgaagaaggcgagcaagtgccaccctcaccgatcaacttagctcgcccaagaatccaccaaagtatccaaagagatcatcctaccgacaacatcttaggagacatcaacaagggagtatccactcgttctcgtattgcaaatttttgtgagcattactcgtttgtgtcttctcttgaacctctaagggtggaagaagctcttaatgatccggattgggtgatagcgatgcaagaggagttgaacaatttcacccggaatgaagtgtggactttggtggagcgacctcggcaaaatgtgattggcacaaagtggatcttctgcaacaagcaagacgaggccggggtcgtaataaggaacaaggcgaggttagtggcgcaagggttcacccaaatcgaaggattagatttcggtcaaacttttgcgccggtggctagacttgagtcgattcgcatattgcttgcttttgctactaacctcaattttaagctatatcaaatggatgtcaaaagcgccttcctcaacgggcctatcaacgagttggtatacgtggagcaaccaccgggcttcgaggatccgaagtatcccaaccacgtgtacaagctccacaaggcactatacgggcttaagcaagcccctagagcttggtatgagtgtcttcgcaattttcttgtgaaaagaggctttaaaatcgggaaagccgattcaaccctttttactaaaagacataataatgatatttttgtgtgccaaatatatgtcgatgacattatatttggttctactaacaagtcttttagtgaagagtttagtaggatgatgaccaaacgttttgagatgtccatgatgggtgaattgaagttcttcctcggccttcaaattaagcaactcaaggaaggaactttcatttgccaatcaaagtatttgaagaacatgcttaagaagtttgggatggagaacgccaagccaatccacactcccatgccatcaaatggccacctcgacctcaacgagcaaggtaaagacgtcgatcaaaag

SEQ ID NO: 24005 - DNA, 6339 bp, Oryza sativa
  Clone ID: PAT_MRT4530_29029C.1
atgaagatgcatttgaagtctattaacccatatatttggagaatagtcgaaaaaggctatgttttgcaaaatcccgaagatcccaccaaggaggacgacgagaacgagcacaagaacgctcaagccgctaatgcaatacttagcgccttgagtggaagtgagttcaaccgtgtggatggcattgagagtgccaaagtgatttgggacacgcttcggaacttgcatgaaggcacggatagtgttcgtgagtccaaggggcaatttgagagatttgtgatgttagatggtgagagcccaagcgacatgtatgaccggttgagcaagatcgtcaatgagatcaagggacttggctccaaggacatgaccgatgaggttgtggtcaagaagatgcgtccggactacaagactctcacacctcatgatttgcttggacgcatccttgcctatgacatgctcgtgcaagagtccaaggatgtcatccaatacatcaaccaaagctcaaccgcaagcatcaagaaggaagacttggctttgaaggcaaaggaagaagaagaagagaaccgcaagagcaagagcaaggcggagattgatgatgaagagatggctctcttcgtcaagaagttcggcaagttcaagaggcgaagcggcttcttcaagggaggatcttccaagcactactccaacaagtcaagtggaagacactccgcaagagtgtgctacgtttgcaaagagcctgggcacttcattgcggattgcccccacctcaaggatggttcccacatcaaggaagataagaagaagagtgagaagaaggatgagaagaaggagaagcacaagcatagcaagagggaacattatggccaagctcaccttgggatgatcttcggcttcaactccgagtcaagctcaagtgatgaagaaggagtcgccacgtttgccgtcaagccttcatcaccaccgagactcttcgactactcaagtgatgaggatgctcccgtttgcctcatggcaaaggagcctaaggtaccttctcctcacaagtcatttaatgttgatcttgttagtgatgaggaggatgaggttgaggatgaggttatggatgatgaattgttcaagtccataactaaggaatccctaccacacttgagtgagttgcttgggagaattgaggaccaatatgcaactcttaagaggcaagagactttgctcattcgtgagaaagagcggtctcataaactcaagagtgagcttgctaaggagagagagaaaaatgaggcattggtacggctttacaagcaaaccaaagagtctcatgctaatcttgaggtggcgaacgctcaacttcaagagagagtggatggcttggacaaagcatacctcactcttgaagagaagttcgaaaccttaaaaaatagtgtctctctccctagcgagccatcttgttccaaaattgtcccaagcaatgaaccatgtgtgagatgcaaagatattgatattgaagcttgtgctactaactctatttccttgagtactttgcaaaagcaaaatgagaagcttatgggactccttcacaatggcctacttaagtgccatatgggtagtaaggccctaaaggactacctaggctatcaaagggacaacttcaaccatgagggtcttgggtatattcctccaccaaaaggaaaggtggacaaaagtgtgatgatcaagaggccccaaggtcttagcaattttgttaaggccaaaagtatccttcctaatgattatgcttcacattgttcttttgatgcatcttatattcttaggaagaatactagtggtcgtgttgttgctaagtatgtaggcccaaggggcaagaatatttctatcaagagagtactttgggtgcctaaggcacttgttactaacatgagaggacccaagcaagaatatgtctccggtggaagaagttgggtgattgatagtggatgcacaaatcacatgaccggagaagaatcaatgttttcaactcttgatccaaatggcacttcacaagataacatagttttcggggacgatggaaagggaaaggttatgggattgggtaagattgcaatctctaatgatctttccattgccaatgttctcttggtaaaatctctaaactacaatcttttgtccgtttctcaattatgttctatgggttacaattgtctttttaccgatgttggtgtgaccgtctatagaaggaatgattcctcggtagtctttgagggtgtcctcaagggaaagctttaccttgtggatttttcctcaagtacagccaaacatgagacatgcatagtggctaagtccaacacggggtggctttggcatcggaggctagcccatgttggtatgaggaatcttcacaagattctaaagcacgatcacatccttggactaacaaatgttcaatttgagaaagatagggtgtgtagcgcatgtcaagccggcaaacaaattggagcacatcaccccgtcaagaatgtgatgaccactacaagaccattggagcttctccacatggacatcttcagaccaattgcttatctaagcattggaggtaacaaatatggtcttgttattgttgatgacttttcacgcttcacgtgggtgttctttttgcatgacaagagtgagatacaagctatcttcaagaagtttgcaagaagagcacaaaacgagttcgacctcaagatcatgaacattcgaagcgacaacggcaaggagtttaagaacacgtgcatcgagagtttccttgatgaagaaggtatcaagcacgagttctcggctccatattcacctcaacaaaatggagtagccgagaggaagaataggactctcattaagatggcgaggaccatgttggatgagtacaagacatcggaccgtttttgggccgaagccgtcaacaccgcatgccatgccatcaaccgcctttatcttcaccgccttcttaagaagattccctatgagctttttactggtaacaaaccaaatgtctcttactttcatgttttcggtagtaagtgttacattcttaataggaaggctagatcctctaagttcgctcctaaagtggatgagggattcttgcttgggtatgggtcaaatgaatgcgcataccgcgttttcaacaaatcctccggtattgttgagatcgcgcgtgatgtgacatttgacgaaactaatggttctcaagtagagcaagttgactcacatgtgttaggtgaagaggaggatccgagcgaagcaatcaaaagattggctcttggggacgtacgtcctagggagccacaacaaggagcctcttcctcaacacaagtggagccacctacatcaacccaaaccgacgatccctctatctcaagcttggatcaaggtgaagaaggcgagcaagtgccaccctcaccgatcaagttagctcgcccaagaatccaccaaagtatccaaagagatcatcccaccgacaacatcttagagacatcaacaagggtggaacaagctcttaatgatccggattgggtgatggcgatgcaagaggagttgaacaatttcacccggaatgaagtgtggactttggtggagcgacctcggcaaaatgtgattggcacaaagtggatcttccgcaacaagcaagacgaggccggggtcataataaggaacaaggtgaggttagtggcgcaagggttcacccaaatcgaaggattagatttcggtgaaacttttgcgccggtagctagacttgagtcgattcgcatattgcttgcttttgctactaacctcaattttaagctatatcaaatggatgtcaaaagcgccttcctcaacgggcctatcaacgagttggtatacgtggaggaaccaccgggcttcgaggatccgaagtatcccaaccacgtgtacaagctccacgaggcactctacgggcttaagcaagcccctagagcttggtatgagtgtcttcgcaattttcttgtgaaaaacggctttgaaatcgggaaagccgattcaaccctttttactaaaagacatgataatgatatttttgtgtgccaaatatatgtcgatgacattatatttggttctactaacaagtcttttagtgaagagtttagtaggatgatgaccaaacgttttgagatgttcatgatgggtgaattgaagttcttcctcggccttcaaatcaagcaactcaaggaaggaactttcatttgccaaacaaagtatttgaaggacatgcttaagaagtttgggatggagaacgccaagccaatccacactcccatgccatcaaatagccacctcaacctcaacgcgcaaggtaaagacgtcgatcaaaaggtataccgttctatcattggctcacttctttacctttgtgcatctaggcccgatattatgcttagtgtgtgcatgtgtgcaagatttcaagccgctccgaaggagtgtcaccttgtggccgtgaagagaattcttagatatttagtgcacacacctaaccttggtctttggtatcctaagggagcgaggtttgatctcattggctatgccgatgcggattatgccgggtgcaaagtggataggaaaagcacatcgggatttttcggactttccgaaaaattttcggacatatccgaaaaacatcagaaccgtgcgcaacccttctggatcctttcggacatatccgaaaattttcggaaatatcagaaaatctcggagtccttatatatcaccccgtggactcccttctctctcctttccactctttttccccacggattgactccctcctccctccccaccggcgaccccccggcgaccacctcttctccggcgacctcccgcggctcccctcctctccaacctcgtgggagcacgtttggggccctccttgggacctacattgtcgatcttcaccgcgttcttctagtgttcttcacgttcttgaggatgcctccccgcaagcaaacctcccacatgtccaggagcccgagggaccgctctcccactccatcctctcatgatgattcggacagtgattggaccggtggagaggatgcgattcctcagggtgcgcgggtggctcggggcggcaacctccctcctcggcgatcctctcatggtggtggtggtgatggtgagggctcctctcgtcaaccgcaaacgccgccgcaccaacccaatgtcctcattgggcctctccgccttcatacccccgagagggatccggcggtgattcgccaagtgtatgattggaggcgcaagtctgaggcgcacaatgatcccgtgatagactctgtgattgcaaattgtgatctcatgggtattcgctccttcatgaccttgcagcaaaattggtgcaacgagatcattgctcagttttatgccaccgtctactttgatcgttatcgtgccatgcactggatgactcaggggtcctggttttctgtttcttatcaacagttggctgagatttggggctttcgtcttcgttctttgctcaaccttgataaccttcataatcttcaaattcctgccaacacagaattgctccctctttacactccaaatgatcctaatgtggtgttgggcaaggtcgacggcctcaagctgtactttgcctacttgaactggatgtttcgccggtcctttgtgcttaaggatggtgatgctagcagcattaaccacatctctaggaccgtgcttcttaggtttgatccccctcctcatcgctttcatgtttatcactttgtgtgggaggagatccgcatggcttccatccagtacaagaaggggttggtctatgcccctcacattatgcggatgatcgagactgtgactcagctccagtttcgccatgatgtgactcattctcagcttcacttgcgccttattaaggccccccgctcctcagctgctcgggacatcccctcctcttccactcagccgcctcctgctcctgagcgccctgcctctgtggctcgtcgtgagccatctcccttattccgtattttgcggagtctttttggtctttgctctacggaggccaaaaagaaccgccgattgcggaattcggtgaagaaaacggctcgtgatgtcaagttcctcaaggcaaggtattatgaggaccaccacattgatatccctccttctcctccgggtttcgaggccgagcccgatgagccagaggatgaagagattgaggatccctttgctgggttgcctcctgactttgacttctttggttatggccctggctatggctatcctcctccaccacctccagaggatcctcctcaggcgcccttcgcttga

SEQ ID NO: 24006 - DNA, 250 bp, Oryza sativa
  Clone ID: PAT_MRT4530_2902C.1
ggcaccagcgttttttttttttttttttttttaagacaaatcatatcacattcatatatcatcagaataatgtacagtatacatatgatggggctactgccagcacaagttggctgcaaataaatcaatggcttcaagtaaattacattaaacagatttctaaggttcaaagcaggcttgacaagcaaccaaagaatcgaacagacagcagaaccgcgcgcgtgctcggtcctactccgccccagctcat

SEQ ID NO: 24007 - DNA, 2814 bp, Oryza sativa
  Clone ID: PAT_MRT4530_29030C.1
gagaagcacaagcatagcaagagggaacattatggccaatctcaccttgggatgatctttggctccgactccgagtcaagctcaagtgatgaagaaggagtcgccacgttcgccgtcaagccttcatcaccaccgagactctttgactactcaagtgatgaggatgctccggtttgcctcatggcaaaggagcctaaggtaccttctcctcttaagtcatttaatgttgatcttgttagtgatgaggaggatgaggttgaggatgagattatggatgacgaattgttcaagtccataactaaggaatccctaccacacttgagtgagttgcttgggagaattgaggaccaatatgcaattcttgagaggcaagagactttgctcattcgtgagaaagagcggtctcatgaactcaagagtgagcttgttaaggagagagagaaaaatgaggcattgccgcggggcgcgcccgaaggcggcctcgccggcacggccgacggggaggcggcgcgctcgcaccccgatggtcgccggcggcgaccaccagcgcggcggagcggcgcccgagagaggggagggaagggggaagcgaaacggcggtccacggctcaccccgggtcgacggcgacaacggaaacggcgaccgaagcggagagaggcggcggcgcggctcgggtcgacgggaacggcggcgttccggcggtcggctggcgaaacggaggggtggacgaggtcggcgaggacgcggcggagccgaaggaggcgacgccgaggcgggagaaagacgtgacactaaaggagtacctaggctatcaaagggacaacttcaaccatgagggtcttgggtatgttcctccaccaaaaggaaaggtggacaagagtgtgatgatcaagaggccccaaggtcttagcaactttgttagggccaaaagtatccttcctaatgattgtgcttcacattgttcttttgatgcatcttatgttcttaggaagaatgctagtggtcgtgttgttgctaaggtgtatagcgcatgtcaagccggcaaacaaattggagcacatcaccccgtcaagaatgtgatgaccactacaagaccattggagcttctccacatggacctcttcggaccaattgcttatctaagcattggaggtaacaaatatggtcttgttattgttgatgactttttacgcttcacgtgggtgttctttttgcatgacaagagtgagacacaagctatcttcaagaagtttgcaagaagagcacaaaacgagttcgacctcaagatcaagaacattcgaagcgacaatggcaaggagttcaagaacacgtgcatcgagagtttccttgatgaagaaggcatcaagcatgagttctcggctccatattcacctcaacaaaatggagtggctgagaggaagaataggactctcattgagatggcgaggaccatgttggatgagtacaagacatcggaccgtttttgggccgaagccgccaacaccgcatgccacgccatcaaccgcctttatcttcaccgccttcttaagaagactccctatgagcttcttaccggtaataaaccaaatgtctcttactttcgtgttatcggtagtaagtgttacattcttaataagaaggctagatcctctaagttcgctcccaaagtggatgagggattcttgcttgggtatgggtcaaatgaatgcgcataccgtgttttcaacaaaacctccggtattgttgaaatcgcgcgtgatgtgacatttgacgaaactaatggctctcaagtagagcaagttgactcacatgtgttaggtgaagaggaggatccaagcgaagcaatcaaaagattggctcttgggaacgtgcgtcctagggagccaagcctcttcctcaacacaagtggagccacctacatcaacccaagccgacgttccctctacctcaagcatggatcaagggtggaagaagctctaaatgatccggattgggtgatggcaatgcaagaggagttgaacaatttcacccgtaatgaagtgtggactttggtggagcgacctcggcaaaatgtgattggcacaaagtggatcttccgcaacaagcaagacgaggccggggtcataataaggaacaaggcgaggttagtggcgcaagggttcacccaaatcgaaggattagatttcggtgaaacttttgcgccggtagctagacttgagtcgattcgcatattgcttgcttttgctactaacctcaattttaagctatatcaaatggatgtcaaaagcgccttcctcaacgggcctatcaacgagttggtatacgtggagcaaccacctggcttcgaggatccgaagtatcccaaccacgtgtacaaactccacaaggcactctacgtgcttaagcaagcccctagagcttggtatgagtgtcttcgcaattttcttgtgaagaacggctttgaaatcgggaaagccgattcaactctttttactaaaagacatgataatgatatttttgtgtgccaaatatatgtcgatgacattatatttggttctactaacaagtcttttagtgaagagtttagtaggatgatgaccaaacgttttgagatgtccatgatgggtgaattgaagttcttcctcggccttcaaatcaagcaactcaaggaaggaactttcatttgccaaacaaagtatttgaaggacatgctcaagaagtttggaatggagaatgcgaagccaattcacactcccatgccatcaaatggccacctcgacctcaacgagcaaggtaaagacgtcgaccaaaag

SEQ ID NO: 24008 - DNA, 649 bp, Oryza sativa
  Clone ID: PAT_MRT4530_29031C.1
tcacaattctcgccgccgcccgggctggtaattagagacgcatggatctgtcgtcaatcaaatctggtttttttcgctgctcgagagaggatgctgctgagttgaatcaagacatccttcagaatctggtatatctaatggtctgtaaaattttacaaaagcaacaggagggaccatcaagggaatgtttcaaatgtgatggattgtgtatagaaaaaagagattcgttgtttgctgaaggtgtattggaagttgcttgctgataaataaagaccccatggatagatgcaatgatgcattaagctcttgaaggaggattttgatggaaaactatgtcgagttttcagtagccttgtttgggctaacgacactcggtttattgttctaggtctttgacctagaatcatgttttagttttttttctaggtctcttgctttttgtgttatttgctctaggtgttctgttgtccgctgtttcaggtgttttgtagtgtagttcagtttgggagtgttctcaaggtgttatacagtgaattggtgtttcggtgttcgccctttgttgggttggtgttgtttatcttctctatcgatgaaagaggacaaagcttttgccctaaaaaaaaaaaaaaaaaaaaaaaaaaatgcttgt

SEQ ID NO: 24009 - DNA, 201 bp, Oryza sativa
  Clone ID: PAT_MRT4530_29032C.1
ataatacaaagcaactcaaaggtctgtgatttatttacacaacatcttcttttccacaccaaaacttctccaattacctttaataatactaacaacaccatttctatctatcatagcgtctaacactttattatctataatatcttaaaccaaaataatattcttaccccctcctttcatcctaaacctacaacctccttt

SEQ ID NO: 24010 - DNA, 881 bp, Oryza sativa
  Clone ID: PAT_MRT4530_29033C.1
cccccaccaaccctcgcgacgagtaccagcactggatcaaggacatgaggcacagcaacagcatcaaggacgaggaaggctaccccgccttcgccctcgtcaacagggtcaccggcgaggccatcaagcactcccaaggcgaaggccaccctgtgaagctggtgccgtacaaccccggataccaggacgagtcggtgctgtggacggagagccgcgacgtcgggcacggcttccgctgcatccgcatggtgaacaacatctacctcaacttcgacgccctccacggcgacaaggaccacggcggcgtccgcgacggcaccaccgtcgcgctctggaagtggtgcgagggcgacaaccagcgctggaagatcgtcccctggtaaatgcggtgtgctggagctgcattggtcgtcgccgtgatctgtggagttgggagagtttgcgcccgtggcctgctgccctctgcctttgttgctagaataaaagtcgtgtgcgatgatcagtggtgatggtcttgtgtctgtgtccgtgtgtaatgcttttagtcgttttctcgagtcctgcttttgtgacaaaatgggggtgagaggagaggtgtcgtttccgtgaactatctcgaaggcgtttggccttgcagcttgttcttcagatgttcggagtttcagaccttttgatgagtaccctgctttatcatttatcagccatgtgtctagttcgatcaatatgcatcctttgaagtggcattggtttgtctttgaggatcaagatcctgtgcagttgttattgtaactgtaacttaagcagttacatgtgcatcacatgatctagaatggaaggccaggatgtgaagtggtactgtagcagagatgtactattatgcc

SEQ ID NO: 24011 - DNA, 402 bp, Oryza sativa
  Clone ID: PAT_MRT4530_29034C.1
atggcgcccactccgtacctctcgcttgccgcgtggctggatcgatgcggctgtttccctttccgtctctgggcttcgcagcgcctgggccaagccacggtccgctctggccaggaggtgttcggcgaaatgcgtgagagccatcaccgccgtgagctcttggcatgctggggaaggcgcacgcacgcacgattcggttctggtggttatttaggtagaggtggaaacctttggaccagatattatgttggttgtagccttgtaggcttctattcggtagagacttcaaatttaagtgggttgatcaggcttctttcatttttctttgctgattctaagacttctgctgttatatctgagaaaacgatggcagagctgtcggaggaggctgatgaggtttga

SEQ ID NO: 24012 - DNA, 2132 bp, Oryza sativa
  Clone ID: PAT_MRT4530_29035C.1
atggaggcgctgccgctgcctccgccgccgcgcctcgccgccgtgtcggcgccgtcgccggcggcttccatcagggcgcagcgcgcacaaaacacatgcgcaggagggtgcgtcgagaaataccagtcgccgcgctgggtgctgtcgcgcatcctgcagcgatgcgaaaacggctccggcggagaaggcgagaagttcgggtgccgggtgttgttgccccgggggttctgctccatctccgccgccggtgtcggcgcgcaggcgatgctgacggcgtcggagcagggctgctcggccagggtcaaggtcgtcgggagggcgccggatctgtcgctcgacacgccgcggagttcttgcacgctcgacgaggggagaaatgggaagaagaagcaggaggaggagatcatgtcgatgaaccttgggctgggcgcgagcttggtgttgctcttgtccaagggcgccgtggagctgaacaagatggtggagctccgcgcgcagatggaggcgctcgtgtcggagatcaggaaggagacgcagagcaagcacaaggactccgccgccgccgccaccgccgccgcccgttcgagctcgcaagaatccgatggtcgcagcaccaccgccgtgaaggatcccatcgcccgcgccgccgtctccgacgacgcgatgtccaactgctccggcggcggcggcggcagcggaggacgcgccgccgtggtgatgcaccggatggaggcggagctccaggtggagctgagccgcttgcagtgcggcagcgtcgccgccgcgcacggcgagaagcgtggcgctcctcccaccatgcacggactcgaggtgaagacgacgacgaagagcaacgtgtcggacagcccgccgaggagctgcgtcgtcgacgacgacgacgacgtggcagaaggtggcaatggcggagaggtggtcgaggaagacgacgacgacgacgaggaggacgaagagtatgacgaggagggggaggaggaagaagaggaggagtacggcggcggcggcggcggggacaagagcccgccgcacggcggcgtgtcggcgcgggcgctggagcggcggctgtacgagctgctgcagaagcggcagcaggagcggatcgtggagctggaggccgccttggacgccacccagcgccgcctccacgagaaggagcgcgaggtcgtgtggtggcgcgacgccgccaagctcgtcacccaccgccgcgacgagtcccgccgactcgctttcaggctctcggtcccttctcgtgccgtctccccgccgccgccgtcgcccagcgccgcgcctccccgccctccgttgccggcgacaagcccccgcagggagcgggctatctggagtccaagctgcagcctcgccctcccgctccgtgcgccgggcagcagcaagcgccgccccaagccctagcctcgctgcctgccaggtgcctgaagccccctcggcccgtgctccccttcctgtctgcttgtcggattcaccgattgtagcccgcaggcattttcaggatgggcagtgaggacacaaaagatatgctgaagaatgtggactggaaaacagttggtggtggttcagtgactactgacccaagccaaccagttgttaaaaagcgtctcccaaagaaaattagacaagttcctgaatgctattttctgcctcggcgatctttgccttctgcattggcaatctatggcgctgtgtgtgctgctggagttggcgcagggatgctgcttgaggtttggataaacaaaaagatcaaagaggacagtgccattgtctgggaaatgggcaaatgatttgattgctacctctgaagagttctccttgctcttgtgttcagctgctaaagctgcatctcagaaataatcctagctatattgattcagattatcttttgattcccagacaaagtaaaactatcctttctaatgtacggcactgccttatatctacattcctgatttcattttgaatgctagcattacagtatggtgtaacaggcagtatcagaaataacggtgttccagaacgagccatttctgtttgacattatcagtagtccgtcatacgaattaattgattgtgtggacagtagtgattacatgctgtgatgg

SEQ ID NO: 24013 - DNA, 720 bp, Oryza sativa
  unsure (1)..(720): unsure at all n locations
  Clone ID: PAT_MRT4530_29036C.1
tcaagttccaagtctgggatctcggtgagtgtgcccccaagtctctgattcacgaggactggtttagatttttccgcgagacaatttataagtacaatttacgacaatatccatgaggccaattgtgggtactacaatttatgattgagtggaccaatggttgagacctagctgactagggtttgaccattacaattctgattctgtcctaggttttgagggaattttagtataacgtgaccttttttacttgtatgctgagttcctgaattgaatcaaaatggggttctgtttattctatgtggtgttgaagtaaatgagttgttgcctaatggctttcatggcttgtctgcaaagagttcaaaaatgaccattctgagcatcttaagcaattcagtgacctgttttttcctatgtttgaaggctgatgtggttattcttaaaatactatcctctcatctgctttggcactggatcgccaagccttagtataagaagtatttggttcactagcatttcacaatcctaaggggaagttcatatgcagtaatacactaacacttggattcttgcacagcaacaataatgatgtagaattcctgcggaagtagaaatgaagaaataaaaaanatagtggaaaacaatgaggagaacgtgctcaaatcagactttagtcagcatgttcatttgcgaaataacaagagtcttgtatgggtgggc

SEQ ID NO: 24014 - DNA, 429 bp, Oryza sativa
  Clone ID: PAT_MRT4530_29037C.1
atggccctgcggtggccggtgaggggcggcgcagcaagccgaggacggctcgccgcagcagcccgaggccgacgcggcgtggcttggcggtcgggcgcccccgcagttggccgcgaggcaaccatgctggcgcgatgcggatggccggcaccggcgccccaggcgttcaacgacgcgatggtaggcggcgcggcagccaagctcatgtgtggcgtaggcgaccgacgttgcctctcctacttttccccttttcatttttttgttctttttcttcgaccagataaaaaccagatgaagacgggagaaagaaggaagagatggaaaaagaaggagattgatggaaaagatgacggcagtggcatggttctaaatttgcaaaattccagtggcacagctacgaatagaagaattgtaatgacatttttctga

SEQ ID NO: 24015 - DNA, 648 bp, Oryza sativa
  Clone ID: PAT_MRT4530_29038C.1
atgaccgtcgaactagaaaaaattgcaggatcattcttcatctcaaaagggtggaaaacctttgttcaccgtactggcttactgtctggtcaatacattcgctttcaagttcttactccatcaaagataaatgtccttctctttgacaagaaaaaagatagcaagctgcccatgatcccttcatccaagaaacaaatcaagacagcaccaaagagatcgacaggaatcactatcaatgacatgcctaccagcaagcatgcttccatgctcatttcacacacatcaaacaaagagacttcgtcagattcaaggacagagtcgatgactgacattccttccagctccgacaattcagcagtcacacctgacattaaaaactacatcagcatcatcgggcagttcctccagcgttccagcaagttctatattgtgactatgaacaatacattcatgaagcaagatagactggttgaagcagcaggcagtgattcagtcaccatgctcctgcataaatcatcggacgatcgttgcaacctaaagagaggatgggcaacttttgcagcaaccaatgccattcatctccattcagtttgcatctttcacttctacaaggcacccaacgtcaagataacaatagatgtcctttaa

SEQ ID NO: 24016 - DNA, 229 bp, Oryza sativa
  unsure (1)..(229): unsure at all n locations
  Clone ID: PAT_MRT4530_29039C.1
gcagatccagcaccgccatggccgccgcctcccctcccctcctccccaccaccgtcctccccgccaacgncaccgccaccgtntcccccgcccccacctccgtntcctccgccgacgccaaccctgccgccacgcgcgcnttcctcgcccgcntcctcgactccgtcaagcgcgcgctctcgggggcgcgcccctggccggagctcatcgaccgcagcgccctctcccg

SEQ ID NO: 24017 - DNA, 327 bp, Oryza sativa
  Clone ID: PAT_MRT4530_2903C.1
gagcttcgcagcctgtgaccataaagtgcactcaggtggcacggcaaaggtggactgggcgcaaggttttgtcggtggaaataacggcgcagaatgtttctatggaagtttaactttgtgcttaggtcagctttgtcgatttgtagtcgtctgtatgactgtaattcaattggaatggtgaaatgcaatgaaatgtatcggttagatcgtgtccttttgcttttgtgttcggtttttctattttttctattttctttctttttttttattgctgtggcagagttgtaaactattcgcgatgattttgttgcagatatattttttccc

SEQ ID NO: 24018 - DNA, 132 bp, Oryza sativa
  Clone ID: PAT_MRT4530_29040C.1
gcgtggtggcgtgactcgtctcgtctcgtctttggcttggcgcctcgccgaggtgagctgtgaattgtgaatttgtgattgcttttgccgtgcgccgctcgtttttggttgccggtttggcagcggcggcgg

SEQ ID NO: 24019 - DNA, 134 bp, Oryza sativa
  Clone ID: PAT_MRT4530_29041C.1
tggcaaggcctgagggctccattgcagaggcatatgtcgcaaatgagatttacatgaaggatttacaaactgctggcagtcatgatgttgaggggaaccttgctaaggaatttccaggatggtttaggaaacat

SEQ ID NO: 24020 - DNA, 255 bp, Oryza sativa
  Clone ID: PAT_MRT4530_29042C.1
ttccgcctctttcttcttgggggggcgcgggggcttatttaaaggaaccggcggatataccattgtgctcctcgcggccgtgctgctccaagccctccttcccgcttctgcggcggagggtttggtgcggaacgcgcttaaaaaacgcccgaacgaagaaaacaggcgcgttgacgcgcgaattttcggcgaggaaagggccccccggctgggccttcgcagcgccaactccctttggcgcggccggggtgaggg

SEQ ID NO: 24021 - DNA, 305 bp, Oryza sativa
  unsure (1)..(305): unsure at all n locations
  Clone ID: PAT_MRT4530_29043C.1
cggacgcgtgggcggacgcgtgggcggngcgcgtgtaccgcctcgcgctcaagggcggcggcggcacggtggtggcggtgaagcggctgtggaagggcgacgcggcgagggtaatggccgcggagatggccatcctcggcaagatccggcaccggaacatccttaagctccacgcctgcctctcccgcggcgagctcaacttcatcgtctacgagtacatgccgcgcggcaacctgtaccaggcgcttcggcgagaggccaagggtcggtgatgcggtgccgtctccgcctagcttgactgggct

SEQ ID NO: 24022 - DNA, 2483 bp, Oryza sativa
  Clone ID: PAT_MRT4530_29044C.1
aggaattaaggaatgagataaaagggccgcaatatccttcactaatgcatggaaaacttggagggagtaggattgttggtggttgtgaggcatttcaagaagcttttacaaataatagaaacatgtttgaagtacaagaatttcagaggaacggagactcgtatgaagaaacatttagatatatttttgaaggggatgagcaggaagaacaggcatttcagaatgatggaaacttgttcaaagaacagtcagttcaaaataatggaaactcaatggaagtacagatttgtgagaataatggaaattcatgtgaagaacagatatttcagaataacagaaattactttcaaggagaggcatctcagaatgatggaaattcgatcaaagaacagtcaggttatggaaactcatgtgaagaaaagacatttcagagtaacagaaattactttcaaggacaggcatttcagaatgatggaaactcgttcaaagaacagtcggttcaaaataatggaaactcaatcgaagaacagatatgtgagaataatggaaactcatgcgaagtacagatatttcagaataacaaagattactttcaaggacaggcatctcagaatactgaaaagtcattcatagaacaggcatttcagaataatggaaattcatttgaacaaacatttcagtggttttctgaaacgaacaaacaggaagaacatgagtttgagaataatggaagcccgtttgaagaatatgtatttccaaatatgagtagctggtttcaaaaacatgtatccctgaactgtgaaaacttgtatgaagaaaaatcatttcagaatagtgaaaacccgtttgaagaattggtacttctgaataaaaaagacctattggaagaactggaatctcagaataataataacttgtctgaagaaaagacgcttcaaaatatcaaacacagcatgtctcgggacgacccaaatgtaaaagctatcttatccaggagtggaggacttccccaacgacgcatcgactgcctgcccttcctcccgactcccgagtcgcgacgccgacgcccggagcgagccgctgcccacgaagacaggactgcacgaagacgaagccgctgcccactaagacgcatcagctgcgcgtgcgacgatcgtggctgcctgcctgcctcgccggcgttcgacttcgacgatcgacgttcatctgatcatctcgccgatctcgtcctcgtcagcgtcaaagactcaaagagccgctgcctgctgctcgaccaactagactgggacaggaacaagactctgttcgacagcctggacttgttgaggctacggtctttaacggtgtttggtccatgggagtcattcttcatctccaacaagatgggagtgcttcgtgtgctcgacctggaggatgcatgcgatgtaactgatgttgatgtcgagaatattgggaaggtgctacatcgcctcaagttcctatccctaagaggacacaaaatcacttatctgccggattccttcggtgggctgaggcacctccagactcttgatatcagatgcacctccattatcaatcttccaacaagcatcaccaagctaaagaagctgcatgatgcaactgcggtgtcccgtttattcgagttgcgggagacgtggacaagccggcaccgcggccagcagcctgctgttgctggcacctgcaatggtggaattgtggtgcccagagggattcgaaaaatgacgaccttacacactctgggtgtcatcgacgtcagtgttgcaaagaagggccgagctattctggaagagctcaagaaccttacccaattgcgcaagcttggagtatctggcatcagccggagaaactgtcgggagttttgttctgccatctctgagaacctaaagagccttaagctgtacgggtatgcagacgacaagctgccagagtggatcacgctgctgcggaagctcagtaaattgaatctacagatggccatgttgccgtcaggcgacctcgggcgacttgaggcagcgacctcgggcggcgacgccaccgccatctcctcctcaccgccgccgccaacgacgacgaggaggcgatgggccagatccggccgcgccggtcctcgtctcgcccggatccggaggcagcgggcctcgtcctgcccggatccgacggcgaccttgggcgaagagtgccgcggcgacctcgggaggcgggagcggctggcagtggaagcggcagagggcggcggcggcagcgaggcgagcagcggcgggagcggggtgggcggcggcagcgagagcggggacgggcggcgggggcgggaacgggggtgggcggcggcggcgggagtgggggcgagcggtggagccgggagtggggacgggcggcggtgggagcgggaacaggtggcggcaggagcagccagcgagctcggcaagaatcctagagctgaagccattacagacacggcctaa

SEQ ID NO: 24023 - DNA, 519 bp, Oryza sativa
  Clone ID: PAT_MRT4530_29045C.1
ctcccctccccgccccctcgcactccggcaccatgctgctgcgatcgccggcgaggtcgagcccccacctccgctcgctcctgcgggcgcgaggcttcatctcctccgcctcgccctcggccgccaccgcggcggaaggggacgacgggaagatcgtggcgtccgtgctgttcgagcgcctccccgtcgtcatccccaagatccaccccgtcgtctacgccttccaagaattctcgtttcggtggaggcagcagtacagacggaagtaccccgacgacgtgctgggaaaggccgacgcgaggggcaagggagattatcagatagattatgtgcctgctccaagaatcacagacgctgacaaaacaaacgacaggaagtcactacaacgagctcttgataatagactctatctccttctgtatggcaaggcttatggggctcctgatgacaagcctgtttggcattttccagaaaaagttatggacaatgaagacactttgcgattgtgtgctgaatcag

SEQ ID NO: 24024 - DNA, 704 bp, Oryza sativa
  Clone ID: PAT_MRT4530_29046C.1
gcacgagggagtccaacgatccagggcttctccgatcggcagcgagacgcgccctcaccctcgtggctcgccgccgccgcgccccatgagacgacgcccgcttcacatcccagcttgaatggaagcaacaacttgttaatgagttggaatctacgtctcacaagcagaaacatatttcaagtagaggagaacttgtcaaggaaacgataatcgggtctcaagaaaagatgattcggctattgaatgagcacatccagaatcttcagcaacaattgctgcaatgccgtgtcaataataggacggccaattcttctggatcttctttgacatcatatattggtgagatccaaaggcagcagatgatggatgattgataaggcgagaagccgacgaaccatgtataacaatccagtgggatgtgcgattccagatcgtaccggtagtcatttctcctagaaatgatgtagtgttagtctgtatagaatagtgatatagtcaaagcaaaggacaaggctttgtcgattaaaacaccattggtttaacaggattaaattcattttctttactcataagtagacctttgtatgtctattcagttattttttttagaacacatgtctattcagttataattcacatatgtgtttacaatgtaagcaccatgtcgctttgttcataaaacccgtcctctctattgttttatt

SEQ ID NO: 24025 - DNA, 1655 bp, Oryza sativa
  Clone ID: PAT_MRT4530_29047C.1
ccggccgaacgcgacccggccaccaccacacctctcctccagctcgcggtctcctcctcctcggctcctcccaaaaaagagctctagaataaaagagaaggggaaaccccccccccaaatcccacgccgctcggctcaccgagtgctgcatcggatcggatcgggacggcggtggcggacgcgagatgtgggagtcggtggcgctcacgctggccggcgccgccggaaacaacgtcggcaaggtcctccagaagaagggcacccacatcctccctcccctctccttcaagctcaaggtgattagggcgtacgcgttgaacaggctctggatcagcggattcctcatggacatgtgcggcgccgcgctcatgctcaccgcgctctcgcaggcgccggtctccgtcgtgcagccgatcgccggctgtggcctcgccatactctgcgtgttctcccatttctacctcaaggagtccatgaacgggctcgactgggtcgccatcacattggccggtctaggcacgataggagttggtgttggaggcgaggagcagaaagtggacaaaattccactgttcaatataccttggctggtgctctccattgtcatcttgtttgtagatgtaaatcacatggcttctttcatcattataaaagaatctgtaaatcacaggaccaaattgttttgggaacactttccattaactcccaagttcttctcaacacttggcttcatatctacaaaaggcaaaggcgtgaacaagagttggatttcatcagtgatatctaagacaggattcgtgatgtctgaaatgggttttccaaagattgttgtaccggctgccatttcttgtagtgtgggctgcagtgctgtgggatttgtttatcagactcgaggtctgaagcatggaagggcaattgttgtgtccacttgtacatcagttgcatctattgtgtctggcgttgtagctggtatgattgcgcttgatgaacatcttcccacagctcccacgggccgcttttttctcttacttggatggttcttcattattacaggagtgatacttcttgttagttcaacccggataattgctcggctacccagatctatgcagaagtttttgaagagtaatgtggagcgtacccacagcatcaggaggcctagctcagcgcgaggaaaggaccccatcccaagcacaacaatccatgcatccacattgcatctgctaacatctccatcgaaagagaaggcctagaaaaagttcctgctggagcaagattgttttggcacctcaaatgtgccatgttgtttaattgactcctgatgtgaatgtaaagtctagagtagcatctttaaagtttgggttggtgatatcgtatactgcttgtctgctcttattgatctatacagcctctttggaaaacttaaccttgcattttgaccaggtttcatcttttcattcggttaattggccactgctaaatcggtttgttctgttgcatgaaagtttttttttttcttttgtttgaggtactgactactgttatgccttttctcgagcttgtgtaagtaaaggcatttaacagctctttgttatgtttttacaccagaatgacatctacataagcagtgttatgtttttaaaaaaaaaaaaaaa

SEQ ID NO: 24026 - DNA, 662 bp, Oryza sativa
  Clone ID: PAT_MRT4530_29048C.1
tgcgccctcatttcatccatggcaatgcagctgtccttgcctgtcttgccaacgggttttcgtttccatccaaccgatgaggaactagtcatcaactacctccagaggcgtgctaccgggctatcgtgccccatccccataatcgcagatgtcgaaatatacaacttcaacccgtgggagcttccatccatggctctatttggggaacatgagtggtacttttttacactacgcgaccacaggtaccccaatagtgtgcgccctagtcgctcagcggcgtcaggcttttggaaggccaccggcactgacaagcccgtccaagttgctaacatgcaaagcactcctgtagctatgaagaaggcacttgtattctatgttggccgcccgcccatggaaaccaagactacatggatcatgcatgagtaccgtctcacaaacacgggagggtccactgcctcccacccatccttgtcttcatccaccgcacacccttctgtgaagctagacgagtgggtgctatgcaagatcttcaacaagtccccagagccggacaacaccgcaccaccatcaaacgtcgtctcacggttacagtgctcgccgccgctgccgccgccggcggcaccgcccgggcacttcaatctaatataaaaaaaaacaaaaaa

SEQ ID NO: 24027 - DNA, 234 bp, Oryza sativa
  unsure (1)..(234): unsure at all n locations
  Clone ID: PAT_MRT4530_29049C.1
cgcaaacgcgagccggcggcgaanggcggctgtggtgcatccagatcgcggcatcggcgcccccgcgnccaccgcccgcgccaccgctcgccacctggtccgncgtcctatcctcgnccccaccatctcgcgccgccctcgctcttcgccgtttcgncgctggncgncgtcaccattttgcacctccggcggcctgctcggtccccgttatctnacgacgccgtcccgacacgt

SEQ ID NO: 24028 - DNA, 843 bp, Oryza sativa
  Clone ID: PAT_MRT4530_2904C.1
tttttttttttttttgtttttttagcagacttgatatagtttctttacgagaacccttcaattgagagttcagacaagctcagatggcaggaaaaatgcaattatcacatcaattatgctaatactgggagtctgggacgccccaaaaggaaaagaaacaagttttgcttttcctgggtcggaagccaccacaagctaataattcactaataatcttgtatggagtgccaaacttttacatccaaaaagttccaaataacatgaaaacctggaaatttcagagcacatgcatttcactttccttctgttctcccctcttttttctaccagaaacgctaattccaaacggagaagtggagggcaaaataaccagcaaaacaggtgtggcctatgcctttgcctgtacagcctgcatcttctgttgcaacttgaagatcgattccttcttgctgttctgcttttcctccaagtccttgagcgctcgatccatccgcttcagctcagcggagatgtactcgatgcgcttcttgacgttggccttcgcctccgcgagatcctgcttgaccagcaccggcccgatcagcttgtacacgttcgcctcgtcattcaccagctccagctccttgaggacgagctcgttctcgccgacctggatggtgtactgcttgcggacctggtggttcttggagatgtctttctggatcttgctgagggcgttggcctgggactcgaggtcgcgctgcatctcgcggacggccgccggggtggacgacgacgccgccgccgccgccattggtggtgctgcctctgctcccctccgccgccgccgccgccggattccgg

SEQ ID NO: 24029 - DNA, 437 bp, Oryza sativa
  Clone ID: PAT_MRT4530_29050C.1
catgcaaaggatcgacactagatacaccttgcatggatggatgtgctgcagaaaattgattgtgttggaattgaatgatttgcgcttgagcatggatacactaggcaatggccgtggctgactgctgtcgactggcagagggtggttgtgcagggttgcatggctcacccttgactagttggcagtgcaagagagccgatgttgttgtggtgatggatatttgcagaacgtgaaggcacataccacgtgcattgcatgatgatgaactttgtgtgaggcggaccccattgcggtgttgtaaatttgttggtgttatatgtgaaattttggggatatagcagtcttagtcataatgccaccagagctttatttgtagatatatttgatatatgtataatgccagtgggcggtcccatttaaaaaaaaaaaaaaaaaaa

SEQ ID NO: 24030 - DNA, 232 bp, Oryza sativa
  Clone ID: PAT_MRT4530_29051C.1
tgatgacaggagctcgtcacctaaggcaccatgcgagtgttctgtccgagagcactgaacgctgcgcgactccgctttccaatgtagacttccctgcttgtgtttgctactgttgagtatctatgaccgcgctgcctagatactactgtttctgtgtgaccaatataggtcttgctgaacaatatattgtgataatgagactctgtatctatgatgatcctaaaaaaaaaaa

SEQ ID NO: 24031 - DNA, 264 bp, Oryza sativa
  Clone ID: PAT_MRT4530_29052C.1
atgggggcgtcaaatttgaagtggttaagagatatgaacgacggtggcgtatcaacaatgcgagctacaagagacagggacgacaggcaatccgattgtacctcaccatcattcaggcgtaggaagaattatgggaagaaccagggagcacttgaagagaggctagaagatggacaatgtcatcatgggcattcaagtcaagatggcggcctaattcatatcaagttcaagtccacctcggactccaggagcggtccacactaa

SEQ ID NO: 24032 - DNA, 711 bp, Oryza sativa
  Clone ID: PAT_MRT4530_29053C.1
atggaaagcgggaaagggttatcgttgccgagcttgtcaccgacaagcagctccgacttcccccaacacacctacccaaagaaacgccaggaagccaactgcacagttgcgttgcagaggtctcatgcaccaactccaccgaaccaggcaccttgccgacgcaagaaaaacaaagcgctgacagtgttgaggctctcgaactccaagcaaatctaccaaccaaagctagctccccgcccctcgccatggaactccccacgaccagaatctgaaagcagaccggtcaacaggaggggaggagccccagacaaacttggaggaacacttgctggcgatcaagccaccgacaacactattgttcaccgtgtcctgtggctttccaaacgaacgaaccacgtcagcgaccaaccgaccaacccaacgacgacctctccaagcggcaataccaccggccatcaaccatcaccactaaaaccccgccggccagcagcttctccggccacctcgacaaccaactccgcctcgacagcaccttcgctggccacaaccgccttcgccagccatcgccttgctcgccttcaccggccagctgcacctcaattcgccacccaaatacctttgctggccacagccacatccgttggctaccgtcttactcgccgaccgcctccgccggcctcgtgcgcatccaactccattctcccccactga

SEQ ID NO: 24033 - DNA, 815 bp, Oryza sativa
  Clone ID: PAT_MRT4530_29054C.1
atggtgggctgcagcaggataggcgcggaggcgccatcgtcgtcaccagccgcggcgcacgaccacgaccgcgaccgcggtgggcggcgtaaccgcgctagctccgccgtgccgcctcacctcgccctccctcccaccccgccgtacgtcccgagcgcccacctccaacgcagctcctcctacctccgcttcgccacggcgccaccggccggctgcgtcgtcgccatagcccatgctctcgcatacctcgagatccgccgcggggagtcagtcttctccctctgcctccgtgcctgcgcctttgcttcggagtccgccaagtttagattcgaggaggagaagggaagagaagagaagagaagagctctcccctccctctgcggcgtgtcggagcaggcgattggctccgttccaacagtccaagacgaggattattttacaaagggtgtgatcctgattttgtcttgaggtgtcctcaaccagttcttcacagccaccagcatcgtcagatagagaatctacaccagccagtgataatgcaacatctcctgattcagatggcacgaattctgctggacccgcaagaagcagaattgcactgcagttggatcagcggtcattgcatttttctgttactgcttgggttcttattgttgcattgattggaatccttccactgacaccacgacaactgcaatataagggatatcgtttgtcacttctcggcacaacctgcaccacaggctatgctttgtttgctttttatcgggttagtaacatgtcatctgttcagatctttccaccatgtagcttcg

SEQ ID NO: 24034 - DNA, 507 bp, Oryza sativa
  Clone ID: PAT_MRT4530_29055C.1
aacaagagcctcccggctcctgcgacacctcccacaccacagccgacgtcgaaaaaaaaccatacggtagacgcggggggggagaaagaaacaaaaagggggaggcctcccgggccactccaaaggccggggcggcggggctctagaaggtgcaggggggggggggcccaaaccagggacctcctccggggggcaccagggagcctttgcggggggcgaaatcttttttccccgggggggcccccgcgttacgacacaaacagggggcctccggggacccaggaaaagcacgcctacggggggcccttcggaagggccaccccccccgacagggccctccggggggggcagccgccgttgccagcgcaaagggcttccaccacctgcttccgcgccggcgggcgcttgccgccgccggccctccacgccggccgccgcccgctgccgccaggaagacaggggagagaggaagaggaggaggacaaggaggaagaggagaaggagtga

SEQ ID NO: 24035 - DNA, 441 bp, Oryza sativa
  Clone ID: PAT_MRT4530_29056C.1
ggaggagatggagttcgatcgcggcggcggtggtactgaggacggggatgtggccggcacaggaccccgcggtggcgccgaccaccacaccaccggtctcctccaacaagacgcctgcgcccgccgccgcgccaaccacccccgccaccccggcccccaccaccccgcgcccgccaccgcacgtaccaccaccgcaaccaccgccgcgacaaccacccccgccaacccggctccaaccatcgcggcgcctcctctcccccagtcaagggtctcgtcgccggcgcaattgtccaccgccggaggtcggacagcccgcctcgcttgcctgctccgccgcccacccgcccatccgctccgatgctccccgggagaagagtgagaggggagagggaagaagataagagtgaggatgaggaagaagagagagaagggagagggttg

SEQ ID NO: 24036 - DNA, 195 bp, Oryza sativa
  Clone ID: PAT_MRT4530_29057C.1
atgggggatgaggtggtgactttcgctagatgttgggtttttgaggccgccgagcggcgtgcggtcccgttcgtggtcttcacgccactcgccaagcccctgactgccgcgctgagcagcaagaggggtgatgggatctcagatgaacttattgcatgcatatatcatatgaccaccactttttacactttttag

SEQ ID NO: 24037 - DNA, 329 bp, Oryza sativa
  Clone ID: PAT_MRT4530_29058C.1
gggtaaaaaaaaacattatttaataaaatccgaatgggaacaaaactttttaaaaaaaggccactgggaaacaaatggaaccaaagcattggggaaaaaaaatgcccggttgggggggacccaaaccggggaaaaaggagtccagttcttcaggggaactaaaaaatttaacttggaaagaaaaaaacccccagcaaatttaaattatcacattggattaagggaagttggaaaactttgcaaaacgggccgaattttaaaacccaggggactcaaaaggcctttgaaactccttggccaacttccatccaagaaaaatggccaacgga

SEQ ID NO: 24038 - DNA, 394 bp, Oryza sativa
  unsure (1)..(394): unsure at all n locations
  Clone ID: PAT_MRT4530_29059C.1
cccacgcgngcgatagagcacanccnnncnggnnacaaaaanacngnccancacaagaggaggacggnacnccaagaagcngcagncgcgaaagaagggagccaagggaancaaganacgnanagcnggacganggncgcaaacccngccnggagagccncgaggcngcagnnaagganacgagcgagagccaaccncnnnancnngaaagacaggaaggnnacgaaggccnaaacangaaagnggaacaacaagggcccnggcnncnngnagaaagacaggcnnnaaangaagccanggaaggagagaagacnggncaccaccancnnccagaaacaagagggnnangcnnaccaaaagagcaaaccggcagcacgaaancgaggagaccaag

SEQ ID NO: 24039 - DNA, 584 bp, Oryza sativa
  Clone ID: PAT_MRT4530_2905C.1
cctcgtactggttcacgtgctactgaccaagactgtgaactaggcttcacaaggaacatctggcgacatcacatcgtataaattctctggagatttaaaacctggacatcggtcgtcatgattattcagctgcagggatccgtgattttggaggcgcagggcagaagattgctcgttccattggaagagatactcatactagtttgaattttgattcccattacagtcgaatcacaagctgtacggagttttattttgtaatgctccaataatgggagaacaatggggatgctaggtttcaattcctagtttttgctgtgttttttgtttttaccagcatataatttgggtgcttaatagggaggatagctacaaccagcagaaagtgactttttcctacgcccgtgctgcgtggagtgttgtcttgtaaattcatgctgtcatgtaggagtaggtcttcatggaggcctaaaaactcggccaaaaatggcccacatattgaatgttacgtcgtacaagtttgatcttgaattttgcatggcagatgagaagcgcgtgccctgttccctccctcgtgcaaaaaa

SEQ ID NO: 24040 - DNA, 3725 bp, Oryza sativa
  Clone ID: PAT_MRT4530_29060C.1
atgggcgcatttgggtctcagtcctctgatgggtacatctccattagcaaatataatgggtactctacgttacagtgtctttcaaatgtagatgggggctcagtggcacagaaatatggaggattcaagattttaagccagttcctttgccaaaagcagattacgacgacttgcagcaaaggtggtggcgcctatctttttgacatccacttttggattgggaaagattctagtcaagatgaagctgggactgcagcaattaagacagttgaacttgacaccatgctcggaggtcgtgcagtgcagcacagagaacttcaaggctatgaatctgataagttcctatcgtactttaaaccatgcattatacccttggagggaggtttcgcctctgggtttaaaacacctgaagaggataagtttgaaacaaggctatatatttgcaaagggaagagagctatcagagttaaagaggttccatttgctcgctcgtcattgaatcatgatgatgtatttatcttggatacggaaaagaaaatatatcaattcaatggtgcaaactccaatattcaagagagagcgaaagctttggaagcgattcaacatttaaaggagacataccacaatggagtgtgtgatgttgcgattgttgatgatggaaaattgcaagcagaatcagattctggtgaattctgggttctttttggaggttttgcaccaatagggaagaaagctatatgtgacgatgatgttgttcttgaaaccacagcccccaagctttacagcatcaataatggtcaattaaagttagaagacacagttctgacaaaatcaattcttgagaacaataagtgctttttggtcgactgtgggtctgatttatttatatgggttggtcgactaacacaagtggaggagagaaaagctgcaagtgcagcagttgaggaattcattgctactcaaaataggccaaagacaacaagagtaacccgagtgattcaagggtacgagaatcatacattcaagtctaaggatgatgttgttcttgaaaccacagcccccaagctttacagcatcaataatggtcaattaaagttagaagacacagttctgacaaaatcaattcttgagaacaataagtgctttttggtcgactgtgggtctgatttatctatatggcttggtcgactaacacaagtggaggagagaaaagctgcaagtgcagcagttgaggaattcattgctactcaaaataggccaaagaccacaagagtaacccgagtgattccagggtaccagaatcataccatcaagtataagtttgaatcatggccagtaaatagtgcgggcagtactcccgctgaggaaggccgggcgatcgttgcagctcagttgatttaaaaaggactggatatcaaggctgcctcagatcgcagcgctccagtagaagaagaagttcaactttttccccttttccatcgcaaggccattcttaagggtggaatcagctctggataccagaaatttgtagaagaaaagggcttgaaggatgaaacatattctggcgatggcattgctctttttcgaatttctggaacatcaattcacaacaataaagtgcttcaagttgatgcgagacatgacagagtagacctagggctgccactgggtatccaatgcccacacccatacccttacccacactatttgggaagggtgtcatcaaacttgagtcccacggattgttttgtcctgcaatctggaaattcaatgtttggtcattctaaaggggggaatcagctctggataccagaaatgtgtagaagaaaagggcttgaaggatgaaacatattctggcgatggcattgctctttttcgaatttctggaacatcaattcacaacaataaagtgcttcgagttgatgcggtgtcatcaaacttgagtcccacggattgttttgtcctgcaatctggaaattcaatgtttacatggattggcaatgccagttcgtatgaacagcaacaatgggctgcaaaagttgctgaattcttgaagcctggtgttgctgtcaaacattgcaaggagggaactgagagctctgccttttggtttgctcttggtggaaagcagaattacacaagcagaaatgccacacatgatgttgttagagagcctcacttgtatacattctcattgaggaatgggaaactggaggtcactgaaattttcaacttttcacaagatgatttgctgactgaagacatgatggttcttgatacacatggggaagtctttgtttggatgggtcagtgtgtggatgctaaagagaagcagaaggcatttgaaattggccagaaatatgcagaacatgcggcggccttcgaatctctttctcctgatgtgcctctgtacaaagtcgttgaagggaatgaaccatgcttcttcagaacttacttctcctgggataacacaagatctgtgattcatggaaattcatttcagaagaagctttcacttcttttcggaatgcgctcagagagtggatctaagagttcaggtgatggtggaccaactcagagggcatcagcattggctgctctttcatctgcattcaacccatcttcccaaaagaataagggtaatgataggcctaaaagctctgatggtggacccactcagcgcgcttcagcaatggctgccttaacatcagcgttcaatccatcagcaaaacccaaaagcccaccacaacgtgcaggtcaaggttctcagcgagcagctgctgttgctgcgctgtctaatgttttgactgctgagggttcatctcaaagcccacgcataggtaggtcttccccaatggcaggtgatgcagatacagctgaactaactccgtctgctgcatcccctctgtctgaaggagcatcagaattttccgctgataaagatgccccaggagatggggcattatctgagggagggcgaactgagcctgacgtatcagtggaacagactgctaatgaaaatggaggtgaaacaaccttcagctatgatcggctgatatcaaaatctaccaaccctgttcgtgggatagattacaaacgcagagagacatatttgtcggacagcgaattccagactgtatttggtataacgaaggaagagttctaccagcagccagggtggaaacaagaactacagaaaaggaagcatgatcttttctgaagcatgaatctctttcccactacaaaggctgcatgtttactagttttgcttgattggtgacatggtacgtgagaggccatgtttgccagcaatcttggtcatgtttcgaagacgattggccggtggcttactctgccgttatcccaagttttacagggtattctttatttgtacatggtctgctctatgcagcaccaagggcgtcactacattgttccgagctttgttctggttcttgtccatccatgtgtatattatttttaccctcaatttggcacaagcggttatttctagcgaggttttggaatgtattatgcacattgatgttcagacttccacttttttgtttctcttgtattgagattcctggtactgtcatactgtataaatcttcttattgttgagtggtgattatgcatggttctattcttattgcaaaaaaaaaaaaaaaaaactcgagactagttctctctctctctctctccctcgtgccgaattcctgcag

SEQ ID NO: 24041 - DNA, 2658 bp, Oryza sativa
  Clone ID: PAT_MRT4530_29061C.1
cccagcccaagggcacggacaggccagagagagagagagagacagagaggcagagcggaagggagcaatcatagcgccccgcttcctttattaggccgcgtcacccctctctccgcttttccgccggccacctcgatcgccgccccctcttccccttcccctcccgtcagcctccgatcggatcccgtcgtcgtcgtcctcctccccttctccagtgtgcaagttcctattattctgtggtggagccatcttccactaccctgttttcaattaaacctttgtaaagttgctgctcaatgtcaagtgcaaaaccagtgcttgatcctgcatttcaaggagttggccaaaaacctggcacagaaatatggaggattcaagattttaagccagttcctttgccaaaagcagattacggtaaattttacaatggagattcatatatagttctccagacgacttgcagcaaaggtggtggcgcctatctttttgacatccacttttggattgggaaagattctagtcaagatgaagctgggactgcagcaattaagacagttgaacttgacaccatgctcggaggtcgtgcagtgcagcacagagaacttcaaggctatgaatctgataagttcctatcgtactttaaaccatgcattatacccttggagggaggtttcgcctctgggtttaaaacacctgaagaggatccgtttcgtccgaggctatatatttgcaaagggaagagagctatcagagttaaagaggttccatttgctcgctcgtcattgaatcatgatgatgtatttatcttggatacggaaaagaaaatatatcaattcaatggtgcaaactccaatattcaagagagagcgaaagctttggaagcgattcaacatttaaaggagacataccacaatggagtgtgtgatgttgcgattgttgatgatggaaaattgcaagcagaatcagattctggtgaattctgggttctttttggaggttttgcaccaatagggaagaaagctatatgtgacgatgatgttgttcttgaaaccacagcccccaagctttacagcatcaataatggtcaattaaagttagaagacacagttctgacaaaatcaattcttgagaacaataagtgctttttggtcgactgtgggtctgatttatttatatgggttggtcgactaacacaagtggaggagagaaaagctgcaagtgcagcagttgaggaattcattgctactcaaaataggccaaagacaacaagagtaacccgagtgattcaagggtacgagaatcatacattcaagtctaagtttgaatcatggccagtaaatggtgcaggaagtgctggcgcggaggaaggccgagggaaagttgcagctctgttgaagcaacaaggagttgatatcaagggagcctcaaaaagcagcgctccagtagacgaggaagttcctcctttgctagaaggcgatggaaaacttgaggtttattgtgtcaatggcagtgctaagactgctcttccaaaggaggagcttggaaagttttacagcggagattgctatattgttctctatacatatcattctggtgacaagagagaagaattttatttgacttattggattggcaaggaccgcataccggaagatcaagagatggctttccaaacagctaattcaaattcggaattcactgaagggaaggcctattcttgggtcgtatttatcgaggggaaagaaccaccacaatttattgcccttttccagcccatggtcattccaaagggtggaatcagctctggataccagaaatttgtagaggaaaagggcttggaggatgaaacatattctggcgatggcattgctctttttcgaatttctggaacatcaattcacagcaataaagtgcttcaagttggtgcggtgtcatcaaacttgggtcccacggattgttttgtcctgcaatctggaaattcaatgcttacatggattggcaatgccagttcgtatgaacagcaacaatgggctgcaaaagttgctgaattcttgaagcctggtgttgctgtcaaacagagctttgaggcagatgccagctctgccttttggtttgctctggtggaaagcagaattacacaagcagaaatgccacacatgatgttgttagagagcctcacttgtatacattctcattgaggaatgggaaactggaggtcactgaaattttcaacttttcacaagatgatttgctgactgaagacatgatggttcttgatacacatggggaagtctttgtttggatgggtcagtgtgtggatgctaaagagaagcagaaggcatttgaaattggccagaaatatgcagaacatgcggcggccttcgaatctctttctcctgatgtgcctctgtacaaagtcgttgaagggaatgaaccatgcttcttcagaacttacttctcctgggataacacaagatctgtgattcatggaaattcatttcagaagaagctttcacttcttttcggaatgcgctcagagagtggatctaagagttcaggtgatggtggaccaactcagagggcatcagcattggctgctctttcatctgcattcaacccatctttccaaaagaataaggtaatgataggcctaaaagc

SEQ ID NO: 24042 - DNA, 486 bp, Oryza sativa
  Clone ID: PAT_MRT4530_29062C.1
gcttcgtcacatccaacccaaataacacgctattctcaaaggtccttaagaaaggtgatgtctttgtattccccgtggggctcatccacttccaatttaaccctaacccccaccagcccgcggttgcaattgctgctcttagcagccaaaaccctggtgccatcaccattgcaaatgcggttttcgggtcaaagccaccaatctcagatgaagttttggcaaaggcatttcaggttgagaagggcaccatagactggctccaggctcagttctgggagaacaatcactactaaatataaactgagtatgtttgttggcataccgtgaatcagttatgtgctataacatataaaataaatttgtatttctagacaacttaattatgtgtgcttgcaaacaacccaacaacacagttttttgttgggaaatggctatgtatgttcttctcatgtgatattccctctaataaagtaaagcattggtatt

SEQ ID NO: 24043 - DNA, 243 bp, Oryza sativa
  Clone ID: PAT_MRT4530_29063C.1
ggcacgagcggcacccttgctgctcttggttgcttctcttgctggattttgggctttgaaaaaagcaaacgggttcagttcggttcttttagtgcgggccctatataaccagcacatccgacggccaagaattcagctgataacacaaaaataaacagccggctgacggatagcaaatcccaaaatgatactccctcggtttcaagtcataatacggtctgactttaactaaagttaaactgt

SEQ ID NO: 24044 - DNA, 395 bp, Oryza sativa
  Clone ID: PAT_MRT4530_29064C.1
acaggggcacgcaaataacgcccccccggggggggacaaatcgtttggttcccccccacccggggacccgtgggacccccctgggggggccccgcttgggggggagcggaatacccccggggggcccggggcccccccccggggaggggcccaacctgaaccccctgagtttcggggggacaacggcctttgccttgaccatggggaagttttgcccgacgcacgcccttggccccggggggaaggacagcaccttggccatggggccccccccgccgttaaaccttatgggggggaaccccccggggggggggccccacacccccttgtcggggggcattgtcccgaacgggaaccttagaattgggcctcccgggaccgttacgccgcccatt

SEQ ID NO: 24045 - DNA, 147 bp, Oryza sativa
  Clone ID: PAT_MRT4530_29065C.1
atggagactcatgaactcacccatggaatggccgaatacatgagctttcttccaccccagatggtccatcaaggccagagcgtccctcgccatgatcaccgtcctgtcaagacaatggaaacattcacatggtcagacagtaactaa

SEQ ID NO: 24046 - DNA, 374 bp, Oryza sativa
  Clone ID: PAT_MRT4530_29066C.1
aaatacaaagaaatacataatctagtatgcatgtattcatcgtctgtacacttaatcatcctttcctgccatattgggatttacacttgtatttttctactttttagccactcaattaatcttgcctttcaagtttcaacaaagaaaataaaccagtcaactgtggaatgcagcatgcatggttagagctatgaaatttgtggagcagatgtctgtgttgtacacatcttgcttcttagctcttcaaacgccttcatgctttcctcgtcaaagcctccggcaaactgatgaactcggaaagcaaatctcacaccctgaagaagcaagaactctctgttgggctctttctcggtgccttgcaaggcatctagctc

SEQ ID NO: 24047 - DNA, 691 bp, Oryza sativa
  Clone ID: PAT_MRT4530_29067C.1
ggcaacacttcaaatctctgtttttttttttaacgatcaaatgcactgcagtttgttcacaaggcaggattctgcaagacaggcataacagggaaaaactagattccttcctaatttcctatccttctggaagcacgaaacacaaaatgggcttggaaggaccattggtcgcagagttctaagggcaatccatatgcattggcgatgatgacaacagcctatctttctgcaaaagatgggaggggaaggacgatttacagcttgcaatgggggatttgagctttgggatatttggaggggcactcctgcatctggggcaacgaagctccattgcgagcaccctgtcgtcactgctgatagttgctgatccacgctgatcgatttcttcaatgacatcaacagaatcaaggaaaaatgttggggtgaaggagttccagggtttcttgttcttcaaactggcagagttgaagtcctggcttatgatgtgcaggtgcaattgcctcatggatggaaccgaatggtatccgagtctgaataccaaagatgaatcttcctctaggaacttctgtgcccatttcactccagcagaatgcattctcctcagcaaaggtaagtgttctttcttgacatctgctagagaatcaagaccatccttcctagatacaaccaaaacatgcctttgcctcgtgcc

SEQ ID NO: 24048 - DNA, 401 bp, Oryza sativa
  Clone ID: PAT_MRT4530_29068C.1
aactcaaaccaaattcatttgcgtgcggacccaaacaagaacatgtacgcattcacaaaaaacacctacatactacatctataccttacaaagacaaccaacaaatgccttatgtccactcactaaatacgcaccctctcacaataatcaaccattcacactcaattcgctcgcacttaaactccacccatatccatcactgtactccatgacgcacacacccgtttttgccaagctcaaggctatatgcctctctgcatgattatgtcgacgatgttcctgtcccacggctcccaaaggaggctgtccaccttctccagtcggccagtccccgggtactcctactgttggacgcataaacccacaaaagccatcatgcccaatctccctttcttaatctc

SEQ ID NO: 24049 - DNA, 862 bp, Oryza sativa
  Clone ID: PAT_MRT4530_29069C.1
caaccccccccccccccccccctcgtcgtcttcctctgctgctgccaattgcgaaggcttttcccccgaaatccagcagcggcggcggcggcggcggcggagatcgacgaatccagcggcggcgcaccccgaagggaaccggagatgcagcagggggacggcacggaggcgcaggtgacgtgggaggaccagcagaacatcaaccgctttggccgcctcaacaaccgcctccacgagctccacgacgaaatcaagctcgccaaggaagcaaatgagaaccttgatgatgctgggaatgaactcatcctgtcagacgaagacgtggtgcggttccaaattggagaagtgtttgcccacatgccaagggatgatgtggagacaaggctggagcagatgaaagaggatgcagctaagaagttggagaggctggagcaggagaaggaatccatcgtctcccagatggctgaactgaagaagatactgtacggaaagttcaaggacgccatcaacctggaagaagattaatatcgagtaagctgccggatattgaatgatatgatgctctcttagttgagactagaggagctgtgtttgctagactaaactgtttctagtgatttaagaagacacgtttctcgtgatgcatcaacatggttaattcttatgctggattagattagcatggttttgcccagcagatacgtgaatcatgagttgcatggtttcaatttataaaaatgcagtatgggggaatttggacgaattggttatgttattactacatataagccaagttttcagttgcatcaaaaaaaaaaaaaaaaaaaaagaaaaaaaaaaaaaaaaaaaaaaaaaaaaaaaa

SEQ ID NO: 24050 - DNA, 453 bp, Oryza sativa
  Clone ID: PAT_MRT4530_2906C.1
ttttttttttttttttttttttttttttttttttttttttttttttttttttttttttttttttttttttttttttttaaaacttaaaacccttcttttatggggggatcgctaaaaaaagggtaagggttatttttggaaaccttcaacaccattgttaaaaccccccaaaaaaaattatcagtctatcccacttgaattccccctaccgggttctgggaaaaaatactggccctggtttgttggggggggggggcaactgtcaaaaccaaatccttttttgggggaggatccgccttttttggcttttttttcggcctcgcgaataatgcattaaaacctgcccccaggttagcttgaaattccaaatcaacttttcttgcagttgcaggagtcaataaaaatcccccttcaacgatttttggaattggtttaaacaacatgggcccccct

SEQ ID NO: 24051 - DNA, 1877 bp, Oryza sativa
  Clone ID: PAT_MRT4530_29070C.1
atgactgaaatgttactgaattggaacaaggacctcacagaacaagttgacaaaaatcgaagcacgccacttcacttcgctgcatcactttgtaaagacttcgctgcatcacttagtgaatatactgtaataacgtggatgtcacgcactccgctcattccagtactgctagccaacccagttcagttgtaccagcaagattctgaaggattgtatccgatacacgttgctgcatcctcaggtgccattcggactatcaaatatttaattgaggagcaacctgatgagatcgctggtcttgtagattttaaggggaggactttccttcatgtcgctgttgaaaggggcagaaggaatatagttgagtatgctcaccgtactcgatcattggctaggattttcaatatgcaagacaatgatggcaacaccgcaatgcatatagcagtgcggaatggaaataagtacattttttgtattttactaaggaacaggaaaaacccagaaaaattgatattgctggcattaacacattgcaatgcaagtggtggttgccgtcgggcagatcactttcagaaaaaacaggcagacgaagcgaaggaatcagagaaactgacaacttcaacacaaactctaggcatcggatcagtactaattgttactgtcacatttggcgcaattttagccatacctggaggatataaagccgacgaccattacaatggcggtacaccaacacttgctggaagttcggtgataagtttgggtgctgcttttatgctaggtatgtatttggtactggctccagtggctcgatggactgcaattgcaatctgtgtaatgatgatgattgcatctctatgcttattcacggagccattgcatgcaccccgtgttgcaatagcgatgtatgttaggaagggaaatcaggatatccaaagaacatatattattaactgtgggacaccaaataacatgcatggtaactatcgacaggtgatacttgtagaccgtatcctgagggcactagggcccctcaccaactcatccggccttcctcttttccctcaggcggtgacaacgacagccacggtgacgacgcgtagatccatcgctggccgtgatgacgatggcggcgacagtgcttggatctgctgccgaccgtaaagacgacaaaatctggatccaccaccaactagcctcgagcgcgcagatcgaccgctggccgggacaacaatgacggccgcgacgacgatggcgacgacgcctggatccactgtcggccgccaccgcgtctcctccgcgagctgccgccacctagccccggtgagcccgctgccccccgccgaccccgccatcgcctcccctcctgccgccgccgccgccgcccctctcaccggatctggcggaggggagggcgtggtcgccactgccgcctccgctccaaacccgtcgttgttgtcgcacctcccaaaccatcgccatgaaggctcgaagcggctagatccagtggcccagctggtgcccgccgatgcaccaacaagatgtagatcttgtaggtctggactctctttttgacaccttgaagatctaaatctcttgtaggtctcgacactcttcgtgagaccttgaatatgtagatcgccctcgggggataggcccggaggagcccatagcgccccgagcactcctagggtagttcttgtggtctcgacactgttcttaagaccttgaagatgcagatattgtatggcttggtggggcctgtagtgccctaagcacccaagggggagggaaacccctgttcccatttctccaacaactatcaagaactgtaggcgcacgaaactgctggtagtaccaaggggtgttcctgccat

SEQ ID NO: 24052 - DNA, 1482 bp, Oryza sativa
  Clone ID: PAT_MRT4530_29071C.1
atggataccttcccgttccagtggcccatggatccagccgcgtcatccggcctcgacgctgggtttctgccgcctccagcggctgtggcgcccgacgacggcgtggggtactacgacccgcctgcgggggcggatgtggacgccgctgctctgccggagttcgccgcggccttcccgccgtgcgcgcctgatgctgccgctgctgtgttggccatgcggcgggaggaggaggaggtcgcgggcatccgcttggttcatcttctgatgagctgcgcgggcgccatcgaggctggtgaccacgcgctcgcgtccgcgcagctcgccgactcgcacgccgcgcttgcggccgtctcggccgcctccggcatcggccgcgttgccgtccacttcaccaccgcgctctcccggagattgttcccttcgcccgtcgctccgcctaccaccgacgccgagcacgccttcctctaccatcacttctacgaggcgtgtccctacctcaagttcgcgcacttcacggcgaaccaggccatcctcgaggccttccatgggtgcgaccacgtccatgtcatcgacttcagcctcatgcagggcctgcagtggccggccttgatccaagccctcgccctccgaccaggcggcccgccgttcctccggatcaccggcattggcccgccctcacctaccggccgcgacgagctgcgcgatgtcggcctccgactcgccgacctcgcgcgctccgtccgcgtccgcttctccttccgcggggtcgctgcgaacagcctcgacgaggtccgcccgtggatgctccagatcgcgcccggggaggccgtcgcgttcaactccgtgctgcagctccaccgcctcctcggcgacccggccgatcaggcgcccatcgacgccgttctcgactgtgtcgcctccgtccggcccaagatcttcacggtcatcgagcaagaggccgaccacaacaagacgggcttcctcgacaggttcacggaggcgctgttctactactccgcggtgttcgactcgctggacgcggcgagcgccagcggcggcgcgggcaacgcgatggcggaggcgtacctccagagggagatctgcgacatcgtgtgcggggagggcgccgcccggagggaacggcacgagccgctgtctcggtggcgggacaggctcacgcgcgccggcctgagcgccgtgccgctcggttcgaacgcgctgcggcaggcgaggatgctggtcgggctgttctccggcgaggggcacagcgtcgaggaggccgacgggtgcctcaccctcggctggcacgggcggccgctgttctcggcgtccgcctgggaagccgccggggacggcggcggcgacaataacaacaacagtaacagcaacgttagcggtagcagcggcagtgacagtaacaacagcggcagcagcaatggtaaaagcagtggggctcgggatggtagcagcgtgtgtttgtaa

SEQ ID NO: 24053 - DNA, 184 bp, Oryza sativa
  Clone ID: PAT_MRT4530_29072C.1
aaaactgccacccatgatgatgcatgactttttttttaacattggaccctttttccttttacaattcagtcccagacaccaccaacggggggaatgctcctcggagcaatgtagtatttaggataaataccacatttggatggcaagtttaaggccaacaaagcttgagcttgagcttgagttt

SEQ ID NO: 24054 - DNA, 555 bp, Oryza sativa
  Clone ID: PAT_MRT4530_29073C.1
ttttttttttttttttttttttttttgacaaaaattttttccaaatatgttcatgaaatgtaacttgagttaacatttacatcctgcaaggacatactacagtccaagatatgaggaaaacaatactttgatacaatattgttgaaaaatctaaaccatatacaaatgatcatacctctattcgtttatctgtactgacataggggcgatttggaaagacaaatagtgccattgggccactctaccctgttttgtttcaagtacactaatgcatatattctctagccctgacaaaagcaaacataatactgaaattagtacataacttatcaactttgaaataagctttaaatatcttgcaagaaagttcatcacaaagtctgaaacaataatatagcttgaaaggcaaagcgattaaataaaaatagaattgtttcagccatttgcacaaatatgcaaccaatatgggataacatatgataatcagtgaaatagttcccccaaactagcaatatattatctcagcgggatgtgggatgggatgccaactttgaa

SEQ ID NO: 24055 - DNA, 495 bp, Oryza sativa
  Clone ID: PAT_MRT4530_29074C.1
atgccttggcgtttggctatggctaggcagcaggctgagccccccacgggcgcggcggcgctgcagaggtcgaactcggacggcggcggcgggatggcggcgggggcggatcaggaggctcggagcgtgcggtgcgagtgctgcgggatggcggaggagtgcacgccgaggtacatcgggcgggtgcgggagcgcttccacgggaagtgggtgtgcgggctgtgctcggaggccgtcaaggagcggcagaagcgggagccggcgctcaccgtggacggcgccgtcgacgcgcacgccgcgctctgcgagcgcttcaactccaccgtccgcctcaaccccaagctctccctcgcaagctccatgcgcgacatcgcccgcaagagctgccagcaccgcgccacggccaccggcgccgacgtcatcccctccgcctgctccggcgccggcgccgccaccatggcccgctccaccagctgcgccctcccctacgtctaa

SEQ ID NO: 24056 - DNA, 2312 bp, Oryza sativa
  Clone ID: PAT_MRT4530_29075C.1
gcttaatttaacccactcccactcctcgtcgccgtgggctccaccgaggcggcggcggttgctgtgttgcgccggcgagcgggcggtcgacttggaggtgctgagcctctgggtaccaaggatgaaatttgtgcttgtatttggatgacataagcgcgccacgcacttgctaggaaggaatgaaaatcagcggacttctgacctctgctggcatcaatatcgctctttctgtgctgtttatatcgctctattctgttctgaggaagcagccagccaatgtcagggtctactttgggaggaggattgccgaggagcataatcggctccgagaagcttttatcttggagagatttgtaccatctactggctggatagtaaaagccctgcagtgtaccgaggaagagatcttggctgctgctgggctagatgctgttgttttcaatagaattctagtattcagcttacgcatcttctctctagctgccattctgtgtgtgtttggaattctaccactgaactactttgggcaagatatacatcatgttcggattccttcagaatcattggatatctttacaattgggaatgtgaaagagtacaagcacattgctaggctgaggctccgtcatcttacttgtgcaatgcccaatccaagccattttactgtccttgttcgtggaataccaaaggaaaccaaagaatcatgcagtaatgctattgatgatttcttcaccaagtaccatggatcaagctacctgttccatcaagttgtttacaaagttggaaaagttcagaagataatgctgttggcaactgggcttgagcagaatcaggggaaatctgaccttcaagattccagcttgaaactagatgatcaggttgaacttgtaatctcacaaatattagctcttttactggaatgtgcagctgcttttgtatatttcagaactcggtatgctgctcttgttgcctcagaaatactccaaacatctaaccctatgaaatgggttactgatctagctccagaaccagatgatgtgtattggtcaaatctttggctaccttataagcagctttggattcgccgaatagctacgctccttggttcaattgtttttatgttattctttctgataccagtgacatttatacaaggactatctcagctagagcagttgcagcagaggcttcctttcctgaaggggatactggagaagaaatacatgagccagcttgtaactgggtaccttcccagtgtcatactgcaaatatttttatatgccgttgcaccgataatgatattattttctacattagaggggcctatatctcacagtgaaaggaagaggagtgcttgctgtaaagtgctgtacttcactgtttggaacatattctttggaaatgtactatctggtactgtcataagccaattgaatgtgttatcaagcccaaaggacatccctgtccagcttgctagagctatacctgtccaggctaccttctttatcacctatgttctgacatcaggatgggccagtttatcatctgaacttatgcaattatttggtttaatatggaactttgtgaggaaatatattctacgtatgccagaagacacagagtttgttccctcattcccatatcacacagaagtgccaaaagttttgctgttcggactactgggcttcacatgctctgtactggcacctttgatcttaccttttctgttagtgtacttcttccttggttacatcgtgtaccgcaatcagttgctcaatgtttaccgcacaagatatgacacagggggtttgtactggccaatcgcacacaacgcagtgatattctctctcgtgctcacacagattatctgccttggtgtatttggcctgaaagaatcaccagtagctgcaggcttcaccatacctcttatcatcctcactctgttattcaatcagtattgcagaaatcgacttctcccattattcagaactaccccagcacaggatttaattgacatggacagggaagacgaacggtcaggaagaatggatgaaattcaccaccggcttcattctgcctattgtcagttccacgacactgaagatatacccttggagaaaattcagactgtcgggagcgatgaggaacaagggtgtagctctgataagtcgaatggaaaagaaagcttcgaggaacccagagcggagttgtctcacccaacactgaatggactcccagttagccgtcttcggcatgctgtgaagtcgattactttccttgtcagattgcagaaaagaggtttgtcagaatag

SEQ ID NO: 24057 - DNA, 300 bp, Oryza sativa
  Clone ID: PAT_MRT4530_29076C.1
atggcggccttcgtgttcctcacagctagcggcgaatttgagatgggagagagcagcaggggtcctctcctcggtttggatggtgttggagtggagagtcagggtgggcgatgcgtctgggtggagaaacggatgggatcagcaacaccaccgcctgccacccttcgtcggctccggcagcttagggttgacaccgctcgatgcctcagccccgcgccggggagcggggccgcgtcgctgccagcgcgcgccgagggaagacggaccgcatcactacacgtgtgcgccgaggggagctag

SEQ ID NO: 24058 - DNA, 246 bp, Oryza sativa
  Clone ID: PAT_MRT4530_29077C.1
atgaccatcaccatggttgacaggaagacgacgagtttctggcactcgcattggctcgaaaacaaagatgcccaagacaattgcatcggctatctacgcagcctcaaggcaaaagaacagaacagtctgcaaggccctttcctccgacctggattcgtgacattcaactactacaaatcacaacggaaaaacggcgtgaaccgcttcctacgaaaccgcgatcttagtaccagtcccaggacatag

SEQ ID NO: 24059 - DNA, 264 bp, Oryza sativa
  unsure (1)..(264): unsure at all n locations
  Clone ID: PAT_MRT4530_29078C.1
ccgaanncgagctcggcacccganccacaagaggacacngncacaaanctccaaaaggaccgccaaggaanggnctatttcttctacgacaccttgcggtcctgccgagacaaggagtacattatgaagacaggacatgacaccctcatccacaaaaaagacttcccggtgaagcaacaaataggtgaccagtgcagattccatgtgtgccacaacatgcgccttctgtatagagaaaaggtgaagactttggctgagtttgag

SEQ ID NO: 24060 - DNA, 350 bp, Oryza sativa
  Clone ID: PAT_MRT4530_29079C.1
aagctggcacgcgtgcaggtgctggtacgctatagagcggtcgacctacgcgttcgtttatttttttcgagaaacggaagtccacgcctcatgggccaaatggatctcatgtctcgtgtaattaacacttgcacatgtgcaaaactgcaaatgaactgctaattcgtcagtttatctgcgtattaccatcactgaaatgctcccggagcaccgcaagtacatctccgaagctcacgattccggttagcgcgccgctgacctcgtcgacgacccagacgtacccgactctgcgcgcaagaacctgcgccatgactgccaccagtgagctatcagcatggtatgcggcgacg

SEQ ID NO: 24061 - DNA, 6126 bp, Oryza sativa
  Clone ID: PAT_MRT4530_2907C.1
atgggtttcgtttctggcatcgacgacttcgccttccctcccgggcaagcgtttcggttcggcagcctcaacttcatcaccaacgacttcagcaagatctctctccttgactcggattcaaaccagtcggggagagaccaggtccccatgcccttcggtattccgaactcggccgaggcctactccaagatcatctctcccgagtcggcttcaaaccactcgggcgagatccaatctactcttccgcgaccagatcaagacgacgggtcctatccctcaatcctaatgaaacttcctgataatttggccgctgtcttcactgccaagacatctcccactcgaagatctaggcgagctccggcttcggccccgatccaatctagatccagagaggttggcgttatactccaacctcttgggacagtctcgacggaagagttggatggttaccttagctcccccggcgtcagttctcgaccaaccgagatcctcgactacgacgatttcggctaccactacgaccacggtgacctcgacaacttcgacgacagctatgaggataactacacgcccctcttcttcggcgtattcatggctgacaacgaaatggaggaacagcgccaagcccgagaagcagaccaagatcgcgcacggcaagaagctgaacgtcgccgactggaggaagagcgacagcgacaggagcgagaacgactacagcgtgagcagcaagatcgcgaacggattgcaaaggaggctgaagatcgacggcaacgcgccttggaatctgggcgccgagcgagagaactcattgggcaacaagacgtcgatggaacagcggtctttcgcaccccccagcagaacgcggttgcagcaatcactctcctcaacaccctcctcaaggaagacgcactcaaccaagctgatcatgttgtcaacatcttgaaccaaacgaagaccatgatcgctgtctcggttccagccaactccgcaagcacccgcaccccgactggtagccgagtccctcacttccgatctcatgattatcatcagccaagcctcagcatcaccggcacaggatctagtcgcaggagcaggggtcacgacgaacgatctgttcactcgcctcccgaacgtcacagggagcgccgagttgaacggcctcgctctccacctcaccagtgtcccgtcgaccttcgcgacacagtcaaccagcgccgtgcaacacgaggtcaccgccattcaccaaatcgctacgacgacgacgtggatggagtagctgccttcattaatgacctgcgtcgagtgctgatgctggaagtgagggacttcctgttatggcaaaaaaaggttgcatttcaggccttcttgatctcagacaccttagcaatatgttcctcatttgctgttgcattcatatgcatcatagccaagtgggaggatctccagtttttgcttcattacaggtttattactaagaagctcatgtggttttcatacatggcaactatcagaacatttgcaactagtttgtgtcagggttacggaagcgagaacgccgtggctacaaccctggacgactccatgtcgaagaatccacccgtcgaagcggagaacggaacgtcgatgacatccgagcccgagaaggatcttagtgcggccaaaccttgtccttccgacaagaatcacgagcagacaaggacaacttccgagatgacaaggtcctggtgtcctatccacaaaaccaggaaacataccttgcaagcctgctgggtttttctcaacgtgcaagctgaaattcgtgcctgcaaggagcgtggaattcagcgtacttctccaactcatgaggtctattgtcctattcacaagacaaagaatcacgacctctcaagctgcaaggtctttctcagcgccatgaagacaccgcctcctaaggtccagcagtcgcgaatctctcttagggatacagacaaggaacaaggagcgacgctgatctcggatcgattcgttggggtaatcgacatcgatccccacgagccatcagtcctacactttctcaaagactatggctcatcatcaacgagtacaccgcgcgatgtatttgctatcgatgggaccagcacgtcagcacgcgctaatgtgaaagcggaaaatcaagtggttacaccagcccagcacatcggggttatcaacgcaatactgagggaaaccccttacgatcccgttctgaatgatgatctcgcacagtggacagaacggctacgggaatcagtgaccaacctcagcaatacgttcgaggaggccgctgctgcagcgcacccggaacagccgccagctggcgatagacatccacgaaggacgtacgatcgccgaaaacccaccgcccccatcgccgggtgtagagctttcaatcgttcgttgcccgatgtccgatggcctgagagattccgaccaggagcgatagagaagtacgatgggagtaccgacccagaagaattccttcaggtctactccacggtactctacgctgccggagcagatgacaacgcgttggcgaattatttgccaactacattgaaaggctctgtgcgttcttggctgatgcatctcccgccctactcgatttcttcgtgggcaaatctgtggcagcagttcgtcgctaacttccaaggaacttacaagtgccacgcgatcgaagacgacctacacgcattgacacagaccccgggtaaatccttgagggactatgttcggcgctttaatgagtgcagaaacacaatcccccaaatcaccgatgcttctgtaatccgcgctttcaagtccggtattttcgatcgatgcgctcacgcggatgacgcactgagacgcaagaaagacaagccgaagaccgggggagagaaggaaccagccaaggacgcacctgaatcaagcaagaagaaaaattgcaagagtgggaaaaggaaagctcaagcggaagttctcgcgacaaaatacgcggaccctcccaagcgcccagtcccacaaagcagcgacatgaagaaaatatggtgccctatacacaagtcgaacagacacactctggaggattgcctcgtcttcaaaaagtcgctcgcaaagcacatggcattggaaaaaggcaagcaagtacatgtagtcgagaaggacgctgaggtagctactcaggaatcggactcagcatacctagactctgatctccatgtctcgcacatcttcggaggttccacggcatactcctcaaagcgagagtacaagaaagtggaacgtgaagtctgttcgacgtggcagggggccgcgcccaaaatgaagtggtccgaacagaagatcaaattctcagaagaagaccaccccaagactgctgtcatcccaggacgatatccgatcgtggtcgaacccactattcgaaatatcaaggtcgcgcgagttctcatcaacggcggcagctcaatcaaccttctcttcgccagcaccttggacgcgatggggatcccacgaagcgagttgacacccaccgatcaacccttccatggaatcactcctcagtcatcgtccaaaccattaggcaagattacgttgcctgtgacttttggccaagcaaataacttccgtacggagcagatcacctttgatgtcgctgaatttgatacagcatacaatgccatcattggaagaactgcacttgcgaagttcatggccgcatctcactacgcgtatcaagtgctcaagatgcccggactaaagggaacaatcactattcaagggaacgctaagctggcagtgcaatgcgacaagcggagcctcgacatggtcgagcacacgcccagcccacccgccacagctgagccacccaagaaactgtccgacatgccgggggtccccagggaggtgattgagcacaaactcatggtgcaacccgacgccaagccagtaaagcaaaaactgcggagatttgcaccagatcgaaaacaagccatacgagaagaactcgacaagcttctcaaagctggtttcatcagagaggtactccatccagagtggctagccaatccagtcatggtgcggaaggccaacgggaaatggagaatgtgtgtagattttactgacctcaacaaggcgtgtcccaaggatcacttcccacttcctcgaatagaccaactggtggactcaacagccggttgtgagttgttgagctttctcgacgcttactccggctaccaccaaatcagcatggcgaaagaggacgaggagaagacagcattcatcacgccgttcggggtattctactacgttaagatgccgtttggactgataaccgcaggaaacactttccagcgcacggtccagggggcacttagcaatcagcttgggaacaatgtcgaggcctacgtcgatgacattgttgtcaagaccaagacaagcgactcattgattgacgatctgcgggaaacgttcgacaacctccgacgatatcgcctcatgctcaatccagagaagtgcacgttcggagtaccatcgggcaagctgctcggatttctcgtctctggcagaggaatagaagcaaaccccgagaagatccaggcaatcgagaacatgaagtcgcccacaagactcaaggaagtacagaagctaactaggtgcatggcggcactatgcagggtcacagttgtttcctccttccctctcggtgaagtcgtgagaaacaaagatgttgtcggccgcattgcgaaatgggtagttgagctaagccagtttgacgtccactttgtgccacgaacagccatcaagtcccaggtcctcgccgacatcgtagccgattggactatacctgaaaataggtcaaacagtcaaaccaataacgaaacatggacaatggcgttcgacagcgcactcaacagccagggagcaggggcaggattcatcttgacatcaccttcgagagatcagttcaaccatgcgatccacctcaacttcagggcaaccaacaacattgccgaatacgaaggactactcgctgggataagagcagcagccgcacttggagtcaagcgactgatcgtaaaaggagattccgaactagtcgcaaaccaggtgcacaaagactacaagtgctctaatcccgagttatccaagtatctcgcagaagtcaggaagctagaaaaaagattcgatgggatcgaggtccgacacgtataccgcaaggtcaacatcgagccggacgatctagcacggtgtgcgtccagacgagagccactcgaacccggcacctttctggacgtcctgacaaagccattagtgaaagatgcaaacggcgaagatagcccagtcgcccccgacatcagctcgggggctacagaggcagagcatgccgttgccgatatcgagaccacagatgactggcggaccccactcattaaattcataagcagcgaagagttgcccgaggatgatgcagaagccgagaaaataacatgtcaagcaaaaatctactgtatgatcggcaacgatctatacaagaaggcgccaaataggatacttctcaaatgcgtctcgttcgacgacggcggacatctcctcctcgacatacatgaagggatctgcgggtcacacgccgccggtcgtacattggttggaaaagcttttcgacaagggtttttctggccaaccgccctcaaagacgcttgtgacatggattactgcatcaggctgggagtcaagatctgcttcgcttcggtttctcaccctcagagcaatggacaggtcgagagagcaaacggcatagtactacaaggaatcaagacccgtgtctacgacaggctcatgtcacatgacaagaagtgggtcgaagaactcccattagtgctatgggtcgtgcgtaccacaccgacaacgtctaaccaggagacacccttcttcctcgtgtatggctcagaggccatgctccccaccaagctacaacatcatagtacacgagtacagaagtacttcgatgaggatcagaaggagaagcgaaacgacgatgtgaatctacttgaggaacatcgagaacgagttaccgtcagagcagccagctaccaacaagcccttcgccgttaccacgagaagcgcatctga

SEQ ID NO: 24062 - DNA, 145 bp, Oryza sativa
  Clone ID: PAT_MRT4530_29080C.1
acatggaaaaaggaggccaccctgattcatattaccaatggattatgggagacccaaatcttactagtatacaaacacccccaaggagaactccgactaactatataattatctatgtcataaagctaaatttgagctaccttga

SEQ ID NO: 24063 - DNA, 375 bp, Oryza sativa
  Clone ID: PAT_MRT4530_29081C.1
atgacaggcgtcagaccagtcacagaccggtcactctcgtccaccacgcgtcagtttagcaagctgcatgtctgcccttcttcatacaatgacttccttgcaatggttgggatgaagcctggcatatatctgaccgggaccgacgtgccatcttcaggagctggcacgccgtctccggctagggacaagtgcctggaggctctcatcaatccgacgggacgggggggtcggggcgccccggccctcggggtcgaaacgggagcagtccgacccctcggggagacaaagggaggtgtggccacatcaccctcgggcccgacccccccccccccgagggggtcaggccacgtgggtgatcgcggctgcccaagcctc

SEQ ID NO: 24064 - DNA, 674 bp, Oryza sativa
  Clone ID: PAT_MRT4530_29082C.1
ctcctgtgttctggtggatctccactccgctggaaggaggtgcaaaacgggagcgcggttgtctgcctatgacatgacaggcgtcagaccagtcacagaccggtcactctcgtccaccacgcgtcagtttagcaagctgcatgtctgcccttcttcatacaatgacttccttgcaatggttgggatgaagcctggcatatatctgaccgggaccgacgtgccatcttcaggagctggcacgccgtctccggctagggacaagtgcctggaggctctcatcaatccgacgggacggggcgaggcgtgtaacaggccacctgccaccacctaacccgcgatctgaccagtctgtgaccggtcacacgctgcgcccggtcacggaccggataagcgagcgcgctgcgctgcattacatgcggcgtgacgcgctcgtccaaccagcaataaatgcggatgagagggacaccgtgtttgcaatcagcatgactatgcattatactgacaagtggacaaaaccaggcaagggttgccggtcagactggcggtttcggtggtctaaccggtggcgcaccggcggtcagaccggaggcatcgcggcggtcagaccggcggggacacggcggtcagaccggcttcggcgacaggtgacaggagctgatctcggcggtggctga

SEQ ID NO: 24065 - DNA, 655 bp, Oryza sativa
  Clone ID: PAT_MRT4530_29083C.1
ctgtgaatatttcagtgcgcatgtagtataaaacatgacaacacaaatgttatgtgaatatttcaaaatacatgtataacataataaagtgaacggtaattaacacatcgcaaataatccaaaatgccctacaacatggctctctcacaagtcataacttcactaaatcgcattttatcttaaacaaaacgatttatgagataaatttcctattaccaaagtatgcaaatcacattaaatcaaagggtgaaatgcaactctttagttcacttgcagttggtctgccaagggccagtgcattttctagttgttcgctaatatcaggcaagcaggcattgccatcttccagcaactcgttgcacagagcctcatgcgacaatggcttacctcctttatgatttaaacaatgcttgacattaatgtgctcgttgcagttcttatcacacatatgaccatcctgacatgcaaactatttcatgatggaacctccatcccttgtcatagaaaaacctgaatgccaattagcaacacgctccatcctcgaaaatggacccttgctttcttgggatttacttgcagttggtgcaccaacggctcacttgcagttggtgtgccaagagccagtacattttctagctgttcgctagcaggcact

SEQ ID NO: 24066 - DNA, 283 bp, Oryza sativa
  unsure (1)..(283): unsure at all n locations
  Clone ID: PAT_MRT4530_29084C.1
gagataacgcgcgggcgctantagctagctcttaatgtgatatgtatacacaatttttcctttatctgtcaaggaatgggtaaatgcatggttgagagaattaattgagtttcagttatagatatatagctggctgagacgaccagttagccatcgtcggtcgacgaccaatcagatcaatcagttaactaattatggatcaggagaaggcggacggcggcggcaggaggaggaggagcagggcgacgagtagcagcggcacggcgcganaagcacggcggcg

SEQ ID NO: 24067 - DNA, 318 bp, Oryza sativa
  Clone ID: PAT_MRT4530_29085C.1
atggcttcactcccggaggtggcgattgtggccctctgcgccgccgagggctgcgcgaggctgctgaagcctatcctcgacttcctggcgaacgggatgagccccagcagcgccgccgccgacgcggccatcgtcgccgccctcctcgccctcgtcttcgcctacctcgtctgcgtcttcctcgtctacctctccgtcactaccccatcggcggtcgcggctgccgtgaagctgtccattgtcaccgcattcacgctggtcttcgccaggccagccattgcctccgtcgtcgtcgtcgtcgccggcggtggcctctag

SEQ ID NO: 24068 - DNA, 249 bp, Oryza sativa
  unsure (1)..(249): unsure at all n locations
  Clone ID: PAT_MRT4530_29086C.1
gcaaagttcaaacgactccagtntattnagacaaagagcatactnacaccagagtccatactactaattcatagccagtatattaccaagtactactagttgcttaatcagaacactaaccataatttacaggcatatgggtaagcctctcctccatcacatcatcatccctgatcgagaccccagcactagagaagtttcagggacagttttggtaggtgacgnggagagttgcttgcaagaactcca

SEQ ID NO: 24069 - DNA, 477 bp, Oryza sativa
  Clone ID: PAT_MRT4530_29087C.1
atgaagttaagcatgaaacaacccccgtacaaccgcacttctcgtatgggtcttcccttcccgggtgcgccagaactcctctcactactagaaaccgtgtacgcctagagtgcatgaggatgtaaagttcatggagcgggtactgccaatgtgaggttatcgaaaagctttgccatgacgcgtctcatgtgttgagacaaggctcatgtgttgggcagtcgcggagtgtgagtaaaataaatctattcgaataggagagtgtggaagagaagcccttgtcggtacgcttgcgtatccaacaagatgatcggagtgcgctacaacggcgacaccacgacggcctacttcatgttcgcgaggaagttcctacccaactcgctcaccaggttcctcatattctaggaccggctcaacattttcgagggccctaggcgaacttcacgctacaggcccttcagaagttaaggctatttttgt

SEQ ID NO: 24070 - DNA, 1225 bp, Oryza sativa
  Clone ID: PAT_MRT4530_29088C.1
cccacgcgtccggatcgagctagcaaatatcaaaaagcagctccagcttcttctgatcgatcgatcgagctgagctataggcagtagctgctaattaagctaattaattgctaagcagtagtagagctagctaattaattaagatggccggcaagaaggtgcaggtttgtgcgctgttccttgccctcaatgtgctcttcaccatgcagatgggtgcagtagtgcaggcatgcgagccctactgccccacaccgacgccgccggtgacgccgcctccgtcgccgccgtcgggtggagggaataaccagtgcggctcatgccctagtcccggcggaggaggcggtggcggcggaggaggcggtggcggtggtggagggcgtggaggtggtggcgggagcggcggaggttcaggtggaggcggcggttcaggtggaggaggaagcggcggcggaggttcaggcggtggaggaagcggaggcggcggaggaggaggaagcggcggcggcgggggaggaggaagatgcccgatcgacacgctgaagctgggggtgtgcgcgaacgtgctgaatgggctgataaacgtgcagctggggacgccgccgcggcagccgtgttgcagcctcatccagggcctcgccgaccttgaggccgccgtgtgcctctgcaccgccctccgcgccaacatccttggcatcaacctcaacctccccatcaacctcagcctcctcgtcaactactgcggccgctccgtcccctccggcttccagtgcagcaactaatatagcttgctgctccatttacttcactgcttgctacacacaagaacgaccaccaggccacgtacaactatatatctatctatgtctaatttgttccttgttcaaatcatcatatgtatctgcgtgccttaatttcctccttcatcccgtaaattaatgagatatatatgcatgcatatgattcagttccacgacgtaattaaagcatgcttcattcgtctacttgtatatgtgtatctgcataattgattaattaatttgtactcgatggatctcatcgtatatgcatcagtacgtactgcatctcgtcttttctgcatgcctgttaattctacacatactgtactagctagctcttgttcgatccatcggtcccaatcgtttgtactagctacgtactgtcttgttcaattgttcctctctctctctctaaaaaaaaaaaaaaa

SEQ ID NO: 24071 - DNA, 356 bp, Oryza sativa
  unsure (1)..(356): unsure at all n locations
  Clone ID: PAT_MRT4530_29089C.1
ctatctttgggcccatcgttaaatggcagatggtattatggtcttggacacattaatggcaaagaagtagaaaggtttttggagataaacagtcttaagaaacatttgacgccttaaagggaaggttgtacaaatagcatgaattaccacctttcaatcagcagctgaagataaaatctaaatcttgctaggtcctacatacgggtgacttctttagantntggcattttgtttcttgattgcttgggtaattttaaggaaccatttagtgagtttgtatcaatttgcttcatgttcttttttctgaatcgtcgggtgatttatttatcttgggatattccttgagctgggattgt

SEQ ID NO: 24072 - DNA, 365 bp, Oryza sativa
  Clone ID: PAT_MRT4530_2908C.1
tttcaagtggataaccaaccaagtcatgcagcaccagtgtcccaacagctcaggctggtagcacaaacaatctcactaccagcccattagtattgttcaagcgattgtgcaaacagctacaactgcaagcaatttagtggtgtctactttgatcagactcaagctcaagcccaactcggtggacttcaactcccatccatatggggtatctcacctaatactatagtgctcccaggaccttcccctgttgtgtttctgtactgaatgacaatataatagttcgtaggtaaaataaagtcaacatcatcagggactgtgaactaggtcatataatctaaataaatcatctcctattaaaaaaaaaa

SEQ ID NO: 24073 - DNA, 797 bp, Oryza sativa
  unsure (1)..(797): unsure at all n locations
  Clone ID: PAT_MRT4530_29090C.1
acgcccttttttttttttttttagacaccaggatgctgccaactggcgccggaatgcattatataatactctttgcagcatatggtcatatggagcagtgttctgctgcacctcaaagtcaaacacacacggccactaaaagttagtatttcgcttcccaaaaaggtggggtactactgacaccatatgctattgttagacttctgactaacccaatttgaccagtaggacatctacagagtaaagaactgcacgattttggccaatctgagctgtaggtataagcagaagcaagagtaagcaactacatggacttatatacaatctatgaagctgctgaggaattctttcagcacaacaaaattcaaggcaagtgctcatatgaaagaaattgcttcctacagatttgctactggcattgaaatgccatgctctgaacaacaaattgacagatgctccacagaatctgtgacaatgtcctccaacacttcactggcaatctgctcagtgatctcatctgtttccattgtcaatagcttaatccaacccttcccttccacctcctcctgcataattctttccaagattattccagcattgtcgtccttgtttgccgcaaagctcccatctccataaagccaatcgctcacgatgttccatacttcttcacccaaggtttcagataagtttctccctccatgttcttaagcatgctctactccatggatagctgcatagtaacgtatccggccctcccgcccggggcctcctctccacaaatccgaaaatgcaccttn

SEQ ID NO: 24074 - DNA, 345 bp, Oryza sativa
  Clone ID: PAT_MRT4530_29091C.1
atgaggagcaacgaggaggccggatttggtgagaggtggtggcggcagtgcacgcgcacgggctctggacggctggctggagaagaggggggagcggcagcgagcgaggacgagcgaccagagcaggcgggcgagcgcgtggcgaccggcggagtggagtggggtgacagcggtagcgggcgagcgcgcatccagagcagtgtggcagcagcgagcaggagctggcgagtgagcgcggggaggggggtcggcaggctcagcgtctcccccggtggtgaaacaccaaaaactgtcgcggctgccattgatgccatgtcgagctccaccccgttgatctctttctag

SEQ ID NO: 24075 - DNA, 533 bp, Oryza sativa
  Clone ID: PAT_MRT4530_29092C.1
aggccatgggagtatagtcggtgatggatcgggactaggcttgggggaggatcgggaggttgaggtccgggcggtcaaggcggaggcagcggggtcacgggcgagggtttcgggcggcgaggcgcggcggcggggtcgcgggcggaggagcgacgggcgcgggcggtggcggagcgggcagaggagcgacgggcggcggccgtggggtcgtgggcgcaagcggcggggtcgcgggtggaggagcgatgggcgtgggcggcggccttgcgggcggaggagcgacgggcggcggccgcatggctgcaggcgcgggcggcgggtttgcgggcggaggaatgaccggcgcgggcggcggttgtccgacagaggaacggcatcccgcggcgaacgggcgggcgggcctcggcctctactccgagcctccgccggcagatccagccttgataccgtatctgctggagcgccgttttctcctctcatgcgctatatttcggatggagtaccggatgaaagatctgctggggacgctctaa

SEQ ID NO: 24076 - DNA, 954 bp, Oryza sativa
  Clone ID: PAT_MRT4530_29093C.1
atggagttggaaggcatgagatttgcgctgcaccaacccacatggatgaaggattcaagggggacaaagactgctgctgagcctcttgaggcactcggcctagacagaacccccgaaaaggctgcaaaatctgctgcagctgcaatatggatgcgtgtgtgcatgggtgcagctgcagtggcgccgtcatcatgtggttcaatattggggcgagcgaaatctatcatttgtcgggccgacacgccagcatggacggatcgacggacgctggctggtctcagccgttgctcctgcagcctccgcgtcgacggggcggaggaagacgagaacgagacagcgagtgttgacaacaacgagagcgaaacaaggtgcattgttgtcggttgtccgcttccggttgtctacgacgaacaggcgctgaaccgtggtggattcatcaacacgactacagccccgtatcacaaacgggtcccggtggggacaccgccgcagccgtcgatgggagcggatgaacggctaaaatgcatcgtgatccggatctcggccgggaccgctgctgctgctgcgagagttgtagtaaaatccagcggtcaggagctcaagaagcgaaatacccgggcagcattcaattccgctgtacgcccgcttggcagcgccgctgctgcaccaccccgcatccatccgctgcggccacgagactcggtggcattgcttgctggctcgcgcgcagatctggtccggtacgacgcgtgcacggtggtgggggcgacgcgtctgcacggtcgcgcgggctcccccaccacgacgcgcgcccgcgcccctgcccgatcgagcgccgggacggggacggagacgcgattggctcgtacgcgcgcggggggcatgcgtgtgcccggcgccccggcgcgcacggacgcggagacgcaacattttgtcccggggttcgggacgtga

SEQ ID NO: 24077 - DNA, 3304 bp, Oryza sativa
  Clone ID: PAT_MRT4530_29094C.1
atgcaccctctccccccactcccctcgccgccgccgccgccgacgccgccgccgtcgccgtcgaatcgaaaccaccgccatcccgcatcccgcgtcggagcagcgcggggtgggcccagatctgacccagccacacccatccctgtgtcgccgcgcgtctccgtcatgcggcggggaggcggcggcggcggcggaggaggaggaggaggaggaggaggaggaggtggtcgtggaggtaggggaggccacgcccgccgggacgcgcggccgcgtgatgacaggggcagggacggcccccgtgacgatagggttaggcacggcgaccgccgcccccacgactaccgcccccgccgcaccccgtcgccgggccgcgaccaccgcatccgccgcaccccgtcgccgtatcgtgaccgccgccgcatcccggactaccacccgcgccgcaccccgtcgccgcaccgcgaccgtgaccgtgaccgccacgcggcgggacgcccgaggggccgaggcgacgacgaccgggaccgcgacccgccccgcgggaggtcgccgccgccgtatcgcggcgatgatcgcgggaggtatgacgggccgccagactacatgctccctgaccacccgtcatccctgcgtcctgcgaggaaggacggtgagttcttcggggaacccggcatgacactccgggtttgttcgacggagatgggaaggaccagctcgctgtatctggacaggaggtcgccgccgctgccaccacggccgccacctccaccagtgcgagtggcgtcgccaccgctgtacaccttagtgccacctgcagagactggattcctgacagggggatccgcgatgaaggccggcgagaactttggcacgggaagtagcaggtcgctgcttgacggcggtggcgagtttcagtaccgtgaccgtttggatgacccgtatgttgagaggagtagagaaagagagatcgacaggctctatgctggtagaagcctgcatctggaaagggatggagaaatggataggctttaccctagcaagggtgtacttggtgctgaccttgcgccatctgcatatgctggttcttcctcatctttgcttgccaaggagcggccttacagactgcatgatggaactagttatgagccaaccaatggatacgccatggaggaacttggcaggctttctcatgacaccctgggacatgtaagtggccatgctcacagattctcaggaagtccattagagcatggcagtggtcgtgatggcaagatattgttggacattacaagacagaaacactcgaatcattctccaagagatgcgtccatggaatatgtaagaagggatccggtaaatgcatatcttccaccagagaacttacatggaaatggcccacaggtttcaagtcctagtgtcaggcgcatgtttggctcatcatctttgactggccgcaaggatgaaaggattgaccaccaagtgaggctgccacttaggatggcagaagatgaggataccttccaaggcatgcatgatgggatggagcgtgatgtgcagcactcttaccgtggagatgcactaacacgtcatcgcaggacaaggaattctgatgtgcgctactcacgttctcctgaatctgagcgtattaaacttggaagacacccagttcaacatgggtattcttcatttgatgatacccatgagtttagtgaccaagaagtttctcctgtggtttctagaggaagaccccggaaggctatgtatcgtgatcatgtgacagaacactaccaaactgatgatagccctctaggacgggagtattatgatgatgatgtggattcatatgacctatcacctcagagaatggcagagccttatgatatggttgatgaccaagacaaatatgatgcaagatatgatttaccaaacaatcgtaatgttttctcaaggattactttgcgagatgacaacaatgatgggtgggctgatgaagatcaggaaaacaatcatcaatcgaactcaataacctatgggcattcacaaaacaagcctatatctcagaggctgtccagacccactggccactcacaatttgggggatttcccatgcatggaagaggaagaggaaaaagtgcaaaaaagagattaagatctgctcttcctcaattccatgttggatctacacaagggggagatggatttgttaggccaaataaacgtttcaagctgacagaagttaatcatgatgaccctgaaatgagccatgaggatgccccagaggacgaggacatttctatgcagaaagatcctcctgaaggctcagaagaattcactaagcaagttcaccaggcctttcttaagtacacaaagctattaaatgagagcccgaccgtgcagaagagatatcgtgaggcagcaaaaggatctttgtcttgctgtgtatgtggcagtgtcccaaggaagtttccggacatcgatgccttgatatcacatgcttatgatacatgcaaaatgggtttgaagacaaaacatttggggtttcacaaggcactctgtgttatgatgggatggaattggcatgttgctcctgacactaccaaaacctatcattccatgccagatgaggaagtaaatgccatgaaggatgatctcatgttgtggccaccagttgtcataatacataacagctccattgcaaccaaggcaaaggctaccgatgcaaagattgtgtcgaaagaagaaattgaaggtgtgctgacagaaattggggttgcatgtgacaaggcaaagattagccatggcagaccagccaatcagagcgtgttcctagtgaagtttcttccaacgatatctggatttcaggaggcgatgagaatccacgagcatttcaccgtcaaaagccacgggaaggaagagttccagcatatcaaaggtggcaaaggtaagaaggatgctcctgttgatgaactcgaggagttgctatatgcgcatattgcagtcgccgaagacttgggctacctggatgaggaaacaaagaagagatgcctggtcaggagcaagaatgacattgaggctaaagcagatgctacactgaacttggattcgtgaagtaacagcaacaaattaatctaggctaggtttactgcggctagttgaacagatcaagttatcctacttttgcttaaattgtatggctgctcgtccacgtggctgcaaccttggaatccattatactgctacggttgaacctttatgcaatttatccaagcccttgagcttttatattctaaaaaaaaaaaaaaaa

SEQ ID NO: 24078 - DNA, 627 bp, Oryza sativa
  Clone ID: PAT_MRT4530_29095C.1
atgcgctgcggcgttcgagtcctgacgaggttgccatgggcgcgcgcgcggctcgacgtacctgcaaacaccacctcgcgacgcgaggcgttccctgactgcggacggcactacgcgtctcctaggagtgcagactgcgccgccagcaccaccacagagaccagccagaggcccggaggccggagcgcgtccactccgaccagctatgccatgttcgacgcctgcccctacccgagagggcccaaaggctgctcgccgtggctacatctagccaaggtcgccgacgagaaggcggtggaggtagccacgcgcagtgcacctaggagctgctcgtggggcctcgatccattccctggtggcctcccgccgcatcagctcggcgagctcaagctcccgcgagcagcaggcctccaacgagatccggctgctgcgcgcggtcgcgtccacgccaaccacagccacgccgcggcgtggaacggaccatgcatggtcgcgacatgccggctggcatggcatggccgacgttggcacgaaaccacgatcatggacaccggctggaagggaggagacgagaggaggtgcaagtcatccccaaggctggcgcggcagggccagctgccacgctga

SEQ ID NO: 24079 - DNA, 927 bp, Oryza sativa
  Clone ID: PAT_MRT4530_29096C.1
ccggccggggccggagcccggaagctagcgcctcgtcgacttgggcggcggctgaagtcagtggccgaaggagcggggattacttgcccgcctcgaaggctctccgccggcgggcaggcgggatagcgcggcagcggcccacgccggcagatcaggtggggagagaagctccgccgtccgtgcctgcgccggtttccacgagagcggcgtcgcctgtgtcctgctgctgctacctttgctgccgcatcctcgccgctctgcatcggtggacgtctgggatggcggacggttcgtttcttgatcggatggtgtctcaacttcggtcgacgtgcaggtactacactggatatcccaaggatctagggccatcaagaattataccgttcacgtcagagcgtcaattcgtgcagctgttgcatgaaggccgtccagtagttgttgcctttactattaagtgcacttatactcaacaccttgataaggtactggaggaagctgctgctacatttcatccgcatgtaaagtttgttcgagttgaatgcccaaagtatcctggattttgcctcacaaggcaaaagaatgagtatccgtttattgaagtattttacaacccagaacaggctgctagcccaggaaaggtggtggaccctaatgtcacgaagtactcggtgaaagttctccctttcaactatgaccagagcatgtatggattccgggaatattttaagaagcacggattcaagtattttgaaacaaactaggtcaactattgaaaatcgttgagatgaaacatgcatagttagttaacatactatgaatgtacggtgaatgcacgttcagcctgtactagaatactttccgttcaaagcctttctgtaagaggcaaaaaaaaaaaaaaaaaaaaaaaaaaaaaaaaaaaaaaaaaaa

SEQ ID NO: 24080 - DNA, 276 bp, Oryza sativa
  Clone ID: PAT_MRT4530_29097C.1
atggctagtcccctacgggccgacgccctcttctctgctagatctagcggaaggggaggcggtggcaggagcagcgggctcccacggggaggcggcagcgccctcccctccgccaaatccagtgggaggggaggcggtagcaagggtggtgccctcccctcccaccccggtggcggcggcttcctccttgatgtctacccgttctttgtgttagtgttgacgttcttagtgttcgacttgttcttggatactcttgagttcttgaatgccaattaa

SEQ ID NO: 24081 - DNA, 272 bp, Oryza sativa
  unsure (1)..(272): unsure at all n locations
  Clone ID: PAT_MRT4530_29098C.1
atgacgatcccgatgatcaattagtaataatntaatcggctccnttagttaattttatctttatnttaataatanagtatgtcctcctaatntatccagctaggatggttttatccnctccatcccatcctntgctntgtactatgcatgtaattatccnttccatccggaccctgctgttncgatgccttgattacaattnatgtcagtgcagtggtatgcttatttgttcctccaaaaaaaaaaaaaaaaaaaaaaaaaaaaaaaaaaaa

SEQ ID NO: 24082 - DNA, 252 bp, Oryza sativa
  Clone ID: PAT_MRT4530_29099C.1
atgaaggataaagcactccaaattgaagctaattacgatcatagcctgacgacgataatggcggcggcgacgatggcgaacgtggcgctgctgctgctgttcttggtgcaggtcatgagcgtcatcggcggcggcgcggcggcggcgaggccgctgctgctgcaggcagacggcggcgccgtgatcggcatggtgacggagatgctcggcggcgcgaaatcgaggggcaacctgcgcacgcactgctgctag

SEQ ID NO: 24083 - DNA, 1641 bp, Oryza sativa
  Clone ID: PAT_MRT4530_2909C.1
cgcctgcacctaccggtacttacttgccggaccgacccacggttggtcgatccagctgctggggatgagtacttagttagctcggagctagctactaatggatgatatacttatgctagttagttaaatacagttattagttagttgtaggttgcatctatcatatctccatcggttaattaattgattgatagctagattatcaacaattaatgagcatggtggtgcagcaggagcaggaggtggtgttcgacgcggcggtgctgagcgggcagacggagatcccgtcgcagttcatatggccggcggaggagagccccgggtcggtggcggtggaggagctggaggtggcgctgatcgacgtgggggcgggggcggagaggtcgtcggtggtccggcaggtgggggaggcgtgcgagaggcacggcttcttcctggtggttaaccacggcatcgaggcggcgctgctggaggaggcgcaccggtgcatggacgccttcttcacgctgccgctgggggagaagcagcggcgcagcggcgcgcgggggagaactgcgtacgccagcagcttcacggggcgcttcgcgtccaagctgccgtggaaggagacgctgtcgttccggtactcatcggctggagatgaagagggcgaggagggcgtgggtgagtacctggtgcggaagctcggggcggagcacgggcggcggctgggcgaggtgtactcgcgctactgccacgagatgagccgcctgtcgctggagctgatggaggtgctcggggagagcctgggcatcgtcggagaccggcgccactacttccggcgattcttccagcgcaacgactccatcatgcgcctcaactactacccggcgtgccagaggccactcgacacgctgggcaccggtccgcactgcgaccccacctcgctcaccatcctccaccaggaccacgtcggcggcctggaggtgtgggcggaggggcggtggcgcgccatccgccctcgccccggggcgctcgtcgtcaacgtcggcgacaccttcatggcgctctccaacgccaggtaccgcagctgcctgcaccgggcggtcgtcaacagcacggcgcctcgccgctcgctggccttcttcctctgcccggagatggacacggtggtgcgcccgccggaggagctggtcgacgaccaccacccgagggtgtacccggacttcacgtggcgggcgctgctggacttcacgcagcgccactacagggccgacatgcgcacgtttcaggccttctccgactggcttaatcatcatcgtcacctgcaaccaacaatatactcctagctcctagtcctagctatatactcctattatccatccatccatccatcttacactactataccattagcatcgatcgatcatccattaattaattaattaattactagttccggcttagatatatatctggcgattatttcagttcctagctactcctacatgcatgctttgcttaattagatctatctatctaatctatcccggccggcctgttttaattccatatatcatttggtttgcacgtacccatctatgatctatatatacatgcatgtcgactattgttggtcgtacgatattatattatatataa

SEQ ID NO: 24084 - DNA, 480 bp, Oryza sativa
  Clone ID: PAT_MRT4530_290C.1
atgcacgcacacgtacgttaggatgctttctagtgggcggccgcgctttttgtttttgggggacgacgactacgacgacactgggtgtatgaacgccagccccagtagcaccactagcatagaccccggcaccagaattagcttatgcggcctaggcggcggtggcataagggcgagcgggaggatcaccatgctctccaaaacacacaccaaaaggcgcagggactccaccgggaagtacttggcctacacgccgccgtcggcggcgtttgtcgacggctcaatgatattgctgtcgtcgacgcctgcggaggtacctgacgactactggggcagatgatgcagagccaacctaccggagtctagctataacctttgtacctcatgtatgtaaatgtcactgatgccattcatgttgtctgatatgaaccaagaagtctacgcgggatattttgaatagggatactacaaactatgctg

SEQ ID NO: 24085 - DNA, 402 bp, Oryza sativa
  Clone ID: PAT_MRT4530_29100C.1
atgaaaaaagtactaactaagtttgaccaagaatgtgatcaccactacgatggatcacaaggcaacctccatcggtggaatgatcacatctcagcgtttacacaagtatccaaacagttgggcacggtgacttggagctacaagaaaaacggagaaggcgaggcggcgctggccagcggcaagaggacgaggcagcaccagcgagcggcgagaggacagggagaaggcaaggcgacgccggcgagtggtgagaggatgaggcgacaaactcttccaccagatccagaagccgaacgcctccccctccgcgaccgtcctcgccatcaagggccacgccagtgccaccgccgctgttgctcctcccgctccccgtgcgcaccgtgccgccgccaccaccgccac

SEQ ID NO: 24086 - DNA, 134 bp, Oryza sativa
  Clone ID: PAT_MRT4530_29101C.1
tcggtagaatacagcgatgaatttataactctgggagaatatttatgcctaaagagcagtagagagctgtcctatgctggaatactatattgttgactatgctgaaaccgtaaaaagagctagacgtcacttgt

SEQ ID NO: 24087 - DNA, 713 bp, Oryza sativa
  unsure (1)..(713): unsure at all n locations
  Clone ID: PAT_MRT4530_29102C.1
ttgcttaacaatcccttccaaaggtgccactnttattcagcccatggnaacgtagttgaaaaagtgtcactttttcatgtggcttgtcgtgcaaaattggtgctgaatcgtcttgcccgacgagttctgccacacccggatcattgtcctcattgtgaccaacaggacgaaacaattgatcacttgcttacaaactgtctcttcgcgagacaattttggtactccctcctacagcggtttggcctgaattctttgccccccttgaatgacgatcaattttgagtggtgaaacaggatcaatgaggcaactaatggttcggtgcaaaatggacttaattctatagtaattcttggtgtttggacgttttggaagcatcggaaccgttgtgtttctgatggggttaatcctaacttggccagtgctcttattcttgctgaggagaaaggacggctgtggtgtttggccagggctcgggggctatccttttatattgccaaagtgttgggtggttagtctcagatcatggtttggtttgtggttgtggttgtggttgggtttgcgacatacatggttcctagaacttagtgtgtgtgcgtttggttttgtactcgaggttctaccccctctttcttcttcttaagagatattttacggtgtatgcattccaaaaagggtaaagatccaatgctcctcaatcaaaaaaaaaaaaaaa

SEQ ID NO: 24088 - DNA, 2223 bp, Oryza sativa
  Clone ID: PAT_MRT4530_29103C.1
atggctccccgcaagcctaccaaggccgggtcaactggtgaagatcctaggagccttggcgaaggatggtcgtgcttccttggcaagtcacttgtcaaagaggccgactttggcgaactggtattatccagttctctcacagagggccaaggatcgtgcgggggcgaggccgttgttcccttgcctagggatgggcgaacggttgtcttcgccgcatacttcgctactgggcttcgcctcccatgcgacaacttcttgccttcggtgctttcgatgtatgaggttaggcttccccagcttagcccgttggcgttcccgaagctggcgcttttcgcttggatgtgtcggacctgtgggttcgcccctaccgccgagctattcgccgctctgtttactgcatgtgcctcaaccaaagacgtgcagacgccggcgggtccgaggaaaacaattttcagctgcgtgaacttcatgctgcggccggagcgttcagatgcttggccagtgcttgcttcgatggcgaaatgggacaggaactggatgcagaaatggttctatatcagcaacccctactctgccaaagatgctcaggcgaacaggctgctttttgagcgttttgctgtctccatcaacgcgaagccaaacgtggagatcaacgggactgtcgagtcccggctcattctccttcgcaaggttgcccggcggctaagcacccgggatctctgcaaggagttttgtctccttcggatttcccctctcgcccgtgtgtgggacgtttccgtgaacgagggcgaagaagttcttgggcttccccgccttgttctccccgccggggccgaaatgcggactttggaagacgctgagattgaggcgttgaagatgatcggagctctaaccacggccgagttcgcccgcttgctccagcgccaagccgacggccgaatgaaccatgtctataccggcgaattgccaagccgatcgaacccctctcgggccggtgatgacgaggctggcacttcgaaaaagcgcaagcgtgcggtcgcgaaaggcggccaagtccgaactcgccgtagcgcaaggccgccgtcgaaagtgatggggaggaggaagaagagaagaatgcggaggccggttctgaggaggatggctctcatgccgcgaaaaccggtgatgactgttaaaaggaaaaagaagaaagggaaggttgtgcaggtcggccatggcttttccgacagcgaaggatccgacgggactactacatcgccggtgttgcggcgcgcaacttcccgtggcaggcgcatgtctctgccacccgctagcgatgccgaagcggcgacgggcaggagtgcctcagccccggacgctggggccaacgttgctgaagacgaatgggttgatgcggtcccctcacctattcgtcaacaggagtggaaggccccggcagttgaagcgagcgtttcggacgtgactgtcacgaccggaattaacccaacgggcgttccttacgtgcgtgtattattccttgtcccaggaggcaagggtgaacaaggaaataataacaataacaataataaggtcataacaaaggtcatagcaccgaccgaaggccttgggctcttcaccgaactgaacgagttcggcgaaagctgcgcggctgtggagagcctatttgtgcggggccttgccgtgcacctaagtgccaagaagtccgccttagagcgactagatgggtaccgcctttatctttgtaaatccgaagaagatattcgccacaaggaagacgaaagacgcgtggtggcggagactttgaagaaggcgaatgctgaaaacagggcctttcggaaggggttttgggaggatggcggccgggattgtgcaaagattcgactccgcgagaaccttgaaaggatcgcgaggaatgaggaggctgctgccgccaacttcgaaaaggatcccgggccgtcggaacggtccactgggcacaagggcgaaggtgacggaggccaagaccaccctgaggcgtgcggccgaaaggtttgcgttcgacctcccgctgaaaattggcgaaacagcaacgagaagttcatggcgttgaagggtttgccgaagattccgacgtttccggagagtccgttttcgcaggagaagaatttgaagagttccaaggccagcaaggcaagtcacacagatcccaaacaaccctttgagcatgttgaacctgtttaa

SEQ ID NO: 24089 - DNA, 1798 bp, Oryza sativa
  unsure (1)..(1798): unsure at all n locations
  Clone ID: PAT_MRT4530_29104C.1
atggccccccgcaagcctaccaaggacgggtcaattggcgaagatcctgtaagccttggcgaaggatggtcgtgcttccttggcaaatcgcttgtcaaagaggccgacttgggcgaactggtatcatccggttctctcatagagggccaaggatcgtgcgggggcgaggccgttgttccctcgcctggggatgggtgaacggttgtctttgccgcatactttgctgcttggtcttcgcctcccgtgcgatgacttcttgccttcggtgctttcgactgcggacattggaagacgctgaaattgaggcgtcgaagatgatcaaggctctaaccacagccaagtttgcccgcttgcaccaacgccaagctgatggccgagtgaatcgtgtctatactggcgaattgccgagccgatcgaacccctctcgggccggcgatgacgaggctggcacttcgaaaaagcgcaagcgtgcggtctcgaaaggcagccaagtccgaactcgccgtagcgtgaagaccgccgtcgaaagcgatagggaggaggaggataaggaggatgctgatgccggttctgaggaggatggctctcgtggttatacccccagccctacccctgcgaaatccagggcaggctcccatgtttcgcctacatgacctcaagacatcgtcgtagcgaacaccctcttggcgatctctagtacagccgcgaaactggtgatggctgtcagaaggaaaaataagaaaggaaaggtcgtgcaggtcggccatgggttttcggacagtgaagggtccgacgggacccctacttcgtcggtgttgcgacgcgcaactttccgtggtaggcgcatgctccgccacccgctagcaatgccgaagcggcgacgggcgggagtgcctcaaccccaaccgctgggtcgaacgttgctgaagacgaacgggtcgatgcggttccttcacctattcttcaacgcgaggggaaggccccggcggttgaagcgagcgtttcggacgtgacgcttaccgccctgcatttcgtccctaccgacatcgccacgcggccggagatcactccgttcatggacggggtgtgccagtccgaagaagattttcaccacaaggaagacgaaaggcatgtggtggcgttgaagaaggcgaatgtcgaaaacaggtctctccgctctaacctagaagcatcacgccagcgggacgccgaacgagactgacaacttgcttcggccgaggagaagattaaatccctcgaagcctgtcttgcgtcggccgaagctacggccgcaaccctggtgccagccatagagtccgccaaggaggcctgttacactcttcggctggcccttaatgaccttggggcgcgggcggaaggtgctccgggcgaaggcgggactgcacttgacttctccgaatagacgcaggaggcggccggctcgattgtcgaagtagcaggcgcctacggnggactgttgaactcgtgtttcggcgggattcgttctcagcctcttgcacgcgcacggctgcgaccacatcggggatttcccgatttcgtgaagtaagaatggcctagcaacacgcagtgctcgggggctgcattaagggcctttcggaaggggttttgggaggatggcggccgggattgtgcaaagattcggctccgcgagaaccttgaatggatcgcgaggaacgagaaagccgctgccgccaactccgaaaagggtcccggaccgtcgggacggtcaccggggcacgagggcgaaggcgacggaggccaagaccaccctgaggtg

SEQ ID NO: 24090 - DNA, 270 bp, Oryza sativa
  Clone ID: PAT_MRT4530_29105C.1
atgtggggaaagccgccacacttgctccgccagcaacgccccggcgggcactccactccgtctcatcccatgccacctcctcgcatccctccccgcatccctcccaccatcgccttcgcctccccaccgctgttgctctcaaccctagtggcgtggctgaagcggaagagaagagaagactggcatggtgcggtgcctcttcctgccttcctccctaccagcggtggtgagaggggaaagataaatgtcactgacaagtgggccccacag

SEQ ID NO: 24091 - DNA, 414 bp, Oryza sativa
  Clone ID: PAT_MRT4530_29106C.1
atggcggcgggctcgagagcatctcagcagacggcatgcgcgcggtggcaggcgcgcgacggtggccgcatgtggaaggtgatggtgaccgggacgtccggctcgtcggtgacggctgacgggcaggctcgcgcgcgggctggcccggtggccggcgtgctgtggggaggtgtggcggtgccgtccaatccggcgacagcgacgacgagggcgtcggtgtcggcttctaagctgtcaatgccgggatcagggaggccgcagcagcagacgaaggaggcgtcggcagcgctggtgcggctgccgtgcaacaaggggaaggcgtcgcggttcaagcggagctgcttcagcgaggaggacgacgccgcgtccgtcgcgtgcgtcgtctgcgcgccgtccctccctctcattaattag

SEQ ID NO: 24092 - DNA, 1602 bp, Oryza sativa
  Clone ID: PAT_MRT4530_29107C.1
atgcagaaatggttctacatcagcaacccctacttcgccgaagatgctcaggcgaactggctgctttttgagcgttctgccgtctccatcaacgcgaagccaaacgtggagattgacgggactctcgagtcccggttcattctccttcgcaaggttgctcggcggctgagcacccgggacctttgcgaggagttttgcctccttcggatttcccctcttgcccatgtattggacatttccgtgaacgagggcgaagaagttcttgggcttccccgcctagttctccccgccggggccgaaatgcggactttggaaaacgctgaaattgaggcgtcgaagatgatcggggccctaaccacagccgagttcgcctgcttgctccagcgccaagccgacggccgacgcgaaggccgccgtgaaagtgatggggaggaggaagaggaggaggatgctgatgccggtttggaggaggatggctctcatggttatacccccagccctacccctgcgaaatatggggcaggctctcatgtttcgcctacgcgaccacaagaaatcgtcatggcgaacacccttttggcgatctccagcacagccgcgaaaccggtgatggctgtcagaagaaaaaagaagaaggggaaggttgtgcaggtcggccatggcttttcggacagcgaagggtccgacgggacccctacttcgccggtgttgcggcgcgcaacttcccgtggcaggcgcatgtctctgccgcctgctagcgatgccgaagcggcgacgggtggaagtgcctcagccccggccactggggctaacgttgctgaagacgaacgggtcgatgtggtccctttacctattcgtcaacgagaggggaaggccccggcggttgaagcgagcatttcggacgtgacgcttaccgccccacatttcgtccccgccgacttcgccacattgtcggagatcactccgttcgtggatggggtgtgccaggtcatagcgccgactgaaggccttgggctcttcaccgaactgaacaagttcggcgaaagttgcgcagctgtggagagcctatttgtgcgaggccttgccgcgcatctaagtgccaagaagtccgccttagaacgactagatgggtaccgccttcgtcttcgcaagtccgaagaagatcttcgccacaaggaagacgaaaggcgtgtagtggaggagactttgaagaaggcgaatgctgaaaacaggtctctccgctctgaccttgaagcagcacgcaagcgagatgccgatcaagaccgacaacttgcttcggccgaggaaaagattaaatccctcaaagcccgtctagcgccggccgaagctacctccgcgaccctggaagaatggcctagcaacacgcagtgctccggggctgcgttaagggccttccgaaaggggttttgggaggatggcggccgggattgtgcaaagattcgactccgcgagaaccttgaaaggatcgcgaggaatgaggaggccgctgctgccaactccgaaaaggatcccgggccgtcgaaacggtcccccgggcacgagggtgaaggcgacggaggcccagatcaccctgaggtgtga

SEQ ID NO: 24093 - DNA, 252 bp, Oryza sativa
  Clone ID: PAT_MRT4530_29108C.1
atggcgaccacccacgcccagcgccggcgctgccttctcttcatggctctggtgttcgccgtggcggtggcggccgtggcggcagcgcgtccaccgccttccttctccggcacggcagatggtgacgacggcaacgtcctggtggcggcggccgaaatgcgatggcagattggcatggataacgagcaaaactttgtcttcctatgtgtcctcctagattttgctttaggaaagatagacttgcaaatataa

SEQ ID NO: 24094 - DNA, 363 bp, Oryza sativa
  Clone ID: PAT_MRT4530_29109C.1
atggcggcgggctcgagagcatctcagcagacggcatgcgcgcggtggcaggcgcgcgacggtggccgcatgtggaaggtgatggtgaccggtcccaacctggatccggtggagacggaggcccccgcccggatttggcggcgggggccgtcctccgccaggattagcgtggatccggcggcagggacggccggcgcggcggtggcggctgacgggcaggctcgcgcgcgggctggcgcggtggccggcgtgctgtggggaggtgtggcggtgccggccaatccggcgacagcgacgacgagggcgtcggtgtcggcttctaagggtgcgccacccgcacgccaaaatagtgattttcgctga

SEQ ID NO: 24095 - DNA, 4906 bp, Oryza sativa
  Clone ID: PAT_MRT4530_2910C.1
tcagaggacgtagtcgccgatcgaaagcgtgcgtgctcggatgcgcttctcgtggtaacggcgaagggcctgttggtagctggctgctcgaacggcaactcgttcgcgatgttcctcaggtagattcacatcgtcgtatcgcagctcctcctgatcctcatcggaatacttctgtactcgtgtactttgatgtcgtagctcggtggggagcatggcctctgagccgtatacgaggaagaagggtgtctccttgttggacgttgtcggtgtggtacgcacggcccatagtactgatggaagttcctcgacccacttcttgtcgtgtgacatgagcctgtcgtagatgctggtcttgattccttgtagtactatgccgtttgccctctcgacctgtccattgctcccgtttggcgccttcttgtatagatcgttgccgatcatacagtagatttttgctttacgggttattttctcagcttctgcatcgtcctcgggcaactcttcgctacctatgaatttaatgagtggggtgcgccagtcgtctttggtttcgatatcggcaacggcgcattttgcctctgtagcccccgagctgttgttgaggacgactgggctatcttcgccgcttacctctctcactgatggccttgtcaggacgtccagaaaggtgccaggttcgagtggctctcgtctggacgcacgccgtgctagatcatccggctcgatgttgtccttgcggtatacatgtcggacctcgatcccatcgaaccttttttccagcttcctgacttctgcgagatacttggataactcggggctagagcacttgtaatctttatgcacctggttcgcgactagttcggaatcccctttcacgaccagtcgcctaactccgagtgcagctacagctcttatcttggcgagtagtccttcgtactcggctgtgttattgttcgccccgaagttgaggtgaattgcatgcttgaattgatctcccgaaggtgatgtcaagatgaatcctgcccctgctccttggctgttgagtgcgccgtcgaatgccattgtccacgtttcgttgtcgatttggttgtctgacctgttatcaggcatggtccaatcggctacgaagtcgacgagtacctgggacttgatggctgttcgtggcacaaagtggacatcaaattggcttagctcgactacccattttgcaatgcggccaacaacgtctttgtttctcacgacttcaccgagggggaaggaggatacaactgtgaccctgtgggcttggaagtagtggcgtagctttcttgatgtcatgattaccgcgtagagtagtttttggatatgtggatatcttgtctttgcgtcgtggagagcttcgctgacgtagtagactagttgttgcaccttctctctgcttagtgcagccatgcatccggttagcttctgtacttccttgagtcttgtaggcaactttatgttctcgattgccttgatcttctcgggattttcttctattcctctgccagagacgaggaaaccgagcagcttgcccgatggtaccccgaacgtgcacttctctctctgatgaaaccagctttgagaagcttgtcgagctcttctcgtatggcttgttggtgcaaatctccacagtttttgctttactggcttggcgtcgggtcgcaccatgagtttgtgctcaatcacctccctgagtacccctggcatgtcagacggcattttcgcagccaccaccaccaccgacgaggcgacgatgccgacgccgccgacgcggacgacaccgatgacgccggccactggccacaccgccgacagcctcaccaccaccgatgcacgatgcctcgccatgtcgaggctccgcttgtcgcattgcactgccagcttagcattcccttgaatagtgattgttcccttcggtcccggcatcttgagcacttgatacgcgtagtgagatgcggccatgaacttcgcgagtgcagttctcccaatgatggcattgtatgttgtatcgaattcagcgacatcaaaggtgatctgctccgttcggaagttatttgtttggccgaaagtcacaaacaacgtaattttgctcaatggtttggatgatgactgaggagtgattccatggaagggttgatcggtgggtgtcaactcgcttcgtgggatccccattgcgtccaatgtgctggcgaagagaagattgatggagctgccgccttcgatgaggactcgcgctaccttgatattccgaatagtgggttcgaccacgatcggatatcgtcctagggtaacagcagccttggggtggtcctcatctgaaaactcgatcttctgttcagaccacttcatcttgggtgcagcgcttgaggagtacgccgtagaacctccgaagatttgcgagacatgaagatcggaatctgggtacgccgagtccgagtcctgagtggtagcctcggcggctttctcgactactcgtactcgcttgcccttctccaatgccagttacttttcaagcgactttttgaagatgaggcaatcctctagagaatgtctgtccgacttgtgtatggggcaccatattctcttcgtgtcactgccttgtgggtctggatttttgggagggcgctcgtattccgacgtgaggactttcgcttgagctttccttttccactcttgccgcttttcttcttgctcggttcaggtgcgtccttggctggattcttcaatcccccccgtcttcggcttgtcgttcttgcatctcagtgcgtcgtccacgtgagcgcatcgatcaacgacctcgaacaatcttcgagtagttgtgattcgccttgttgccaactcctaagtagtatagcgatctctgacaccggttttcaaagcgcgaatcacagaggcgtcggtgatttcgaggattgtatttcagcactcattaaagcgccgaacatagtccctcaaagattcgcccggattcatggagtagacctgaaggaattcttctgagtcggtactcccatcgtacttctctattgccccgggtcggaatctctcatgccatcggacatcacatagggaacggttgaaagccctacacccggcgctaggggccgtgggttgtcggcgatcgtatgtcctccgtggatgtctatcggatgacgagaatgaagaggatgatgatgatgacgatgggtcactcgggtccggtgtccgattccgaggacgacgtttgggttctcgagagttctgtcgtcgtccaccattgttgtcctggcgtcaatccccattatcatcgctgtcatgtcggcgtcctcgaccagtatcgtctagcgtccgctgtttgcgatcgtcgcggtcgtggcggttgtgacgattatcatggtgtcggtcttcgttcgagcggcctcctcgctcttcgttcttgcgacatcgtgaagagacacgatgtcgggaacaattctcgtcgtctcgcgcgcgtcgtgcttctcggcggtcattcagatggtcgcggagatcgccggtgccgcgaggtggaggggtagctcgtctaggcgacgtccattgctccggtgtttcgctgtcagcgccgccagctgtcgaatgttctggttgtgctctggtagcggcctcctcgaacgcgttactgagattggctaccgattcccgtagtcgttctgtccatcatgcaagatcatcgttaagtacgggataatagggggtttctctcagtattgcgttgatggtgccgaggtgttgggccggcgtgaccgcttgattctccgcctctgtgttagcgtgcgcagacgtgctggtcccaccgatggcaaatacgtcgcgtggtgtactggaggatgatgagccatagtcttcgagcaagtgtaggactgacggctcatggggatcgatgtcgattactccaacgaatcgatccgaaatcagcgccgctccttgttccttgtctgcatccctaagagagatttttgattgctggaccttaggaagcagcgtcttcatggcgcggagaaagaccttgtagcttgagaagtcgtgattcttcattttgtgaataggacaatagacatcacgagttggagaagtacgctgggttccatgctctttgcagtcacgaatcttagcctgtacattgagaaaaacccagtaagcttgcaagttgtgtttcctgcacttgtggataggacaccagggctttgttacctcggaagttgtccttgtcggctcgtggttcttgtcggaaggacaaggtttggccgcactaggaaccttctcgggctcgcatgatgtcgacgttccgttctccactatggcgggaggatctttcgacttggagttgtccggggttatagccacggcgttctcgtttctggccattgatggaccagccgagatcggtaccgtggcgtaaaccgggaagacgatttcgccgacttgagtccacaccagcattgttgaagtagggactccttggatggggctagtgttgacgctgttgtcaacgaaacttgatgtcatagtagtagaagcttgagcaccaaggccccctacctggcgtgccactgtcgacgggggatacccgtagaccggatatagagggtattggggtacgctggtacgaggatctacgtagtacgacatcaaggaaacagaagacaaagattatactgattcaggcccctttataggtaatagccctaatccagttggtatgggattatataatggaaaccacaagttacaaagggaataacagaactcgatgataccgacgagatcgtagttgagttggttcctgtggtggtcttagttctgagattcgatgccttaggttctcccggggggtaccttttataccgcagatcaggtggtctccaag

SEQ ID NO: 24096 - DNA, 2568 bp, Oryza sativa
  Clone ID: PAT_MRT4530_29110C.1
atggctccccgcaagcctaccaaggccgggtcaactggtgaagatcctggaagccttggcgaaggatggttgtgcttcctcggcaaatcacttgtcaaagaggccgacttgggcgaactggtatcatccggttctctcacagagggccaaggatcgtgcaggggcgaggctgttgttccctcgcctagggatgggcgaacagttgtcttcgccgcatacttcaccactgggcttcgcttcccatgcgacaacttactgccttcggtgctctcgatgtatgaggttaggcttccccagcttagcccgtcagcattcccgaacctggcggttttcgcttggatgtgccggacctgtgggttcgcccctaccgccgagctatttgccactctgtttactgcatgcgcctcgaccaaagacgtgcagacgccggcgggtccgaggaaaaccgttttcggctgcatgaacttcatgctgcggccagagcgttcagatgcttggctagtgcctgcatcgatggcgaagtgggacaggaactggatgaagaagtggttctatatcagcaacccctactccgccgaagatgcccaggcgaactggctcctttttgagcgttctgctgtctccatcaacgcgaagccaaacgtggagatcaacgggactctcgagtcccggctcattctccttcgcaagactttggaagatgttgagattgaggcgtcaaagatgatcggagctctaaccacggccgagttcgcccgcttgctccagcgccaagccgacggccgagtgaaccgtgtctatactggcaaattgccaagccgatcgaatccctctcgggccggcgatgacgaggctagcacttcgaaaaagtgcaagcgtgtggtcacgaaaggcggccaagtccgaactcgccgtagcgcgaaggccgccgtcaaaagtgacggggaggaggaagaagaggaggatgcggaggccggttctgaggaggacggctctcatggttatacccctagccctactcctacgaaattcggggcaggctctcatgtttcgcctacgcgaccgcaagatatcgtcatggcgaacaccctcttggtgatctccagcacagccgcgaaaccggtgatggctgttagaaggaaaaagaagaaggggaaggttgtacaggtcggccatggcttttcggacagtgaaggatccgacgggactcctacttcgccggtgttgcggcgcgcaacttcccgtggtaggcgcatgtctccgccacccgctagcgatgccgaagcggcgacgggcgggagtgcctcagccccgacagttggggcaaacgttgctgaggacgaacgggttgatgcggtcccttcacccattcgtcaacgagaggggaaggcctcggtggttgaagcgagcgtttcggacgtgacgcttaccgccccacacttcgtccccgccgacttcgccacgcggccagagatcactccgttcatggacggggtgtgccaggtcataacgccgactgaaggccttgggctcttcaccgaactaaacgagttaggcgaaagctgcgtggctgtggagagcctatttgtgcgaggccttgccgcgcacctaagtgccaagaagtctgccttagagcgactagatgggtaccgccttcgccttcgcaagtccgaagaagatcttcgccacaaggaagacgaaagacgtgtagtggtggagactttgaagcagtcaaatgctgaaaataggtctctccgctctaaccttaaagcagcacgcaagcgggacgccgaacgagatcgacaacttgtttcggccgaggagaagattaaatccctcgaagcccgtcttgcgtcggccgaagctactgccgcgaccctggtaccagccacagagtctgccaaggaggcctgttacactctccggctggcccttaacgaccttggggcgcgggcggaaggtgctccgggcgaaggcgggactgcactcgatttctccgaatggacgcaggaggcggccggctcggttgtcgaagtggcaggcgcctacggggactgttgcactcgtgtttcggcgggattcgttctcagcctcttgcacgcgcacggctgcgaccacatcgggaactttcccgatttcgtgaaggaagaatggcctagcaacacgcaatgctccggagctgcgttaagggcctttcggaaggggttttgggaggatggcgaccgggattgtgcaaagattcgacttcgcgagaaccttgaaaggattgcgaggaacgaggaggctgctactgccaactccgaaaaagatctcgggccgtcggaacggtcccccgggcacgagggcgaaggcgtcggaggccaagaccaccctgaggcttgcgaccgaaaggtatgcgatcgacctcccgctgaaaattggcgaaacagtaacgagaagttcgtggcgttgaagggtttgccaaaggtgcgatgcccatttcggcctgtctatcgcaaaatggtgataaacagccgcagctataaggtgttcaaggtcgccggctggatgcgggcacaccccgggtga

SEQ ID NO: 24097 - DNA, 900 bp, Oryza sativa
  Clone ID: PAT_MRT4530_29111C.1
atggtgaaatgggacaggaactggatgcagaaatggttctacataaacaacccctactccgccgaagatgctcaagcgagctggctgctttttgagcgttctgccgtctccatcaacgtgaagccgaacatgcaaatcgacgggactctcaagtcccggctcattctccttcgcaaggttgcccggcggctgagcactcgggacctttgcgaggagttttgcctccttcggatttctcctctcgccctgcggacattggaagacgctgaaattgaggcgtcgaagatgatcaaggctctaaccacagccaagtttgcccgcttgcaccaacgccaagctgatggccgagtgaatcgtgtctatactggcgaattgccgagccgatcgaacccctctcgggccggcgatgacgaggctggcacttcgaaaaagcgcaagcgtgcggtctcgaaaggcagccaagtccgaactcgccgtagcgtgaagaccgccgtcgaaagcgatagggaggaggaggataaggaggatgctgatgccggttctgaggaggatggctctcgtgccgcgaaactggtgatggctgtcagaaggaaaaataagaaaggaaaggtcgtgcaggtcggccatgggttttcggacagtgaagggtccgacgggacccctacttcgtcggtgttgcgacgcgcaactttccgtggccttgccgcgcatctgagtgccaagaagtccgccttagagcaactagatgggtatcgccttcgccttcgcaagtccgaagaagattttcaccacaaggaagacgaaaggcatgtggtggcgttgaagaaggcgaatgtcgaaaacaggtctctccgctctaacctagaagcatcacgccagcgggacgccgaacgagactga

SEQ ID NO: 24098 - DNA, 1683 bp, Oryza sativa
  Clone ID: PAT_MRT4530_29112C.1
atggctccccgcaagcctaccaaggccgggtcaactggcgaagatcctggaagccttggcgaaggatggtcgtgcttccttggcaaatcacttgtcaaagaggccgacttgggcgaactggtatcatccggttctctcatagagggccaaggatctgcggactttggaagagctgaaattaaggcgtcgaagatgatcggggctctaaccacagccgagttcgcccgcttgctccagcgccaagccgacggccgactgaatcgtgtctataccggcgaattgccaagccgatcaaacccctctcgggccggcgatgacgaggctggcacttcgaaaaagcgcaagcgtgcggtcgcgaaaggcggccaagtccgaactcgccgtagcgcgaaggccgccgtcgaaagtgatggggaggaggaagaggaggatgctgatgccggttctgaggaggatggctctcatggctatacccccagccctacccctgcgaaatccggggcaggctctcatgtctcacctacacgaccacaagatatcgtcgtggcgaacacccttttggtgatctccagcacagccacgaaaccgatgatggctgtcagaaggaaaaagaagaaagggaaggttgtgcaggtcggccatggcttttcagacagcgaagggtccgacgggacccctactttgccggtgttgcggcgcgcaacttcccatggcaggcgcatgtctccgccacccgctagcgatgccgaagcggcgacgggcgggagtgcctcagccccggccgctagggcgaacgttgctgaagacgaactggtcgatgtggtcccttcacctattcgtaaccgagaggggaaggccccggcggtcgaagcgagcgtttcggacatgactcttaccgccccacatttcgtccccgccgacttcgccacgcggctggagatcactccgttcgtggacggggtgtgccagtccgaagaagatcttcgccacaaggaagacgaaaggcgtgtggtggcagagactttgaagaaggcgaatgctgaaaatagatctctctgctctaaccttgaagcagcaagcaagcgggacgccgaacgagaccgacaacttgcttcggccgaggagaagattaaatccctcgaagcccgtctcgcgtcggccgaagctactgctgcgaccctggtaccggccacagagtctgccaaggaggcctgttacactctccggctggcccttaacgaccttggggcgcgggcggaaggtgctccgggcgaaggcaggactgcactcgatttctctgaatggacgcaagaggtggccggctcggttgtcgaagtggcaggcgcctacggggactgttgcgctcgtgtttcggcaggattcgctctcagcctcttgcatgcgcacggctgcgaccacatcgggaattttcccaaattcgtgaaggaagaatggcctagcaacacgcagtgctccggagctacgctaagggcctttcggaaggggttttgggaggatggcggccgggattgtgcaaagattcgactccgcgagaaccttgagaggatcgcgaggaacgaggaggccgctgccgccaactccgaaaaggatcccgggccgtcggaacagtcacccgggcacgagggcgaaggcaacggaggccaagaccaccctgaggtgtga

SEQ ID NO: 24099 - DNA, 147 bp, Oryza sativa
  Clone ID: PAT_MRT4530_29113C.1
atggacacgatcggaggagccgccgccaccatcggccacgaccggcgcaaccttgaaatccacaatcaaggtggtgtctctctgcacagcaactacagtggtctactcttcaacatggcagctatattctcatgggtcgcgaggtaa

SEQ ID NO: 24100 - DNA, 2175 bp, Oryza sativa
  Clone ID: PAT_MRT4530_29114C.1
atggctccccgcaagcctaccaaggccgggtcaactggcgaagatcctggaagccttagcgaaggatggtcgtgcttccttggcaaatcacttgtcaaagaggccgacttgggcgaattggtatcatccggttctctcacagagggccaaggatcgtgcaggggtgaggccgttgttccctcgcctggggatgggcgaacggttgtcttcgccacatacttcgctgctggtcttcacctcccgtgcgataacttcttgccttcggtgctttcgatgtatgagttctacatcagcaacccctactccgccgaagatgctcaggcgagctggctactttttgagcgttctgccgtctccgtcaacgcgaagccaaatgtggagatcgacgggactctcgagtcccggcttattctccttcgcaaggttgcccggcggctgagcacccaggatctttgcgaggagttttgtctccttcatatttcccctctcgcccgtgtgtgggacatttccgtgaacgagggcgaagaagttcttaggcttccccgcctagttctccccgccggggccgaaagtaaggctgggacttcgaaaaagcgcaagcgtgcggtcgcgaaaggcggccaagtccgaactcgccgtagcgcgaaggccgccgtcgaaagtggtggggaggaggaagatgaggaggatgttgatgccggttctgaggaggatggctctcgtggttatacccccagtcctacccctgcgaaatccggggcaggctcccatgtttcgcctacgcgaccacaagatatcgtcgtggcgaacacccttttggcgatctccagcatagccacgaaaccggtgatggctgtcagaagggaaaagaagaaagggaatgttgtgcaggtcggccatggcttttcggacagtgaagggtccgacgggacccctacttcgccggtgttgcgactcgcaactttccgtggcaggcgcatgtctccgccacctgctagtgatgctgaagcggcgacgggcgggagtgcctcagccccggccgctggggtgaacgttgctgaagacgaacgggtcgatgtggtcccttcacctattcgtcaacgagaggggaaggccccggcgattgaagcgagcgtttcggacgtgacgcttactgccccacatttcgtccccgccgacttcgccaagtggccggagatcactccgttcgtggacggggtgtgccaggtcatagcgccgactgaaggccttggactcttcatcgaactgaacgagttcggcgaaagctgcgcggctgtggagagcctatttgtgtggggccttgccgcgcatctgagtgccaagaagtccgccttagagcgactagatgggtatcgccttcgccttcgcaagtccgtagaagatcttcgccacaaggaagacgaaaggcatgtggtggtggagactttgaagaaggcgaatgccgaaaacaggtcactccgctctgaccttgaagcatcacgcaagcaggacgccgaacgagaccgacaacttgctttggccgaggagaagattaaatctctcgaagcccgtcttgcgtcggccgaagctacggccgcgaccctggtaccagccacagaatctgccaaggaggcctgttacactctccggctggcccttaatgaccttagggcgcgggcggagggtgctccgggcgaaggcgggactacactcgatttctctgaatggacgcaggaggcggccggctcagttgtcgaagtggcgggcgcctacggggactgttgtgctcgtgtttcggcaggattcgttctcagcctcttgcacgcgcacagctgcgaccacatcgggaattttcctgatttcgcgaaggaagaatggcctagcaacacgcagtgctccggagctgcgttaagggcctttcggaaggggttttgggaggatggcggccgggattgtgcgaagattcgactccgcgagaaccttgagaggatcgcgaggaacgaggaggccgctgccgctaactccgaaaaggatcccgaccgtcggaacggtcacccgggcacgagggcgaaggcgaaggaggccaagaccaccctgaggcgtgcggccaaaaggtttgcgttcgacctcccgctaaaaattggcgaaacagcaacgagaagttcgtggcgttga

SEQ ID NO: 24101 - DNA, 463 bp, Oryza sativa
  Clone ID: PAT_MRT4530_29115C.1
tcgattaaatcatccatcgccgcttgcgactgcgagcggcgcctccgccggcaccaccgccgtctgccaccgccaccgccgccgtctgccaccgcgcctccgccgtcgccctctgttgtcgacgttctactcccttggatctacacacacctttctgtttcgctcctgatccatgcccaaatcttgtatattacttgcgcctcaaacatgtttgggttgacgtcttggtttggttccattctttttgttattttttttttcttcttttttttttttttttttttcttttttttttgccatgtctttttcttttctttttgtattatttttctttttttatttgtttttattgttttttgctttctcatttttttttttcttttatcttctttctttctcttttcttttttctttttttttttgttatttttcttctttttttctccttattttatattttact

SEQ ID NO: 24102 - DNA, 2394 bp, Oryza sativa
  Clone ID: PAT_MRT4530_29116C.1
atggcgaacggcggcggcatgcggtcgccggcgacggcaaccggcggcgtgggaggcggcggcgggcggcgcgaaaagtggtggcagcggccgaagccaaacgtggagatcgataggactctcgagtcccggctcattatccttcgcaaggttgcccggcggctgagcacccgggatttttgcgaggagttttttctccttcggatttcccctctcgcccgtgtgtgggacatttccgtgaacgagggcaaagaagttcttgggcttccccgccttgttctccccgccggggccgaaatgcggactttggaagacgctgagattgaggcgtcgaagatgatcggggctctaaccacagccgagttcgcccgcttgctccagcgccaagccgacggccgagtgaatcgtgtctataccggcgaattgccgagccgatcgaacccctctcgggccggcgatgatgaggctggcacttcgaaaaagcgcaagcgtgcggtcgcgaaaggcggccaagtccgaactcgccgtagcgcgaaggccgccgtcgaaagtgatggggaggaggaagaggaggatgcggaggccggttctgaggaggatggctctcatggttatacccccagccctacccctgcgaaatctggggcaggctctcatgtttcgcctacgcgaccacaagatatcgtcgtggcgaacaccctcttggcgatctccagcacagctgcaaaaccggtgatggctgttagaaggaaagagaagaaagggaaggttgtgcaggtcggccatggcttttcggacagcgaagggtccgacgggacccctacttcgccggtgttgtggcgcgcaacttgccgtggcaggcgcatgtctccgccacccgctagcgatgccgaagcggcgacaggcaggagtgcctcagccccggccgctggggcgaacgttgttgaagatgaacgggtcgatgtggtcccttcacctattcgtcaacaagaggggaaggccccggcggttgaggcgagcgtttcggacgtgacgcttaccgccccacatttcgtccccgccgactttgccacgcggccggagatcactccgttcgtggacggggtgtgccaggtcatagcgccgaccgaaggccttgggctcttcaccgaactgaacgagtttagcgaaagctgcgcggctgtggagagcctgtttgtgcagggccttgccgcgcacctaagtgccaagaagtccgccttagagcgactagatgggtaccgccttcgccttcgcaagtccgaagaagatcttcgccacaaggaagatgaaaggcgtgtggtggcggagactttgaagaaggcgaatgctgaaaacaggtctctccgctctgacattgaagcagcatgcaagcgggatgccgaacgagacagacaacttgcttcggccgaggagaagattaaatcccacgaagcccatcttgcgtcggccgaagctactgccgcgaccctggtaccaaccacagagtccgccaaggaggcctgttacactctccggctggcccataaggaccttggggcgcgggcggaaggtgctccgggcgaaggcgggattgcactcgatttctccgaagtggcaggcgcctacggggactgttgcgctcgtgtttcggcgggattcgttctcagcctcttgcatgcgcacggctgcgaccacatcgggaattttcccgatttcgtgaaggaagaatggcctagcaacacgcagtgcttcggagctgcgttaagggcctttcggaagggtttttgggagtatggcggccgggattgtgcaaagattcgactccgtgagaaccttgaaaggatcgcgaggaatgaggaggccattgccgccaactccgaaaagggtcccgggccgtcggaacagtcccccgggcacgagggcgaaggcgacggaggccaagaccaccctgagcatgcgttcagccgaaaggtttgcgttcgacctcccgcgaaaaattggcgaaacagcaacgagaagttcatggcgttgaagggtttgccgaaggtgcgatgcccatttcggcctgtttatcgcgaaatggtgataaacggccgcagctataaggtgttcaaggtcatcggttggatgcgggcgcaccccgagcaaaccatagaagactacgaccttgttcatacaagacgactggaggatatggttcgcttttggcgaaaccatcagaagactgatcggcaggatttaatcttccagtgtcattacagtctagtctgtatttcgcctccttcccctcttagggtcgtgtatgatattagtagtgatgacgaacctagttcgcctgatcttcccttagagggagatattgatcgtgggggcgaagatgttatttatctgtaa

SEQ ID NO: 24103 - DNA, 852 bp, Oryza sativa
  Clone ID: PAT_MRT4530_29117C.1
gcacgaggctctcccctactccggcgccctcccctccttatcatccgcacccacctcctccatcctgctataaaccaaccccaagatttgtcaccctccggcccgggcggccgctccaatcccaatccaagcctgaatcctcttttgatgtgatggcagtggagcgcggcgagcgccgtggcggcggcattgggtgcctctcctgctgcttcggcggcggggacggggacggggaaggagaggagctggggcagcgcgcggcgagggcgctgcggacgtcgtcgcggtgggtgcgggaccgcgccgtggagctgccggagatggtggcgctggccggggggcggcggaggaagccgcatctgcagcatcagcagcagcagcagctggccggggagttccgctacgaccccgtcagctacgcgctcaacttcgaggaggacggcgacggcgaggcccagccgttcaagtacatggccttctccgcgcggctgccggcgtccccgccgccgccgccgccgccgacggcgctgcccgtcgaccggggttcttgaattgattgttaggccgttcggatgtacatacgtacgggagattaaagtttgggtttctttctcttttttttttgttgtttgattccttcgatttttgttggcgactacgagcgctgatatgtgtacaggaggatttgaatcgtttcttcttttggtttttttaagcagagatttccttttctattacaagttatcttggctctgaagaacgttgtttttttgttttagtgctagtatatgcttctgagaagaatgttgtttattggggtagcaaaatctcaagccattgccttgttctttg

SEQ ID NO: 24104 - DNA, 1161 bp, Oryza sativa
  Clone ID: PAT_MRT4530_29118C.1
atggagtctgcgacggcgcagaggccttcccctctcccccagtttcttcctagcggcgccaccgcgccagtggctgtggctcagaggtttggtcgaagggcctcatgccatatcgccaacaagcccctcacgggcaagggtgagataggagcttcggccgagaccgtgcaaaccatgtggtatggccctttgggtttttccttctccggttatatatgcccccaaaccggcctgccatttttcactctccccgtgctcttcccctttttaccgctttacacgctccgtgctctcttcgctctcctgttttttagctttttcgccatcgtcgtgctcctagcctttcggctttttacctctctttcctatgctacaagcctaatggctccccgcaagcctaccaaggccgggtcaactggcgaagatcctggaagccttggcgaaggatggtcgtgcttccttggcaaatctcttgtcaaagaggccgacttgggcgaactggtatcatccggtcttctcatagagggccaaggatcgtgtgggggcaaggctgttgttccctcgcctggggatgggcgaccggttgtcttcgccgcatacttcgctgctgggcttcgcctcccatgcgacaacttcttgccttcggtgctttcgatgtatgacgttaggcttccccaacttagcccgtcagcgttcccgaagatggcggttttcgcttggatgtgccggacctgtgggttcgcccctaccgccaagctattcgccgctctgattactgcatgcgcctcgaccaaagacgtgcaaacgccggcgggtccgaggaaaaccgttttcggctgcgtgaacttcatgctgcggccggagcgttcagatgcttggccagtgcctgcatcgatggcgaaatgggacaggaactggatgcagaaatggttctatatcagcaacccctactccaccgaaaatactcaggcaaactggctgctttttgagcgttctgccgtctgcatcaacgcgaagccaaacgtggagatcgacgggactcttgagtcccgactcattctccttcgcaaggttgcccggcggctgagcacccgggatctttgcgaggagttttgtctccttcggatttccctctcgcccgtgtgtgggacgtttctgtga

SEQ ID NO: 24105 - DNA, 1079 bp, Oryza sativa
  Clone ID: PAT_MRT4530_29119C.1
ccccccgccggccccccccgcctgctttttctttttttttttttttttttctttttttttcttttttttttttttttttttttttttttttttttttcttttttttcttcttggaagaggcgtactttctaattgagcattctaactatccacctcatcaatcgtggatttatgttacaacaagctcacccaacaaattaccacggacagtggaaatggaccaccaaacagcgaaaatgccggtcattcagagtacttatgtacagacgggtaaacacgttgcttcgactgcaactatcaccaaactttctactacctagttaacgacgagaaacttagctgccaccccctccggcctcgccggcgcggccagcggcggccgccgaggcgaggcggcgagcatcgagagggcggccctcgcggtcgccttcttggcgccggcgacgacggccttggggcaatgccggcgcggcgacaggacgcgcccgcggtgcgcgtccaggcctcccccgcagctctgcgacggcttgaggcgcttcctcggcggcttcgccaggtcctccagcgaggcgaccgccgccagcgacgcgaacgactgcgactttccgtcgaagaaccttgacaaccccctcttgaacgggagctgcgtcatgaggtcggacatctcgaagcggcgctccgccgagctggaggaggaggaggagctcgcgtcgtcggcgagctccgaggacgaccccgacgaccgcgccgagctccccgccgacgtggacggcgacccgatatcctcctcctgctcctcgcaatccgccgcgccgccgcgccggcaccacgcgtacgcgtccatgtatatatccccaactcttgactctccccgaccaacgccgatctcagatcaaggcaagcgaacgcagctcagatcgatcaaagcaacaaccgagccgtgtcgtcgtcgactggtggaaagaaggcagctggtacaaattataaaggtgtggaggaggaggaggagaccgtggccgtggtggcgaggtgagcctcggctggcagaggaggataagaacgagcgagaaccctcgtgc

SEQ ID NO: 24106 - DNA, 1482 bp, Oryza sativa
  Clone ID: PAT_MRT4530_2911C.1
aagatgggaggtgaggaacgctgtgaagacaaaaaacgggcggaacgggacagcaggtcggacaaacatgtgaccaccagggacacaacaaatgacagccgggccccgagcacacggcgagcagcgaagggaaccaagagagacaactccgcgacaaacaagaaggcgacaacaggggagaacacgagcgcgagaagaacccatccgggcaccggcggacaagccgggcaaaacaggggagaagggatagccgccaaccagcccgcccccgagaaggcggcgaagccacgaaacaaacagagaaacaaaaaaaagaaggacgccgcgctcgccgcggcggcggccgtcgcgcgcctgcgcggccgcctccgcgtccgccgcgccgccacggggctcccggtctccgtccggtggttcatcggcgagggcggcggcggcgacgacgacgacgacgacgagcagcaccagcataggaaggggaaggggaaggtcgacggcctcgcggtgcgtgagggcgtggagttctacagcaacggcgactgctacgagggggagttccacagggcgcggtgcagcggcagcggcgtctacaacttcttcggcaagggcaagtacgagggcgactgggtcgacggcaagtacgacggccatggcgtcgagagctgggcgcgcggcagccgctaccgtggccagtacaggcaaggcctccgccacggccacggcgtctaccgcttctacagcggcgactgctacgccggcgagtgggccgccggccagagccatggcatcggcgcccagacctgctccgacggcagctcctacgccggcgagttcaagggcggcgtcaagcacggcctcggctgctaccatttcaggaatggtgatcgatactcgggggagtacttcgcggacaggatccacggctttggcgtgtacagcttcgccaatggccattgctacgagggctcctggcacgaaggcaagaagcaggggttagggatgtacacgtttcgcaacggcgacaggcggtccggcgaatgggacgccggtgctctcaagaacccattgccgctctccgatcaggccgtgcagcgtgccgtgctggcggcgcaacgggcggcggagaacgccttccacctcccgagggtggacgagcaggtgcaccgggcggtcatggccgccaatagggcggccacggctgcccgggttgcggcgatcaaggcggtccagaacaggatcgacggcaaattctgccacaccgatgtgtgagtgagtgtgtggtgaagaaaccatggctttccttccttctaactgtacattagggtagcgaaggacaataactaatcggttgaggttcagttcagacgaccggagcaagcacaaccgcttgccccgagtcagagagttcagcaaagaacgggagccgccgggagagcggagctgacaattttgtttcgcaaaacagctcagaatctgcaacat

SEQ ID NO: 24107 - DNA, 2165 bp, Oryza sativa
  unsure (1)..(2165): unsure at all n locations
  Clone ID: PAT_MRT4530_29120C.1
ccgcgcgagcgttctggttccgcctcgccgcctcgcccctctcccccccccacccccccgcgaccgcggggccccgaggcttccagaagcttccagggtcctcccctcccagatcgccccgccctccggagctcagcgggggcggccgcgggtggcggacggacggacggacggacgccggggtgggggcggctagggttagggatccgggggtggtggggtgggggtgctgcggcagcgggtgggttcgagaaggaggatgcatatgatgcggcggctcaagagcatcgcctccggccgctcgtccgtctccgatccgggtggtgattctggcaccaaaagaccaaaattcgatcaggatggagcaggagatatagtcattgagccacatctaactgatgacaaacctatgcgcgtagaccaagaatcatcttcatctcatagagatgctgaggcaagcacatctactagtaagaatcctggtagaactgaagaagcaggtgcggatattcttccaaaagaaatgaatgagatgacaataagtgatgataaagttgatggccataatgataaggaatctgaaggtgttattgttaatgcaaatggaacagaaacaggtcagattattgtgacatcaattggaggtcaaaatgggaagccaaagcagaaggtatcatacatggcagaacgtgtagttggtactggttcatttggtgtagtttttcaggccaagtgcttggaaactggagagactgttgccattaagaaggttctgcaagataaaagatataagaacagagagctccaaacaatgcaactgcttgaccatcctaatgtggtccagctaaagcatcacttcttttcgacgactgagaggggtgaagtttacctcaaccttgtacttgaatatgtctcagagacagtttatcgtgttgctaaatactacaatcggatgaaccagcgtgtgcccatattgcatgttaagctgtatgcatatcagatgtgccgtgcccttgcatatatccatcgtgttgttggtgtctgccatcgagatattaaacctcaaaatctactggtcaatcctcatacacatcaactgaagctttgtgattttggaagtgctaagaaattggttcctggtgaacctaacatatcatacatttgctcgcggtattatagggctcctgaactaatatttggagctacagagtataccacagcaattgatatctggtctgttggttgtgtactagctgagcttctgattggtcagcctctgttccctggagaaagtggtgttgatcaactggtggaaataataaagattttgggtacaccaactagagaagaaatcaggtgcatgaatccaaactattctgaattcaaattccctcagataaaagctcatccatggcacaagctttttggtaagcgcatgccacctgaagctgttgatcttgtgtcaaggttgctgcagtactcgccaaatttgcgttgcacagctgttgatgcttgtgctcatccattctttgatgaactgcgggatcccaagacctgcttgtcaaatggacgatcattaccacccttgttcgacttctcagctgctgaattggaaggccttcctgttgagctagtccaccgaatcattcctgaacatatgaggaagtgaaacggaatggcaggaaaacacaatttcgctgttagaacagcggataggtgtgagtgagatggttgatgcaaacatccataacttatggatggatcaggagtagactagattcactgccttgctagatgtggaaagagggatgctatagaagttcctcatcatcacttcacataaagagcgaggcagtggctcattctgatgcaattccaagaggtaatgagcaactgagattggcacggcaactcgcacattttcatcatgtgccaccagagacgtttatctactaggctgctgttgtataatcaggtacatgctgagtttgcagttgtttgtagacacttgtttccctgaacaagcgatgagagaaatccagattccaaagtgcttgctttgctatcaaaaaaaaaaaaaaggaaaatgtcaattttgattagtgcacgcaatggcctttcctttatgtttcagaagtctgatcccngcgnacgcgtgggcgggc

SEQ ID NO: 24108 - DNA, 1508 bp, Oryza sativa
  Clone ID: PAT_MRT4530_29121C.1
atgaggaaggcggcggcgctggcgtccgcggcgatggccgcagcagcagtagcggtagtctccacggtgttgcaccagaggcaacgtcgggcggcgaagcggtcagagcgcgcggaggccgtgctgctgcggtggatggaggggtctataaatactacactttcttcagccagtgcatggagagcactctgagtgacatgcttgggcaggagctggccccctctgttatgatcaagcatgtcaatgatggctcaggcgttggggcagctctcctggcagcctgttattgtcaatacctccaggctgaatctgcagatagttcataatattctaaaaaaaagaagctgaatctgcagatagctcttaattattctgaaaaaactgtcaaaaaataatattctgaaaaaaaactgtgtattaaggtgataaacattaggttttggagcaatttttttttaagatagtggattaaaccggcctctacatccaaccgagattctagagcaataccaacatatacagtttgcctatgggctaaacaagtgaaacaaaaatcattggcatctggcactcttatcaagtggacgaagagttttgcaattgatgaaatggtcggcaaggatgttgtggctgaattaaacatggctatcagaagtcaaggacttgatatgaaagtcacagcattggttaatgatacagtagggacattagctgctgggagatatgtgaatcatgatactattgctgctgttatactgggaacaggtagtaatgcagcgtacatagatcatgcagatgcaattccaaaatggcatggatccctgcccaagtctggaaatatggtaataaacatggaatggggtaactttaagtcctcacatcttccacttactgaatttgatcaagagttggatgcagaaagtttgaaccctggcaaacaggtttacgagaaatcgatttctggtatgtatatgggggaacttgttcgaagaatcttactaaagatggctcaagaaactcgcatttttggtgataatatacctccaaaacttgagagaccatacatcttaaggacacttgacatgctgatcatgcatcatgatacatcatctgatctcagaacagttgccaacaagttgaaagaagtcttggggatcgaatatacctctttcacgacgaggaaactggttttggatgtttgtgaggccattgcgacacgcggtgcacggcttgctgctgctgggatatatggcattatccaaaagcttggtcagcattctgacagccccagtacgagaaggtccgtgattgctgtggatggaggggtctataaatactacactttcttcagccagtgcatggagagcactctgagtgacatgcttgggcaggagctggccccctctgttatgatcaagcatgtcaatgatggctcaggcgttggggcagctctcctggcagcctcttattctcaataccaccaggctgaatctgcagatagttcataa

SEQ ID NO: 24109 - DNA, 3051 bp, Oryza sativa
  Clone ID: PAT_MRT4530_29122C.1
atggcgtcgtcgagttcctcatcgttttcgagcgtgttgggtcatcctgtctcagaaaagctgaccagagacaattatttggtatggcgtgcgcaagttttgccggctgtgcgtggggtacaactcactggtttcttggacgatacaaaggaggtgccgtcaccgatgatcagcgtcgtcaagaaagtcgatgacaagatcgtgaaggagatgatcgacaatccggcgtattctcggtggattgctcaagatcaacaagtcctgggatatctcctctcatctctcacacgagaggtgcttgttcaagtggcacatctagatagtgccagggaggtatggactgcaatcggggagatgtactcctcgcaatcaagggaacggattattcagatccgttcgcagctagcaagagagcagaaaggagattcttcggctgctgtatacttcaccaagatgaagagcttggccgacgagatggcggcggccgggaagaagctagatgatgacgatgtcatctcatatatccttgcagggctagatgcagattataatcctcttgtcgcatcagtttctgctaaagattatgtgtcattgagtgatctatatgcacaactactctcgttcgaggcacatctcaagctccaagctgatggaggctatcaatcttctgcaaatactgcctcacgaggaggctatcagaatcgtggccatgggcgtggtggttttgttcgcggccgtggtggacgaggtcatggtggtggcgaagatacacgtcctgtgtgccaattgtgcagcaagattggacacactgttcaatcttgttggaagagatttgatcgatcttacagaggagatgaaagacaagttcagaggtcagcctcttctgctatggcatcatcatatggtgttgacacaaattggtacgtcgacacggctgccactgatcacataacttcagaacttgataagctgacaacgaaggagaaatatcatggtagtgatcaagttcatgcagcaaatggcacaggatcaggtcacgaagacaacacttcttcaagcaaaattcttagagaaaacaatgttactgttagtgagcctcatagagatgtggtgtgtgatgcttgtcaacaagctaagagtcatcaattaccttttcctaaatctactagtcggtcatctgctcctttagatctagtgttctcagatgtttggggtcctgcacctcaatcagtagggagattcaagtattataataagtctgatgttttctcagtcttcacaaatttccaacatcttgtagaacgacagtttaataggaagattctgtctatgcagacatattggggtggtgtctactcgaaggatacaagtgcctcgatatttcctctggccgtgtatatttctagagatgttgtctttgatgagacaatatttccttttgttgatcttcatcctaacgcaggagccttgcttcgatcagagatctgtcttttgccctcttctttgttaaattctaggggtatgcatgatagtgattccatgttgattaatgctactaatcctggagatacaagttctgttccagctatgcagggttctggtgaaaatttggagcaaatcaatgaagatttggctcatgattttgtgtctactactactggacaccacgacgggcaacctgagtttgcttctcctgctcatgtgcacagtcaggacaatatagatggcgagtctgctgctgatatgtcgggatcggggttttctgctgcacctgcctcggaatcttctgtgcaagatgaatcaaatactgatcaatttataagcactcggcctcacacaaggttacagagtaatattcggaagcctcgaatatggacagatggtactgttcgatggggtatggtcagtacttctgaagagcctacaaatttggcagatgctttgcgagatagtaattggaaaaaggcaatggatgaagaatattttgctttaatggaaaatcaaacatggcatttagtaccctatcagaaagtagtcagttcctcagataaggcagtgtcaactttacttcaagatcttcgtagtgattttgctcttaaagatctcggaaagctgcactattttttggggatagaagtgacttcgatttcagaaggtctgatcttgtcacagaagaaatatgcaaatgaattgttaaaccgtgcaggtttgaaagagtgtaaacctgtcaatacaccgctctctatatcagaaaagttctcagcatcttcagggaaattgttgagtgataaagatagtactaactacaggagtgtagttggtggtcttcagtacttaacattgacccgtcctgatatagcgtttgcagtcaacaaagctcgtcagtatttacattgtccaacaactaatcattggatagctgtgaagaggattctaagatatataagtggaaccgtggattttagattaagattcacaaaatcagaatcaaacattgtcagtggtttttctgatgcagattgggctggttgttctgatgatagaagatctactggaggatttgctgttttttatggctctaatttgatttcatggactgctcgtaaacaggctacagtgtctcgatctagtacagaagcagaatataaagcattggcgaatgctacagctgaaattatatgggtacaaactttgcttaaggagcttggagtttctcaaccgaaagcggcattgctttggtgtggcaatattggagctacatatctttctgcgaatccagtgtttcatgctaggacgaaacatatcgaggttgattatcacttcgttcgagagcgtgtggctgagaaatcactagagattcggtttatttcatcaaatgatcagcttgctgatggttttaccaaagcccagtcattgaacaagttgaataatttcagaaacaatcttaacttgtgcccgattaaatcagatatgtcctgcttgtttgacccaccaactaagagcatctccaacagtctctccaaacacctatatagtcagctctccaattga

SEQ ID NO: 24110 - DNA, 402 bp, Oryza sativa
  Clone ID: PAT_MRT4530_29123C.1
aggtccggaatcgacggacggacccacgcgtgcgaccacgcgtccggctaggtctatgattaggttaaaggtaataaacatggaatggggtaactggaagtcctcacatcttccacttactgaatttgatcaagagttggatgcataaagtttgaaccctggcaaacaggtattacccttatgttgttgctcccttttgtgggtacatgactcatgataaggatattgccctaccaggtttacgagaaatcgatttctggtatgtatatgggggaacttgttcgaagaatcttactaaagatggctcaagaaactcgcatttttggtgataatatacctccaaaacttgagagaccatacatcttaaggacacttgacatgctgatcatgcatcatgataca

SEQ ID NO: 24111 - DNA, 570 bp, Oryza sativa
  Clone ID: PAT_MRT4530_29124C.1
atgacggagcgcggtgttcctcaccgggagaccgcacgggcccccctttgccggttcggccgggggctcagggatggggcgaagcgtgcgtctgaccgcctgtcgccacctaacccgcgatttgaccggtctgtgactggattggttcgccgcacctgcgcttcgccgaccaccaccacgatgctgctgtcgcgaagagagatactggagcggtcggcggcggcggcggagggtcagggacgccgagctgtccgcgctcgcgtcggccaccgtgaccgccctcgccgccgtgttccgggagccgtcccggctccgtcggacgcgtcgtcgacggcgggggtggcgcggagtggggcttgccacgccgcggccctgcgacctagccttcgactccgacggcggctcgccgcgggccacgtggggtgcatcgtcaagaagctcagcggcacgtcgtcgccgccgctgctgtcctcgatccgcgacgggaggtctcgggagctgccaccgccgccgtcgtcgacgacgcagctcaactacgcctggactaggaagatgcaatccagcttttag

SEQ ID NO: 24112 - DNA, 1096 bp, Oryza sativa
  Clone ID: PAT_MRT4530_29125C.1
ggcgctctaaactagtggatccccgggcggcagcccctggcaaaaccggccgggaccaaaggagagacccgagtcagattggggatcgacgaaggtggggaggggcgaacgccatggacgaggaggagcacgaggtgtacgggcaagagatcccggaggacggggacatggacggcgcggacgtcgacatggcctccggcggggacgacgccgcgaagctgcaggagctcgaccagatgaagcgaaggctgaaggagatggaggaagaggccgcggccctccgcgacatgcaggccaaggtcgccaaggagatgcaaggtggtccgccgggaggagatcctagcgcgtctacagctgaggcaaaggagcaggtggatgctcgatctgtgtatgttggaaatgttgattatgcatgtaccccagaagaagtgcagcagcattttcaagcgtgtggcacagtcaatagagtgacgatcttaactgacaagtttggacagccaaaaggttttgcttatgtggaatttctggaacaagaagcagttcaggaggctctgaatttgaatgaatctgaactgcatggtcgtcagataaaggtggcaccaaagaggactaatgtccctgggatgaagcagcgtccaccgcgtggatacaatccttatcatggttacccatatagatcgtatggggccccatatttcccaccatatggttacgggagagtccccagattccgccgtccaatgcgctacaggccatacttttgaagtaagaggttttcatgacgtggaacacacaccaagcctagtcgctagtcagccaagtcggtcccagaaataattctactatctggtattttagtttcccagcagacctgctgggtgaatgcttccacccccaccatattccattttggtaacgtccgctcactagttatcagtatcttgtatcgttggttctgcagtacgcaaaacgtagtgttatcttattatattatatatacctgcatcatatgatattggtttgccatacttggtaatatgtctggatataagcgtgggattgtgatggttgattacaaaaaaaaaaaaaaaaaaaa

SEQ ID NO: 24113 - DNA, 2868 bp, Oryza sativa
  Clone ID: PAT_MRT4530_29126C.1
atggcggacacggggagcctggagaagatggggcgagagctcaagtgccccatctgcctgagccttctcagttcggcggtatccatctcctgcaaccacgtcttctgcaatgattgcctcacggaatcgatgaaatccacgtcgagctgccccgtgtgcaaggtcccgttccgacgacgagatggatcagattgtgtcaacagcgggaaaaattccaaaaggtcacaaaaatcattgacacgaaaaaggaaggtaacatccgagatggaaaaaaatacagcaaaggatgctacagcttctgcatcccaacctactacaaagccttccttctctactaacaaaagaatacaagtgaaaccattccctgaatctgagacaccaataagagctgagaagattatgaagcctgaagagccaaaaaataatctgaataatgatgttgaaggaaagaataaagcagtggcatcgggtcaacctggaagtccttcattgtcaccctttttttggctaagggaacaagaagaacaagaaggctgtaccgctgagacgttaagtgaaacgcaatctttagacacacccttgcgtcataatgcaccctcttttagcgatattaaagattctgatgacgaaatccctttaaatacaactccaaatagcaaagctgcggctacagaactctttgacagtgaaatatttgaatggacccagagaccatgctctcctgaattgtattccactccattgaaaaagcagagtaaagctaagagtaaactagatcaaattgaagagaagggtgatgaagaagatgtgcatattggtggttcatttgataagctgggtaatgcaagtaatgcagctcagcttgtcaatacaaaagcaacaaagcagaagagaaagaaaacaagtcccagtaacaaaaacagtgcaaaattgtccaatcgtgctgagccctgcataaaaaagtctgatgccaatcaacaaggttcaaatagacgtaaaagtgctgccctaaaatcttgtcagaaaagcagcagtgctgtagggaggaatacttcaggtagaagaaacaaggcctctagcaacagcaagccaattcatggctctagtgataactccccagagtcatatcttcctaaggagggtttggatgttgaagcacctgacaaacccctttctgaaaggatccaaaacttggagaaaactagtcgacgaaagggaagtgcaaggaagctggaaatggcagggaaaactatttcagatactacagagaagaatagtgagccaagaagtaagagagtcagaagaatgtctgaccacgctatagctaaaccggttgaagttccttcaggatctggaaatgaaacagaaataccacagcttcacaccctcacaaaaggcagcattcaacgcaaatcctccaacgctagaagacatagcaaagtttgtggagaacaggaaggtaagaataaacttgagaacacgacaatgacacctattattttacatgggaaatgccaaaataaagaggcagtatgtacagctccttcagtaaggactgcatctgttaagtacaagcaagcaaaatttagcgaacaaccagattgttttggaacggagaactttggaaaccttcaagcatgccctgcacgtaatgttttactgaagaagtgtgaggtatctactttgaaggtttcctgtgctttctgccagaccgatgtcatcacagaggagtctggagagatggttcattatcaaaatgggaaacaagtccctgcagagttcaatggaggagccaatgtggtgcactctcacaagaactgccttgagtgggctcctgatgtctacttcgaagatgattctgcctttaatcttacaactgaattggcgagaagcagacggatcaaatgtgcttgctgtggaattaaaggagctgcacttggatgctttgagatgagttgtcggagaagtttccacttcacctgtgctaaactaatcccagaatgcagatgggataatgaaaattttgtgatgttatgccctctacatcggtctacaaagttacccaatgaaaattctgaacagcaaaagcaacctaaaaggaaaacaacactcaaaggaataaccggcttttccaggtcatctcaaataggatccaatcaagattgtggtaataactggaaatggccatctggatcaccacagaagtgggttctctgctgctcatcactttctagttctgagaaggaacttgtatcagaatttgcaaagttagctggcgtgcctatttcggcaacttggagtccaaatgttacccatgttattgcatcaactgatctctctggtgcttgcaaacggacgctgaagtttctcatggcaatcttgaatggcagatggattgtctccatagattgggttaaaacttgcatggagtgcatggaaccaattgatgagcacaaatttgaagtcgctactgatgttcatgggatcactgatggtcctaggttaggaagatgcagggttattgacaggcaacctaagctgttcgacagcatgaggttctacctccatggggactacacaaaatcctacagaggctacctgcaagatctcgtggttgcagcaggtggaatagttcttcagaggaagcccgtatcaagagaccagcaaaagcttcttgatgacagctctgacctcctcatcgtttacagcttcgagaatcaagatagggcaaaatccaaggccgaaaccaaggctgctgatcgcaggcaggctgatgctcaggctcttgcttgcgcttctggaggcagagttgtgagcagtgcatgggtgattgactcaattgcagcctgcaatctgcaacctctttga

SEQ ID NO: 24114 - DNA, 749 bp, Oryza sativa
  Clone ID: PAT_MRT4530_29127C.1
ggaggagtgggggacagcttgtcagtggctcggctgaaggtcgtctttaaccttcgtcttcttcctctcgaccgagcgggagcagcaggggaacacggcgcgcacggaaggccggccgagggcgacccggcggcggccaggggaggtgcggagaagctccggcgaccacccaccggctgcggcggcgcttggagggacggggcgcatggccgccatggctgcgccatagccgagctcggctacaagtggctaggacgacaggaagggtttccgaccaaattgatgaatgggaggaagagcaccggggatggcctgtccacggtgagctcgtcggcggcggaacggcggctggggcagcacagccataggcattaatcctacaaactggagccgacgctagatattagaggtgtagaggatgctataggctcgaggttttaccccgggatggagagacggcgaagggcggtgacgcgtggtgcggtgcggacgaagcagaggcggctagctgttggtgacgcccgaaagtgttcgacgcgtggttcccggtgtccagcggtcctctgctcccccaatggcgatggcggcagcacggaacctcccccactccctccaacctccagctctggccggggagcctcacaatggtgatctctagcggtggtgagagagtgatagcaaggtgttcgatgaaatgcatgactagagaaaggcagagggggatggggttttgatggcctggcttggct

SEQ ID NO: 24115 - DNA, 2988 bp, Oryza sativa
  Clone ID: PAT_MRT4530_29128C.1
atggcggacacggggagcctggagaagatggggcgagagctcaagtgccccgttcttggcagcctgagccttctcagttcggcggtatccatctcctgcaaccacgtcttctgcaatgattgcctcacggaatcgatgaaatccacgtcgagctgccccgtgtgcaaggtcccgttccgacgacgagaaatgcgaccagcacctcacatggacaatctggtcagcattttcaaaagcatggaggctgcagcaggtaccaatgttgtctcaacacaggaggctcctgtggtaaaacttgcagatggatcagattgtgtcaacagcgggaaaaattccaaaaggtcacaaaaatcattgacacgaaaaaggaaggtaacatccgagatggaaaaaaatacagcaaaggatgctacagcttctgcatcccaacctactacaaagccttccttctctactaacaaaagaatacaagtgaaaccattccctgaatctgagacaccaataagagctgagaagattatgaagcctgaagagccaaaaaataatctgaataatgatgttgaaggaaagaataaagcagtggcatcgggtcaacctggaagtccttcattgtcaccctttttttggctaagggaacaagaagaacaagaaggctgtaccgctgagacgttaagtgaaacgcaatctttagacacacccttgcgtcataatgcaccctcttttagcgatattaaagattctgatgacgaaatccctttaaatacaactccaaatagcaaagctgcggctacagaactctttgacagtgaaatatttgaatggacccagagaccatgctctcctgaattgtattccactccattgaaaaagcagagtaaagctaagagtaaactagatcaaattgaagagaagggtgatgaagaagatgtgcatattggtggttcatttgataagctgggtaatgcaagtaatgcagctcagcttgtcaatacaaaagcaacaaagcagaagagaaagaaaacaagtcccagtaacaaaaacagtgcaaaattgtccaatcgtgctgagccctgcataaaaaagtctgatgccaatcaacaaggttcaaatagacgtaaaagtgctgccctaaaatcttgtcagaaaagcagcagtgctgtagggaggaatacttcaggtagaagaaacaaggcctctagcaacagcaagccaattcatggctctagtgataactccccagagtcatatcttcctaaggagggtttggatgttgaagcacctgacaaacccctttctgaaaggatccaaaacttggagaaaactagtcgacgaaagggaagtgcaaggaagctggaaatggcagggaaaactatttcagatactacagagaagaatagtgagccaagaagtaagagagtcagaagaatgtctgaccacgctatagctaaaccggttgaagttccttcaggatctggaaatgaaacagaaataccacagcttcacaccctcacaaaaggcagcattcaacgcaaatcctccaacgctagaagacatagcaaagtttgtggagaacaggaaggtaagaataaacttgagaacacgacaatgacacctattattttacatgggaaatgccaaaataaagaggcagtatgtacagctccttcagtaaggactgcatctgttaagtacaagcaagcaaaatttagcgaacaaccagattgttttggaacggagaactttggaaaccttcaagcatgccctgcacgtaatgttttactgaagaagtgtgaggtatctactttgaaggtttcctgtgctttctgccagaccgatgtcatcacagaggagtctggagagatggttcattatcaaaatgggaaacaagtccctgcagagttcaatggaggagccaatgtggtgcactctcacaagaactgccttgagtgggctcctgatgtctacttcgaagatgattctgcctttaatcttacaactgaattggcgagaagcagacggatcaaatgtgcttgctgtggaattaaaggagctgcacttggatgctttgagatgagttgtcggagaagtttccacttcacctgtgctaaactaatcccagaatgcagatgggataatgaaaattttgtgatgttatgccctctacatcggtctacaaagttacccaatgaaaattctgaacagcaaaagcaacctaaaaggaaaacaacactcaaaggaataaccggcttttccaggtcatctcaaataggatccaatcaagattgtggtaataactggaaatggccatctggatcaccacagaagtgggttctctgctgctcatcactttctagttctgagaaggaacttgtatcagaatttgcaaagttagctggcgtgcctatttcggcaacttggagtccaaatgttacccatgttattgcatcaactgatctctctggtgcttgcaaacggacgctgaagtttctcatggcaatcttgaatggcagatggattgtctccatagattgggttaaaacttgcatggagtgcatggaaccaattgatgagcacaaatttgaagtcgctactgatgttcatgggatcactgatggtcctaggttaggaagatgcagggttattgacaggcaacctaagctgttcgacagcatgaggttctacctccatggggactacacaaaatcctacagaggctacctgcaagatctcgtggttgcagcaggtggaatagttcttcagaggaagcccgtatcaagagaccagcaaaagcttcttgatgacagctctgacctcctcatcgtttacagcttcgagaatcaagatagggcaaaatccaaggccgaaaccaaggctgctgatcgcaggcaggctgatgctcaggctcttgcttgcgcttctggaggcagagttgtgagcagtgcatgggtgattgactcaattgcagcctgcaatctgcaacctctttga

SEQ ID NO: 24116 - DNA, 594 bp, Oryza sativa
  Clone ID: PAT_MRT4530_29129C.1
atggcagccgtagaagcaaacgccgcaacgacccaccatgaaatcaccacggccgccgccgtcaccgccggagagcggcagcagctcaacgccggcggcgaggacgacaagaatattgggatgatcgtgactgacgacgatgacgaagacgaagacgacgagctgttcgagctcgacatcgccctcatcgaccaccgtgacggcgaagagtactacaccaagcgcctcgtgacgagcagctgttgcgtcgctgtcgccgccgcagccgccgccgccgacgacgacgacgaagaagacggcggtgacgcgctcctagccaactgcctgctgccggtgagctcggtcagcagggcggtgccggtgacggcgagcagcagcttcgtcgtcgtctcgtcgtatcccgttggccgccgctaccacggcggcggtgggtgcggcgacgacgacgacgacgacgctagctggaggtggaggaggttcttcttcacgtccggcggcggtggcaggacgcgtattggccgccacaacagcaataactctgcgaggttctccttctcaagattccaaagcttggcaaattttcagcgatactga

SEQ ID NO: 24117 - DNA, 1632 bp, Oryza sativa
  Clone ID: PAT_MRT4530_2912C.1
atggctgacaatgagaaaggcaataaggtcagaagtcaggacattggtacctcaagctcccgagtgaatgaagcaccagacaccagttgtgtggcagtggtccaacacctgattaaccagaacaaattgcttatagagatactacagcagcatcggatgccaattttgaacccgagtcagatgcaacctcaagtgcagttggaggcagtccaagcactcacaccacaagtcagcgcaccgccaacatcccagaaggcccctcatgccatgccgcatgttgacccaaaagaagcaagtatcatctgttttatgtgtgatgagcaagggcactacgcaaggaactgtcctcagcagaaaagaaaagcaccaatgcgaaccgaggatgaagtccgtaagatgatcattaccagcacagaatggcctccaccaggaatgacaaaacatcagagaagaaattccttccgaggtgcacaacagttgacagagcatcttttagctaatggaggtagagtgtctggtagtgaagattcagatcaagtctcctcagatgatgaagatgagaagtctccccaaggttttaaccagaataaaatagaacttaaggcatgctctcgttgtggagaaatcggtcatgttgccagctcgtgtgcctctacatgcgttcattgtgaggaagaccatccgcccgacaggtgtccaacgaacaagatcacttatttcttttgtgaaggaactgatcatgtaccaaaagattgtcaattcagttttctgctgacgaagaagatggccaaccaacccgccagttccaacggagagaagcatcaaggcaacacaaatccccgccaagatcaccgtttcagcctaactccagtgccaggacagaggaatcgaaatgagaaaagaaaatgccgagtccgggaagacatctgttgcttcaattgtcaaggaatgggtcatttcgccgacaagtgcccaaaaccgagaaacatagctgccggcacgtcagtccacgcaactccctgcaatcagaagcttgctcctcaacgaattgtcatccatgcatcccgaagcagtcctatagcccgcgttgcaacagctccaattccaatgaatgcactaccacaaggtgtcaatgctcaatttcagccccagccaccagctgacaagacaggggccagtatctgcgttgtacctttggaagttccaatacagcagctgagaaatcaagtacaagatgaagaacccgagttgaagaagggcattactccaaaaactgtccccaaccaaggcaaaatcgacctccacattaccgccaatttacacgaagcagacattccaatcgtattgtggtcactggagcaaacgccgtaccctggtaacttgtctgaggttgactccgaagatatgaatcatgagaagttctggaacggaagcatcactgcactaccgcaacctagtctgagtcagccaaaaggtgcaccctggtccaagtcaggtgaagaggagattccacccgcaacaggaggtcaagccaagcagttccgagtggtgaagttttgctggaagtttgtcaagacgcaacggaagaagtcagacaagaagagaagaccgcccaacctatcttcttgctag

SEQ ID NO: 24118 - DNA, 366 bp, Oryza sativa
  Clone ID: PAT_MRT4530_29130C.1
atggggaggactggtacaacgggagatgcccatacggttgggtctagaaagggcgttactccaaatataaaacgacagcttattaaactgaacgtactgagctatgcagttccagcagtatgcaagtacttcctctccaacttcgacaatctccttttcttccctgacgctaatgataacccaaactttgacgaaggacttatgaattggcgttctaggttggggttaaggcggggtaggaggggtgtgagaggagggggaaagaaggtcactgagcttagagggatggtcgtggaataccgtggtttggtggtgggtggcggaactagcgccgctgaagctgtaggatcagcaagtcggtgttga

SEQ ID NO: 24119 - DNA, 456 bp, Oryza sativa
  Clone ID: PAT_MRT4530_29131C.1
cgcatagaaaggcgcgtattttttcgcctttcttcgcgcctccgcgcttgggctacttttgtgccctcactcccttgtccgccgccggcgtaggatcaacccaatgcgccgtcatgagggagtgcatgtcgatccacatcggccaggccggtatccaggtcgggaacgcgtgctgggagctatactggctggagcatggcattcaggctgatggtcagatgcccagtgacaggactgttggtggcggtgatgatgctttcaacacctttttcagtgagactggtgctgggaagcatgctccccgtgctgaatttggtgatcttgagcctactgtgattgatgaggtgaggactggatggtaacgccaggtgtttcaccctgagcagctcatcaatggcaaggaggatgcagttaacaactttgcccggggaactacaccattggcaaggagattgt

SEQ ID NO: 24120 - DNA, 507 bp, Oryza sativa
  Clone ID: PAT_MRT4530_29132C.1
attcatagaaaggcgagttcatactcgcctctcggcgcgcctccgcgcttgacctagaactcgaactgctctcccttgtacgtcgacagcagagcatcaacccaatccgccgccatgagggagtgcatgtcgatccacatcggccaggccggtatccaggtcggtaacgcgtgctgggagctctactgcctcgagcatggcatccaggctgatggtcagatgcccagagacaggactgttggtggaggtgatgatgctttcaacaccttctttagtgagactggtgctgggaagcatgttccccgtgctgtatttggtgatcttgagcctactgtgattgatgaggtgaggactggttgctaccgccagctctttcaccctgagcagctcatcaatggcaaggaggatgcagctaacaactttgcccgtggtcactacaccattggcaaggagattgacgatctgagccttgaccgcatcaagaagctagctgacaactgcactggt

SEQ ID NO: 24121 - DNA, 780 bp, Oryza sativa
  Clone ID: PAT_MRT4530_29133C.1
gtcgccttcctgccttacactgtcgatttttattctctcattgttacactccatggacctgcccgctcgaaagcgaacgtcgcatttgttcatcatggatttgataagttctcggaattgacggcgggctgagttgtgcctcaaggaagtggggaaagccggaaacaccggacaagaattgagttgaggcgcctgtcaacaaacctcagcaattgcaattccgttcggaatttcggtcccaatcgacgatcgtaatcttccttttatttttcccctctgaatgaactgtactcgactcgatcaattctaggcttatttcacgagactacgtggttttttttttaactgcgagactacgtgtttgcaaccgatcaaaatgagtccttctgagagtaattctacggtacttgaggaggtaccatgaggtactaaaaatttagtgtaaaaattggtcactcatgatacctcacagtacctaggtatcaagagatatcaaatttacaataaaaaaatggtacctcatggtacctcgaattgtaaaattgctcttcttttaaaccaaaaccacacaatctgatggagttataggctgacagccaaccggggccgtgattgtctgtacaaaacagcccatcaatctaataagcccatgaataccttcgaggcgttggcaactccgcattgctgctgcggcaaatactactcctagcagtactatttcagacaaaatcacacaaaatatatgtgctcttcatggtgtccaagagaggtccactacta

SEQ ID NO: 24122 - DNA, 1335 bp, Oryza sativa
  Clone ID: PAT_MRT4530_29134C.1
ccacgcgtccgctctggcttagaggtggagttagacccaatcctcttatatttcttccctagcttcagcctctcccaaatcaggtttccagaattgcatattaaagcctcccatcaacttcttgcacacaccctccctttggctttcatctgcatctattcagttgcagattgagagccaaagacattatcttgattctatcaggagggttgtgctagcgaattcttgttagcaacaaattgacatattgctcggcacatccccaccgagaataccaagatgacgttctctggtacacaggacaagtgcaatgcttgtgacaagaccgtgcatttcattgatctccttaccgcggacagtattccctaccacaagtcttgcttcagatgcagccactgcaaaggcacactttcgatgtgcagctattcgtccatggatggggttctttactgcaagacccattttgagcagctattcaaggaaacaggcaccttcaagaagaacttcccctcaggtacaaaggcaaacagtgaacaggctaagattcccagcaagctgtcctctgtgttctgtggaacccaggacaagtgtactgcctgcaagaagactgtgtatccattggagaagatgaccatggagggtgagtgttaccacaggacctgcttcaagtgcgcccatggcggctgccttctgacgaacgcctcctacgcctcgcacaacgggatcctctactgccagaaccacttctggcagctgttcaagaagtccggcagctacgacaacctgctgaagcccgcctccgccgccgccgagaacaccgtcgaatccgaggtcgccgtcgcggagcccgcgaaggaagacccggagacggaggaggcagccaaggaagaagaagaagaagcgtcaccggagcaggtcgcggaagctgttgtagaggaccaggagcactcatgagaagaacctgccacagtgccacttgcacgcgcacacaggaatatatatacatgttcccatattactgctaattttttttggtgtcgttgagaaacttgtcgctggttcttctcatcttctcgtctggattcctgcaatcctggagtctgtacctgtgctaagatatcatgaatgagagcagattttgcaaagaaagggagaaatatgctcattctgatattttgacatgtatcatccgtctcagaaaaatcaacttctcactgcgaacattgacataatctatgtccaggttcatagttagaagttgatttttaaggatgatttggcagcaccattttaagaagaaatattttatctggatcatgtgagaattgagatgat

SEQ ID NO: 24123 - DNA, 2139 bp, Oryza sativa
  Clone ID: PAT_MRT4530_29135C.1
atggccgcgaaatccgacgacaattcgctgccgccgggcttcggcacgaggccatggctggtgcagggatcacgcggcgacacgctgactttcgtcgatgtgtcagacctcagcctgcacgagaccgttgttcctgaggttcgagggaagacgtgcttgggctgcatgcacggcgactggctgctgatgctggacgagtctaccgccgactgcttcctcctccgcatcaccaccaacccgcggaccaagattcagttgccgccgttgcaccagcctccgctgttcctatccacatacgagatgctcgagtctccggagagcgcgaactgcacaatactagttgccagctcgacagaggcagaagaagaatgctaccttcttcactgccaccctggcgatgagatgtggaccaaatctgtgtccccgtatgacgacatcagtttctcatctcttatgcgcaactatggaggaaagatttatgatttcgcttctaatctcatagcgatagacgtgattgatggcaagatcgagctacaacagttgggtaccatcaaggacgaagaagaagatagccgtagatgtggccgttaccatatcatcgagtcctgtggaaagttatttctattgtggatagatgatctcgggtgcttttatgatgacggcttactcaccgccatccgtgtgttttgcttgaatcttgagacattgtcatgggagagggtggagggtattggcaacgaccgtgcatttctcatctctggaacttatgccttctcatgtccttcaatagaaggtgtattgcaaggaaactgtgtttatcttgtatggtcaagctgcgacagtgagaggctttataagttctgcttggatgacatgaccattagcttccatcaaattcttcctcaacctacaaaatcctggtcccgagcattttgggctattccggcaagcacccaatcaatttcaatgccacaagaatcaaccattcctaataatcttctatggagaaagccatcaaaggataatccacccaatgattttgatgaacacaaagaggacggacaagaaaattcactgcggccatgggatcacctccctgtggaattgctagagttaattgtctcaaacttatccttggtagatcgcatacgatttccaactgtttgtaaggcatggagtgaggtgttgaacccaatagagcaagcaaaagtttggccttggctaatgcacatctcaaagcaggatgggacatgcaagttgttcgatcctctacgcagtgagaattacaacatacaagttacaatatttgacacaaatgaagatcgacacatttttcgctcctccaaggatggttgggtactagcatcagccgggatctatggcaacgatatattcatcataaatcctttcacagaggagattgtggagccccctatgcttgcgtttttatataactacaacggtgtgtcgttctcatcgtcaaatccaatgtgtttagattgtgccttttttggaatcaacagcagtgacagtggtaaatttctcagtacttttacatggcagcatggagagcctcattggattgagcaagagttcgagtacaatgtgtcgttcccagtagggtacaataatcctgtcatgttcgatgggaagttctattgtctcgggaggaagggcaaccttggtgtctttgatccaacaagcaatacttggagaattcttgataagccagagcctatccatgtagagatggatctctttgaagaagaccacataggaagagagttctgctatttggttgatatggatggggagttgatatctgtattcttgcgtaatgctaatgagttgcctcgagtgttcaaacttaaccgtacagagatttcatgggttgaagtagaggacattggtggcggtgccttgtttcttgattacagatcatcatatggtgtagcatcgccagatggtggcaatggaaataggatatactttcctagatattcgaaggatggaaagccggtgttctatgatatgaacaagaagacgtactctccatctttctatggtgtcatagagccacttaactgcgtgtgggttgtgcctaatttgcgcaagaatgaatcaacatccgaggattaa

SEQ ID NO: 24124 - DNA, 1077 bp, Oryza sativa
  Clone ID: PAT_MRT4530_29136C.1
atgcagcgagagtgcatcgtgtcgggaccgatcgacgggtcgatctctgcgacgggcgacggcgcgcgtcgaggcgttggcggcatgcgcggtcatcgctcacgcgtccgcggggaccgtggcctgcggatgcacaggagcggcagcgatcctgattctgacaaggcgcactggtatatgagcaatagcgatgacgagtcatttgttgataaagataaagattgcagaaggggcaccgtagccccgctgctgaagaaaggcccatggacatcatgggagaactccatcttagagaagtacattaagaagcatggtgaaaggaattggaagcttgtgcagaagaacactggcctcttgagtttttgcatcacaaggcgtactgataatgaaataaagaactactggaacactcgaataaagaaatgcaagaacaatcgttggcttttatatcctgctaatgtatgcaacgatgctttgaatgaagatcaatatgggtctgttgaccccagtgttagggagaagctaaccaataatcaactagaagatactactagtatgtattctgcaccccagttttcatatgcttccatcagtaatatacttgataggagacttgcatcaaaagattatgactccatagaagatcaaagaaaccgaatagaagttgcagcagaatatgagatttcacttcctgtgttgaaaacaaccaacaatgacatatttccatcagcctctatctttgccaaccatggcatttcaaatggcaatctctctgctttgtccacaactgatgctttgcagatggagctccctttaatccaatttgatccaaacaaccagttcatttactcaagggattatgcgacgcacctaacaaacttagctttattaaatgatcaagcagaagaattactaaatcatattgatgtattgaactatgtggtgatgaaaaaagagctttctggagggagtttgagtcccactattaatatgccatgtaaagcaacggcatattcttcagaactccctttatgcaagggatatcgggaacaagatcttgatttttacacacaatag

SEQ ID NO: 24125 - DNA, 183 bp, Oryza sativa
  Clone ID: PAT_MRT4530_29137C.1
tgggtttataacaagacccccacactcacataattctaacgaatcgaataatgtcagggagcacacagactcactatatcacgaccggatgatcgttacatttgttataggagcagtaaaacgaaacacaggtacagaaggtattaacaaggctcgatgatcgagtgggcggtgaaaactaat

SEQ ID NO: 24126 - DNA, 1640 bp, Oryza sativa
  Clone ID: PAT_MRT4530_29138C.1
gttgccgcacatatactcgtgctcgcgctcacgccgccgcccccgaaactccccgctccgccattgccgggggaggcgatctcccatctccatctcccatctcgcctcagcgaactccccttcacatcgcgtctcttccgtcgcagagagtggcggccggtgaccatttccggtgggagggcggaggttttgtcccggctccggcgacactccacactccgacagcccaccgctccgtcaccctgcatttttggtcaggatgcacgagagcgacagcggtcctgattctgacaggacacactggtatatgagcaatagcgatgacgagtcatttgttgataaagataaagattgcagaaggagcaccgtagccctgctgttgaagaaaggtccatggacatcttgggaggactccatcttagagaagtacatcaagaagcatggtgaaaggaactggaagcttgtgcagaagaacactggcctcttgaggtgtggcaagagttgccgtcttcggtggatgaaccatctgaggcctaacctaaagaagggggctttcagcaaggaagaagagaataaaattattaatcttcatcgcaaaatggggaataagtggtctcggatggctgctgatttgccagggcgtactgataatgaaataaagaactactggaacactcgaataaagaaatgcaagaacaatcgttcgcctttgtatcctgctaatgtatgcaacgatgctttgaatgaagatcaacatgagtctgctgaccccaacgttagggagaagctgaccaataatcatctagaagatactactagtatgtattctgcacccccaggttttcaggatgcttccatcagtaatatacttgataggagacttgcatcaaaagattatgactccatagaagatcaaagaaaccaaatagaagttgtagcaaaatatgagattccacttcctgtgttgaaaacaacgaacaatgacatatttccatcagcctctatctttgccaaccatggtatttcaaatggcaatctctctgctttgtccacaactgatgctttgcagatggagctccctttaatccaatttgatccaaacaaccagttcgtttactcaagggcttatgcgatgcacctaacaaactttgctttattaaatgatcaatcagaagaattactaaatgatactgatgtattgaactatgtggtgatgaaagaagagctttctggagggagtttgagtcctactattaatatgccatgtgaagcacataactccatggctgcctctaatgagctggtagtgccacaatatgaaggagatgctccacctcttcaagatgatttcacatcatatttctatttgaatgatactaatctatccatattcgaagacacaaatgaattgtttttggaaaacaagttggatactaaaggtaactgacgccagattgtcatgagttgctgctctcttggataaactcatcatgaaaccaagaattttattccatgaagctcgtgaacgagccagtcgttgctatctctcttattaggatttccagtttggatattgccgtactcctttacttttcttcatgtcgaaattaccatgcgtgctatgttgaatttcatctgct

SEQ ID NO: 24127 - DNA, 975 bp, Oryza sativa
  Clone ID: PAT_MRT4530_29139C.1
atgacaaggaaagcaatcaggtactcgcagaagagatcccgtgagctatgtgcagtagtgtcccgtctagtaacaagccaacaaccagtcaaaactgttttgctctttttactatggctagcaggacaccgatttattcgaacggttggttcaactaccggtagcaagatcactgtgttcttccctgctctagaggagctcatgttcggtgcattggatttatcatggaggtggagtacttcaaggagtaccagcgtcggctccggcggcacgccgggcgcgccggcggcgcggcggatcgtccgcgacgcgctctacgtcgtcagcatcggcaccaacgacttcctggagaactacttcctcctcgtcacggggcggttcaagcagttcaccgtgggcgagttcgaggacttcctcgtcgcgcaggcggcggggttcctcgccgccatccaccgcctcggcgcgcgccgcgtcgccttcgccggcctcagcgccatcggctgcctgccgctggagcgcacgctcaacgccctccgcggcggctgcgtcgaggagtacaaccaggtggccagggactacaacgtcaagctcaacgccatgatcgccggcctccagagctcgctccccggcctcaagatcgcctacgtccccgtctacgacgacatgctcaacctcatcaacaatccttccacacttggtgagctatatatatttggcgctgttcttttcagcttcttcaccggattattatcgcagattatttgtttcacgtacgctgggctggagaacgtagagcaggggtgctgcgcgacggggatgttcgagatgagctacctctgcaacgagaagaaccccctgacatgccccgacgccgacaagtacttcttctgggactccttccatccgacagagaaggtgaaccggttcttcgccaattccactctgcagatctgcttgagggagctcctctcttga

SEQ ID NO: 24128 - DNA, 378 bp, Oryza sativa
  Clone ID: PAT_MRT4530_2913C.1
atggccgggcgtggcggcaacgatcagcgaagtggggcgcaaacgtggggtggtagcggctcggccgcctccttttttgtgggacgagcgggggagtttggtcaaggaggtggagggaagccggtccacgccgtcggttgcgagcgcgggaggcggaaccgagcgggagaggcggcgacgtgggggcggcaatggcggcatgctagcggttggagacgggcttggggtgggaataagaacttacaggtagggcccatgggtccacctgtcggcgagggaggaacagaggtgatgggaggaggcgaaatagacttggcaaagggtcgggccgagggggagaggccggcccgactaaatgcattatttaatgatttttaa

SEQ ID NO: 24129 - DNA, 1456 bp, Oryza sativa
  Clone ID: PAT_MRT4530_29140C.1
agtattaattatacatgtatgttgaattaatctctgattaagataaacacacatgctgatgtaaccttgcttttcaagacctctgtttgtgctttgcatgacaagtatctgaagtccgaactgaatggcatgaatgatggaccaaatgtacctcaaatgtgtaaatttttgtcctcgccgaaattaaaaccacccaaagaattgatcatcatcacattggaacggtgtacaagttagatcgtcctctatttaaaccaaatcaacacgggcggtcatcaaattgtgcaccatagagcatttgatctgaatgtctgaatatttcttggacatccccattagatggttcaccattgctgtctcaagagaggagctccctcaagcagatctgcagagtggaattggcgaagaaccggttcaccttctctgtcggatggaaggagtcccagaagaagtacttgtcggcgtcggggcatgtcagggggttcttctcgttgcagaggtagctcatctcgaacatccccgtcgcgcagcacccctgctctacgttctccagcccagcgtacgtgaaacaaataatctgcgataataatccggtgaagaagctgaaaagaacagcgccaaatatatatagctcaccaagtgtggaaggattgttgatgaggttgagcatgtcgtcgtagacggggacgtaggcgatcttgaggccggggagcgagctctggaggccggcgatcatggcgttgagcttgacgttgtagtccctggccacctggttgtactcctcgacgcagccgccgcggagggcgttgagcgtgcgctccagcggcaggcagccgatggcgctgaggccggcgaaggcgacgcggcgcgcgccgaggcggtggatggcggcgaggaaccccgccgcctgcgcgacgaggaagtcctcgaactcgcccacggtgaactgcttgaaccgccccgtgacgaggaggaagtagttctccaggaagtcgttggtgccgatgctgacgacgtagagcgcgtcgcggacgatccgccgcgccgccgcgcgcccggcgtgccgccggagccgacgctggtactccttgaagtactccacctccttccacagcgggatcactgctagtagatgctgaggttcaatggctctgaatctgtactgtgcattgttccattcaattggcagatcacttccggtggttggtagatcatggcccaaattactccatgataaatccaatgcaccgaacatgagctcctctagagcagggaagaacacagtgatcttgctaccggtagttgaaccaaccgttcgaataaatcggtgtcctgctagccatagtaaaaagagcaaaacagttttgactggttgttggcttgttactagacgggacactactgcacatagctcacgggatctcttctgcgagtacctgattgctttccttgtcat

SEQ ID NO: 24130 - DNA, 348 bp, Oryza sativa
  Clone ID: PAT_MRT4530_29141C.1
atgaaggagagtggtttggctatgggaactagagaggtttcgaggtggttggtggaggcgcgcgacgacgcggcggctatggaagatgagtggggaataggggacgacaggagcgcgacagaggctagggatcaagcgactgcgaagacaatggagggtggtggcggtggcaaatgggaagaggagttgacattgaggggaagtcgtggggaagtccttggagccaaaatagggcacgcgttctccgcgcccatcgagggcgtgtggcactgcatcgtggagttcgcaacgtcaggtcagaacaaggagaagatgacaaagcaagcagagaacaaacgtctgatctga

SEQ ID NO: 24131 - DNA, 518 bp, Oryza sativa
  Clone ID: PAT_MRT4530_29142C.1
tcaggcaacggtcacatcccggaccaccccatctcgcaccgtccggtcgcgatccgacggcgtgggagccgcctcgagattcgcgcctcccgcactcttttcctccccttgggttgcccctcccggcctcttcttcctaggatagcgtagtttgtaggctgcatctccatctccatcgccattgattcgcattgcatccatcattttaggatgttctactagggttcttgatttttcttttggtttgttgttttgacgaatggaggtattgttgggattcgccgcctgctgctcgtcgtcgtcgtcgccgatgaggaggccgtgcgggctctgccccggcatgtccgatcgttcgtgatttgttttttctacatgttttagggcccatttgttcttgatcctattctttgattcttttgtactaagcattctaaggcgaagccacccattctttcctgcatatatacttacaaacacatagcccccatctgatctcacaaacattatttctctctctt

SEQ ID NO: 24132 - DNA, 390 bp, Oryza sativa
  Clone ID: PAT_MRT4530_29143C.1
aaaaaaaaaaaaaaaaaaaaaaaaaaaaaaaaaaaaaaaaaaaaaaaaaaaaaaaaaaaaaaaaaaaaaaaaaaaaaaaaaaaaaaaaaaaaaaaaaaaaaaggggcggccgttttgggggtcccatttttacttcccgcgttcttgcaccgttttatttttttttttgggccccctaaattcaatcccttggccgtttttttccaccgccgtgactggaaaacccttggggtaccccaatttattcgccttgaaaaacatccccttttccccagttggtttaatagggaaggggcccccaccgatgccctttccaaacagtttttccaacctaattgccaaatggaacgccccttgtaccggcccttttagcgcgcggtttgtggggtt

SEQ ID NO: 24133 - DNA, 1035 bp, Oryza sativa
  Clone ID: PAT_MRT4530_29144C.1
tttttttttttttttttttgggggaaccagcatgcttttcttaccaatggaatgacaatgaaaaaggttaatatatttggcagtgctgatggagatagcactgttgtcttgagaactgaagaaaccagcatggttttctctatcttatgtgatgtattacagagttgaattacacacagattacatataaatatgtacattgccgtttgaattgatttctgcagctcattactcacatccaaaccatacacagataatgatcattttcacttaaggtgatagcctctaccgttgacttgatcagatgttggtagaagcacatctactcaacaaaagtaaacacataacaagttatatgttgagcacctgacaactgactaattcagcggctgcaagatttttcgacacgatgactttccacaaattagtttcctgttctgaagaaagttgttgattttggcatgttggaccatttccaggggctgacaactccacaggcttcagaacatcggtttgcattatattgatcttgctatctacatctttgatgatcaaattgagcttgccaagaaatcctgcaagtaagtatggacattccgactctgcaaagtcacccactggtacctggccaatggcaaccttccaagcatcctcctgaggatcataaatcttgatcttacctctatcagaagaagttgatggctccaaagcatacaagtccccatctatgacagcacttaacttcgtaccagcctgcctcgctggccagccctcgcccattcctacaggcatttccgcccatgaatttgtctccggatcaaagatctccccaccaacgtcaacaaagaatggccaggaatacagactttgaggaacataaagcttgcctccaaatgaggtcattcctgtcgcaatgggcttcagcagctcagccaagaaggcagttggtagagcttgcgctttcgagaacgcgatgtcaggcacctccacccaaattcctgtccttgggtcaaacacctcggcggatgagcctcg

SEQ ID NO: 24134 - DNA, 102 bp, Oryza sativa
  Clone ID: PAT_MRT4530_29145C.1
atgacagccggccatattcgttctttgtatcccttcacgtttgggtacattatagagctcaaggtcgagctcagcctagcagaccaggaagttgacggttaa

SEQ ID NO: 24135 - DNA, 1389 bp, Oryza sativa
  Clone ID: PAT_MRT4530_29146C.1
cccctcctctcctcgtccgtctcgactccggaggccgaaatggcgtcggttccggatttgaatccgtgggtcgtgctggacaggtacgtgagggatgccgatctcgtcgacacgcagcgagatcccaggtgggcggccgtcaagtgcgcacgcaaggaggcctacggctgcggggagttcggtcaggagctggtggatggcctgacgctgtacgtgcgccgcaacgatggccccagcgacgatctcttctccgccctcgccgtccgtgccaccgacgagatgctgcggaaggtcgcggcgccaacgaagatccagaagagcctcatccgcccgctcttccgctgtcaggcaagtatgaatgcccgcgtcaccttcgtctgcgagttgcacgccgcggaggagaacctcgtcgtcctctccgcgtccttcgaccacgcccaccacatctactacctcgtctacgacggcatcgacgagtcactcaccatgatcccgagcctgtcaccgcaccgcttcgtggccttccacccgcggcctgtcctaaggcgccgcgccactgggggctatgacctggccctcatagcgaggtacctcagcaggaagagcagagaagacggggacgttctccttctgtttaccaaggagaaggagagttcctgctgctccgatcagtggatggagaagaagaagggtatgcgcctcccaacggggcccctgggcttcttctgcccggacatgatcttctcgttcaagggcaacactttctgggtcgatctctcacagggtttcatgtgctgcgacaccaatgtcctcttctctggcgacaccgtggatttcagacacctcagcttcccccaccagtacctgcttcatgacattatcaaatcccaggagcttggcccgatggagatgtaccggaccatgggcgtctccgggggctccatcaagttcgtctctatcaacactccggctactgatgccgcggcaggcaaaccgccgggcaggccctgtcatgacgccactgcattagccaacacaacagtggccgtgtggacactggaccaaggtggcctgtgctggaaaaaggatgtggagttcaggctggggaacatatggtcgcaacgggactacaagcagtctgggttgcccaggatggtacccgtgtggcccttcctaaggccgcacgcacatggcacactctacttcctggtgccgaaaccgatgaccggacctagtgacccccaaatgtatcacatttgcgggctcgacatgtgcaccaagaaaatccagttgtcgcagtactccgtccgctccaatatcctccggccggctgccttccctaccaatgcattccaacaccttgatgagtccccactagctacaaagtaa

SEQ ID NO: 24136 - DNA, 190 bp, Oryza sativa
  Clone ID: PAT_MRT4530_29147C.1
gagcagcgtggagtcaaagccctactccgtagagggctcgaggctgcgcggatcgcttcctctctttgaacacagctggggtgtgcgacatggctgtggtggaggatctgcccccacccagaagcagaaacacaacttggcggtggctggtttatttagcaatctctacttggctttgatggccagtgtg

SEQ ID NO: 24137 - DNA, 501 bp, Oryza sativa
  Clone ID: PAT_MRT4530_29148C.1
gcccccgtactgatgcgcttgactccaccgccgtggcggccgctctataactagtggatcccccgggctgcacgaattcggcacgagaccactccccatcagcggcaaagcagccagcgagagatcgacgcaaggcaaccgccatggccaccgtcagcgccgccgcggcgacctccgtcgttgcccgcgccgtcctcgccgggccacttgggctgccgcacatcacggccacgacgacccacagggttacgtgcaactactccaatgaggcggccacaccggcggcggccgtcaaggagccgcgcgtcctactggcattgcgccaactgctgcccccctatggcgctcgtccgccacagatctccgacggaggcaccggctctacctcggctgagcaacaaccctgcttggggttggttcttgcttccggggtgttccggcctcattcttgttccttctttcacccattccttacccttcccaaccttccagggggggggg

SEQ ID NO: 24138 - DNA, 211 bp, Oryza sativa
  Clone ID: PAT_MRT4530_29149C.1
ccgtccccagcatagccgtagcaccgccatcgtctatactgtccggtgggcagagcagaaggaggaggcgaaccctgaacctcaacagccatgaacaagctcagcaccaagaaagccgtggtcgtagctagatccttcatccttcgaagccagtgacctccagcagagcacgactcaagagctccaatccggcaaaggcgagaacattgag

SEQ ID NO: 24139 - DNA, 1777 bp, Oryza sativa
  Clone ID: PAT_MRT4530_2914C.1
gggtcgagcccggggtggagcggcggctgctgtcacgcccagaaattcccgaatagaatttcaagcagaatgtgcattaaaatccccgtccaggaccggccggggtacacaaacgacaatgttgacattcagatccacgtcggaaagaggctgtgacaggacccttcgcctaaccccttctagccaagcacaccacacctcaggtttcacccccgtccccagcgggcaacgggcagtcccctctcgtgcctaggtgaatccggaagcgacagaggccgtcgcagggcccgccccgctccatcacgcccacccttgcctggatgcggacctcgctgacgtcatcaaaggggaggggcggcgccggcaagcgggccccaccggtcagcggcacaagggcgccggtccaccgtggaccgggaccaccgaggcgatccaccgccggtccacgggaaccgacggcccggatcggcccaaagccgatcggatggccacgaggcggcgcggctggggcacgggcacggcatgaaaccggctcggccgagccgtggtgctgggcagcgtgcggcctccggaggcagcagccggcggcgccgaacggcggcgagcagccggaagacggcggcgctcacgggcagtggcgatgcacgcgaaagggaaggggagcgggaggaggggctcaccgagcgtgcgggccgacgaggcagagcgggaggtcgccggcggcgggaagaggcggcggcgctcctcggggaggcaacgacgacggcggttcggcggcgttccgtgagcaggaaccggcggccgatggtcggagggacctagggaaggaaatgaagaggttaggagagggtagggagttgcggtgcggcaggaaacgccgaccgaaatgacgacggagctcaccgggaggcacggggagatgagtccggcgacgaccggcgaacacggagggattgctgagccacggatgatggctgcggtaccgtggagggcgacaacacaacacggggcggactgaagaggcggtgcggcgcggccggaggcggaaatggcgacggtggctctggttggtagtggggagggcggctcggttgtggattagaggaacgaggcggtggctggtgctcggcttggagcggcgaagccgactgtggcggtggcgcggcttggcggtggctagcgtggcgaggagaggcggccggagttcggcggcaagcggcggagagaggttacacggtggggagagctcggtagagggcgtggggactcaggaaaagggggaaaaaggaagaggaggccacggggattgattttatagctcaaggggcgaggagagggccggggagcggcggaatcggccggcgaagtggggaggtgaagtggagctcgtggggaggtcaaaccggcgccgtttcttgcggggtgagtgggggaaaaggtggaggacgtggagggggtcgtgtccatgtggttggatgcgagctcgggtgcgggagggcgccggattttgcggcgacgtgggcggcaatggcggttggggttggccggcgagaggtaggaggaggagctgacgggtgggaccgccggtcccacctgtcggcgaagggagagaaggagggacgcaaaacagacttttgcgagcaggccaagggagaagggagccggcccgagagagggaggaggcgcgcgggccgcgggagaggaaggagggggaggaatttgggccgaaaaatggcccaaagagaggaaggaggattttatttgttttctttttatt

SEQ ID NO: 24140 - DNA, 1025 bp, Oryza sativa
  Clone ID: PAT_MRT4530_29150C.1
gagctccaacaaacaagacttgcatacgtcccaaactcccaaatcgccctctttgcaatcgcttcttccgttccatttcagtagcccacaacttcgcatcagaaagcgaaagatagagcaaccatgtcgctggtgaggcgcagcaacgtgttcgacccattctccctcgacctctgggaccccttcgacagcgtgttccgctccgtcgtcccggccacctccgacaacgacaccgccgccttcgccaacgcccgcatcgactggaaggagacgccggagtcgcacgtcttcaaggccgacctccccggcgtcaagaaggaggaggtgaaggtggaggtggaggaaggcaacgtgctggtgatcagcggccagcgcagcaaggagaaaggaggacaagaacgacaagtggcaccgcgtggagcgcagcagcgggcagttcatgcggcggttcaggctgccggagaacgccaaggtggagaccaggtgaaggccggactggagaacggcgtgctcaccgtcaccgtgcccaaggccgaggtcaagaagccctgaggtgaaggcgagatctccggttaagctcctgaagatgtgattgggggcggtgagggaagaagtcatgtttgcagtaattcagtatttcaagtgtgggtgtttgtttggtcggcaagtatggtctgctgctggtgtgtccgtacccgttgggagtccgagtggctgagtcggccggtttcatgtattcctttgtgagtacttgagtaatcgccttcttagttcttgctcgttgaggaataaataaagagcttttcaggttgcaaaaaaaaaaaaaaaaaaaaaaaaaaaaaaaaaaaaaaaaagaagaatcatgcatgttcactctgaactgtttgcggtgtttcactcgggtttgatggtttttactagtcctatgaactgtgtattcttttgtactctgttgtgagcgcgtttgcacgaagcaataaataaaaataaaatcagcttgtttgtataaaaaaaaaaaaaaaaaa

SEQ ID NO: 24141 - DNA, 384 bp, Oryza sativa
  Clone ID: PAT_MRT4530_29151C.1
atgggggaagagaggttgggggctccttttctttgtagatccgtcgtcggacttgtcctatcggatcaagggttggtaacgccgaccatattgtccctctccggcatgcaagaattaaaggtggcaaccatagcacgcttctacgttgaaaaaactgcagtaatgaagcttctacctccaatgtttggaggccccagctatggctcagctcctaggctgatccaggctgagttccatcaggtttgccaaagccaaaacctcgttgagggattgagccaaggcaaaatctggtgcagctttgctatgggcaatcaagtcatctttgacgacagatccagcaaggcatgcatggaggacttgattgcttttcttgtactagcctag

SEQ ID NO: 24142 - DNA, 296 bp, Oryza sativa
  Clone ID: PAT_MRT4530_29152C.1
tttttattgatcagggtcaaaacccgcccagaaataccccctaccgggccagatctcaccttttttccaatacttgtacatccatccacgggggccacacgaattcgtccatttatacggtacacgttcgtacattttctggaccgggtacacacacgcacacttttttggagagacccgcattgttgaaaaccctatttagctttatccgaaggcaatgcgttcccaggggagcccggtgggcggcgggccttacttgccggggacaaatttggcggggttggcccaagcgttgt

SEQ ID NO: 24143 - DNA, 401 bp, Oryza sativa
  Clone ID: PAT_MRT4530_29153C.1
gaccgcgaccgccatggcgtaccgccggaagccgcagcctccgcagacgccgccgtccttggaccaccaccaccaccaccacaccccctccgtgggcccctcgtccccgccgcaggactccctcgccgcgcatgccatgcgcgcctccgccgcgcaccgcgacgcctcctccctctcctcggcctactcctcctcctccgcctccgcggccgccgccgccgccgcggctcgccggggccaccacgagccctccgtctccacgccttcccccgtaagcttccccgctgagactccgccccaccccttagatgtgtctgatgcgtggcccggatctggtccgctcggggcggtttgtctccccgtcctagccgcttcttgaaatccatggtggtgaatcgatt

SEQ ID NO: 24144 - DNA, 2422 bp, Oryza sativa
  unsure (1)..(2422): unsure at all n locations
  Clone ID: PAT_MRT4530_29155C.1
accacacatccccccccccccttcccctcctcaccttcccttctccggttctcagattccacccaatccgccgctgcgtcgcgtgtgctgttcggcgaaattccaagccccaattccccacatctcatggttctctctcccatcgcctccgccgacgtcgaccgcctcctttgctgctgtcgccggtgttgttgctgtcgccggtgttgttgttgttgagggggtaacggtggtggtggtggtggtggtgaggggttagaggggctagggttgcggatttgcggccaattggttgggggatttcgaagggggaatggatctctcgcggccggaatcgtcggacctgtcgctgggtttccactcgctcggccacgcccgcgggcacgcggtcacggggccgctgcggctgttcgatgacatggaggacgccaagccggagaagagcgtcggtggcggcggaggaggagggggaggaggaggcgaggaggaggatggggaggaagggggcgaccagcacttctccctcctcggccacgcgctctgcgtcaagcgtccacgccgcgcgctctacggaggcggaggcggaggcggggcaggaggtggaggaggaggaggaggggaggcgtcctcctgctcgtcttcctcctcgtcgctgcacccggcgaagcggcaggcgacggcggagcgcggcgcggatctggaggcccgccgcggcgccgtccgcgcgtggggcaaccaggcgctggcggaggccgacccggacgtgcacgcgctgatggagctcgagcgcgaccgccaggtgcgcgggatcgagctgatcgcgtcggagaacttcgtctgccgcgcggtgctcgaggcgctcggcagccacctcaccaacaagtactctgagggccatcccggggctcggtactatggcgggaaccagcacatcgacggcatcgagcgcctctgccatgagcgcgccctcgccgccttcggtctcgaccccgcctgctggggggtcaacgtccagccatactcctgcacctctgcaaacctagctgtttacacaggtctcctcctgcccaaggaccgtatcatggggctcgagccgccttccggtggccatgtcagccacgggtactacacaccaagtggtaagaaggtgtctggagcatccatattcttcgagagcttgtcgtacaaggtgaatccgcagactgggtatattgattacgacaagcttgaggagcgggcaatggatttccaccctaagattctcatatgtggtgggagctcataccccagggagtgggattttgcacggatgaggctcattgctgataagtgcggtgcggtgctcatgtgcgatatggcacatatcagcgggcttgttgcggccaaggaatgccgtagtccctttgattactgtgatgtggttacatcaactactcacaagaatctgagaggtcctagaggtggtataatatttttcaggagagggaaaaacttaaggaggcgtactggatctttttctcaagcggatgagaatgattatgacttcgaggacaggataaattttgcagttccacgctcaaggcaaggaggaccccataataatcatattgcagccttggcgataactctgaagcaagtagcaacacctgaatacaaagcatacatcatacaagttaagaaaaatgcccaagctttggcatcagccttactcagaagaaaatgcagattggttactggtggcaccgataaccacttggtactttgggacctcagaaatttaggcttgactggaaagaactttgagaaggtctgtgaggcatgccacatctccataaataagatgccgatatatggggataatggctcaatatctcctgggggtgttcggattggaacacctgcaatgactactagaggttgcttggaagatgactttgaggtgatcgcagatttcctcatcagagccacccaaatagctagtaatcttatgaaagaacatggaaaaatgcagaaggaattcctgagaggcctacagaacaataaagatatcatagaactccgtaaccaggttgagaattttgcatcgcagtttgcaatgccaggttttgatgtatgagtgtgcatgtatgtgtacatatcttggtgaggttgtccagattcatcaggaattagcaaccgtttcactctttgccgaagtgtttctttcaacaggagcagaatagggaaagatcgttttttcttttgttggaaattggtcttgactgaagctgtacatgcatacttctgagttgtcatttatgtaacgtattgaaccttcatataacggctttgtataggagataattttcctccatgcgtaaggatcttnaaaaaaaaaaaaaaaaaaaaaaaaaaaaaaaaaaaaaaaaaaaaaaaaaaaaaa

SEQ ID NO: 24145 - DNA, 765 bp, Oryza sativa
  Clone ID: PAT_MRT4530_29156C.1
atgaaaaagaaaactgctgtgaagaagagatcggcaccagcaccatctcaacaagttccaacgcctcctcccccttcaccccctgtacagccgatgtcaagtgatcgtactccatcggctgtaggcagccacaacattgaggaagaacaaccagctgctcctgccatcccaatcttagccgatctgttctccttccatatcaaggattactttgacaaggaagaagaagaagaaacatcaagcaaagccttaccttccctagctgaagatgttaagaaaaatcttgagagcatatctcatcggctagaagcatctcttgatagtttagtgattgatttgtaccttgagcaacatcaattcaatctagagaaagctagacaaagattggccgatcggcgagagcggaagggcatcgaagccacaatcgaagccaatcggcaactcgtgcatgaagagaagtccaagcttgatcaattgtctgaaggtccgatccagtccaacatagatcggcttgtaacaaaagcccgaaggattgatctcgtggcacaactggaagaatgcaaagctgaattggccttggaaacacagaaggtagccaatcttccaaaaacaatcgaagagcaaaaatcacgacttaaatcggctaacaaaaatgttgccgatttaaccaagtctgtgaaggttatcctaggaaccgacgcccaagacatccaagccatcgaagaagtagagcaaattaggcaacgggcaatatcggctatctag

SEQ ID NO: 24146 - DNA, 460 bp, Oryza sativa
  Clone ID: PAT_MRT4530_29157C.1
cgagtgagctcacctgggcacaatgggattgggtgacaaaaattgtggatatcaaaatgcgaattgttcaagatcccaagtggctgtgggaatcactcaacttgcaagatggaggcattgtttcacacaagattttgtctgtggttgaaaaatggcaaagattggaaacaattacaaactggggccagaaccaatcttgggtgccaagaccaagaataattgaactggtatatgaaattatgaagctaaactgggccacaaacacatagagtcacaaacaaattatgtctgcacaaaaatggaacttctgctttttgcttgtacaatgcatgaaatcgcacaaatggtcatagcccctaatgtatcatttatagtgccataagtcatattttgaaattttttatgtaataaataagtaaataaataaattcagttctcccattatttcaaaaaaaaaaaa

SEQ ID NO: 24147 - DNA, 582 bp, Oryza sativa
  Clone ID: PAT_MRT4530_29158C.1
atgccttgggaatgtgaagatgctaagcatctaaatggaatcttcactctcctcttgacaagtgtcctctttatgacggtttccaccggtagaaacggccacaaccgtcattgggatgaggagtacaaccatcatacaattgggctagataccctgaccggctctgctgtcctagtccttcctcaggatgctgacattgacctcgacctcgccatcggccacaagcagaaaacaacgacaacagtgacttccccttggcagatcttccttcacagcgtcgaaggagacaagcggaccaccgggtccgcttacatggtgtcgaagatgaggggtggtggcagtggatctggcaatggccatgctgtccctgccctctcgtggtccgcctcgctgctcgaagcgttcacgctcgcctccctctcacaatccacctcgttgctcacgtcccccgatgagggccactatagggacaacagcaagaacgagaataacaatgacaacacggtggtgaaggatgacagcggaaactaccggatggtgggggagagggtggcggcgacaccaacaacactacgctgttga

SEQ ID NO: 24148 - DNA, 401 bp, Oryza sativa
  Clone ID: PAT_MRT4530_29159C.1
gcgttgtttgaggctggacgaatggagcgacgcggccggtgagcgagagaggggggctgcgcagtgtgtggcttggagctgtgagcggcagtcgaagatcacgacggagtcgttagcgctggacgcaccgccaaacgtgaatctgccgcggtggcggagcacgtcggcgagcttcgacggctggggctggctgctcatcctggcgtgccgtgtggtagaagccgaggaggcggggtgggttgcgggcgcggaaacagcagaggaaagccaggttggaggagtgacggagccagcgcctggagacgagggtggtggggaagctgaggtggaggaggtcgtcatcagtgagcaccgtagtgcagcagcgttggtgggggcttggatcggggcggaaccatacg

SEQ ID NO: 24149 - DNA, 1304 bp, Oryza sativa
  Clone ID: PAT_MRT4530_2915C.1
cacgagggtggcagcgaggcgaatccggcgacggcgcgaattccggcgaggtattcgccgcgtggggcatggggaagatgctggatccgaagcgtctcatgtctgcgcgacaggagcggcatcgccgtcggcggcgacggcaactccgaccccgcaattctgaaggcgccaaaagaacaagatattcagtgcctagccttccagaggaaatctggggccatatacactccctaatgtcattcaaagatgctgctcgtgcagcatgcgtgtctcgtgcttttcgtcattcctggcgatgccatcccaatcttatatgttgtattggaatactgggctcggatttcatcaacaaatttgaccgcattatgaaaaatcactcaggaattggcatcaagtcggtaaagtttcaatataatagtttttacaatactagaaggagcactagcatcagccatcatttcgatagttggcatcagattgctattacaccgtggatcgaagaactcaccattagcctatctctatcttcattcaatatggagtacagcttcccatgctcacttctagctgatgggagagcaagctcaatgcggcatctttatcttggcaattgtggattccatcccacaatcaaccttgacttgagaaacctgacaaggttgcatctgattaattgcctcagccacctagaagtgtttgattgcagaattcaagtagttgagaataaggctccaaatctttgcagttttgactttggaggtaggcagatggttgatacaccaatattgcctagcaaattcctccatctcaagtgcttgaccattgatcataccattatctcatcttccccagcttataattatctttacctggtttattttctcgacgcttgcccttccttggagactttccttttgggtatatcgcagaaccacatggagcatgactcgattattggagattcctcacatatgaggcaaatgccaggacaccgtcatgacaacctccggagtgtggagatcaccggtttctactctgcaaagagcttgatcgagctaacatgttatattcttgacaatacagttgcactcaagtaccttacactggatacaactcgtggttttttcagctgttctacaggtgaacacgacagatgctttcctatggacaaaatcatgataacggaagccaaaagggcagtcctggctatccaaacatacatcgagcgaaaagttccttccacggtcaagctaaatgttgtgaagccttgcagccgttgccatgctgttgaatcatatttgtaa

SEQ ID NO: 24150 - DNA, 638 bp, Oryza sativa
  Clone ID: PAT_MRT4530_29160C.1
ggcccggcgagcccaagggcgaaaaaatatgggaatcacaatttcacaaggcagacccgagcctaacaggggatctaaaaaaaaatggcctaaaaaaccctgttaaattaaaaaaaaattatttcagggggcattgaattgccctactgcccccaaaaaaatatgaagctttaatccatgagaaaatgggcccccaataaaacccaaattttttaaggaaaaccgggagggggttattttcggcaggagttccgagcattttatttaaaaaaacttcccgctttggagggcccccaaagggtaaacacttttaaacaacattggggggaaatttttgggggctcatttgaaggaaccgcccaactagtttttaaaaaaagacaaaacgctcatgagggttcccgggctccaaaacatggggaaaaaaaaaatttccatattggtcttgggccaacatgcccacagatgggaatatttcatccatgactatttccgggggtttgggaacagggcaaggctccaaaactttttggatgactctgcacccataggggatgaggggataagggaacaacttgaccatagaagggtgagatgaaaaacggaatcgaattttccggaacacattaaaaacattt

SEQ ID NO: 24151 - DNA, 3893 bp, Oryza sativa
  Clone ID: PAT_MRT4530_29161C.1
tcagaggatgggggaggtatcgtcatcgacgatgcattggatgtagggatcgagccatcgaggtcggggtccgccgtggacatccatcgccgtggtcacgctccaaacgcttgagctggtgaggtgggaactgtgcgcggacatccgccacggtgccgtgtcatcggcgcgggtgaccacgcaggccgtctggcaagctgtgggttccctcctcgccacgccaaacccgtgctcgctgacgcgctggagcgcaggacgactccttcgtcgcctctgcgaccgccacgcgccacccatctcttcaccgcgtgcctcctcacctcctccccacgcttcctccacctccccctctgctccccttccccccgccgccgccacgccggtggtggtgcgctgctcctgcgcccgccgcatcgccgcagggcggagcccgggggagtacgccatgctcgccgcgcgccgagctgcttgctcggcggcggcggttcggcgggagccgccgtggcgttgggtgggtcggcggttgccgcggcggctgcgctcctcgccgccgccttgcagcttgtctggctacggtggcgcggcggggattctcccgaggaggaggaggtttcacatgaacatgacaaaagaatcgtaaataataaggcccttggcacatcgacagacttgttagatgacagtagctattcatctcgaagaactcatgaaaatgtcttttcagagccatctgtttctggaagaatgactgtggatagaacggattgccaaactgatgttttttctggtgtagatactgtaaataatacaacacaggttggttctgtaattagtacttacaggtcgttagacacatttgaaggtgtttatggaccagcaaacacaagttccatagaaaaggtccaagatattctcccacaatcgcgttctgtgtctgatggacaacatcaaagcagacattttgctaacagaagggctcagctaggtggactgcctcatcagtttttatcactttcaaaacagaacgagcagactaaaaatggccaaggtcctcctgataataaaacagatagtgagggtgccaatttacttggatgccatcaaagtgatcaaggagactatgttgattttacgtctctttcatccttcaaaagaatcaacgagcatccactgaattttattcctgaagcccatgccagcaatctgtttgaaccaagaaaagcatccgagttcacaaattcttatgcagggggctcatatttgagagcagggcgattggttccagttgcatgcttaagggatggtcctgtgagtaaacaaaagaaagcaatgaatgaccatgatgatgcaaagttaattggctggagtatttctaatttactgagcaaggagaatccagaaaactctacttcagcaaatagagctggattgaggggaacaaaggacgtgccagattacttgaggagatacaatagtttgttaattgatggaagattgaaagactctgtggatctattggaaagcatggagcaaaagggattgcttgatatgaataagatccaccatgctagctttctgaatgcctgtaagaagcaaagggctgttccggaagctgttcgtttttgcaagttgatcaataacccaaaaatgagtaccttcaatatgcttttatctgtgtgcgctaattcgcaagattttgatggggctctccaagttatggtgctcctaaaggaagctgggctaaaacctgattgtaaactttacacaacacttatatcgacttgtgccaagtgtggaaaagttgatgctatgtttgaggtcttccatgagatggtcagtgctggaatagagccaaatgttaacacatatagtgcactgattgatggctgtgcaaaagctggtcaagtagcaaaagcatttggtgcttatggtatcatgagttcaaagaaggtgaagccagatcgagttgtctttaatgctttgatcagtgcatgcggtgaatctggagcggttgctcgagcttttgatgttctatcagaaatgacagcagaagcctctgaatctaaaggatccaaaccgattcttcctgatcatgtcacagttggagctctgatgaagacatgtattcaggctggccaggctgatcgagctcgtgaggtatacaaaatgcttcaggagtacaatataaagggtactccagaagtttacacaatagcattgagaagctgtagcttgactggtgatttaggatttgctctgaagatctatgaagatatgaacaagattggagtacaacctgatgagatgtttctgagtgctctagttgatgttgctggccatgctaggagggctgatgctgcctttgagataatgaaagatgcaagagcaaagggatatcaagttggaaccattgcatacagttcattaatgggtgcttgctgcaatgccaaggactggaaaaaggcattgcagctatttgaggagatcaagtcaatcaaattaatgccaaccgtttcaatgatgaatgctctgatcaccgcattgtgtgatggtgatcaagttttgaagtcttttgaggtccttagtgagatgaagagattaggagtctgtccaaatatgataacctattcggtgttatttgtggcttgtgaaaggaatgctgaagcacaactgggtttggatctatttgaacaattaaaaatagacagtattgacctcaatcccacaatcgttggttgtcttactggcttgtgtctacaaatgttcgacaatgatctttcactgggcaatatcgttgtcacattcaacttagggaaaccacagattgagaacaaatggacctcctcagcaattaaggtctaccgtgaggcaatttccacaggactattaccctcaagtgatgttttgtctcaagtgttgggatgtttaaggtttcctcatgataatacattaacaaatactttcattgaaaatatgggaataagttgtgatattccacatcatcccaatgtgaattcactgttggaaggttttggtgaatacgacattcgtgccttttcaatactggaggaagctgcttcgttaggagcagttgaaagtatttccatgaaagatacccgtattcttgttgatgcccgaaagtcaaagatctacactgcggaggtttcagttcttacaacattgaggtctttaaagcatcgactagctgcaggcgcaaggttacccaacgtgacaatattattacccacagaaaagaaacaagtcggccttgatgaaagggagaagacacttaaacttgctggaagagtcggtcaagcagttggttccctgctgaggagattaggaatcaaatatcatggcgaggagtctcatggaaaaatgaggatcaacgggcttactctaagaaggtggttcaatccgaaattgacgagcacatcctccactggaacaccagctgacttgcttcctctgccgtcacgattagccaaaggaattgcagatcagcagcgcaacatcagaaacctttctcttgagtaatccatgattgaccttcctttctcgtggatcaatttttgcgtaccatcaagcaagggcaagagaaaaatcttagaaaccacccagaaaatagttcagcttgataaaatatgtaaagagtttctttgtttacaggaaatttatatatcatacgtagacactcgtgtgcatcagattgcacaaacgcatatcaggatatagaatattcagctgcttttgcagatgaatttgtcttccatcttgtaacatggtgccaagatcacattgaaaataagaatataagaatggcgtggctgtgacgtttttcttttctaaaaaaaaaaaaaaaaaaaaaactagaccggggatccgcggggggg

SEQ ID NO: 24152 - DNA, 127 bp, Oryza sativa
  Clone ID: PAT_MRT4530_29162C.1
ggggaaagccttcttgggatgataacgaaattatggcactgattcttttttgatctattactgggcaggtcttgcttacaaacgggtttgatgaaatacttctagtatggacctacgcatatcttgc

SEQ ID NO: 24153 - DNA, 324 bp, Oryza sativa
  Clone ID: PAT_MRT4530_29163C.1
atggcgatcatccagttcaacagcattggcctccccaaggacagccgcaacctccaggccggcccaactctgcacacgcgctgcatcgccaacctccgcgagctgtgcgccgcggtcgccacgggcgggacggggttcgtcgtggcgctcggccacaacggcgagtgcaagccaccgggcccgcacatgtgcctcctgagcgactacgggtgccatatcgccggcgtggcgaggcggctcgcgcacgcggcgaacacattcctggccgaattgttcgcgttgcggccgctagggttcggcgctagcgccggggcgctccgatga

SEQ ID NO: 24154 - DNA, 1260 bp, Oryza sativa
  Clone ID: PAT_MRT4530_29164C.1
atgtcgagcgaagcctcgtcctcgtcctcggcggcggtggcggtgagggatctcggggatgacaacccctcggcgtcgccggaggttgacaccacctactgggcggcgcaggaagaggcgaccgcgctgctggagtcgatggccgcgagggttcgcggggaggaggaactctcggaggagcagatgcaagccaacgaccaactacaggaagacgaggtaatagcactggaagctatttttggtggtgatatggtgatcttggagaataaggacagtcttcgatttattcagatttttgtgcactattcacttcctgatggtatccgtgtgttcttgaatcttcgtcgaagtggagctttggttggaactggtgacaatgaaaaccacaatggtggagaagtctgttatgcttgcagattgcagcatttaccacctgttgtgctgacatgtttgttgccacgatttacagtgagaagagatctcacaaggtatttttgcaaagcctttctgaatgcggaatttgtcttagtgaggatgctgtgtatggagtctcactgcaaaattcatgtgaaagaaaggaatttaacacaactgacatgtcctgatacaaattgccgcagtccacttccaccatccttattgaaaagcctgctgcgagatgatggatatgcacaatgggaatcatttgctctaaagaaactgttagatgcaatgcctgatctagtctactgccccagggttgctttaagcttacagtccttctgctacacccaactatgctatttttttcacaagaaaaaggatgaaaatgacatctatttgatggaacgtcagaagttgcattccatgccagcggaacaattgttgaaagaacggagggaattagaagagttgatgaatatccaggaagcgcttcgtagttctaagcaatgccctcattgtaagatggctatctcaaaaattgaaggttgcaacaagatgatttgcgtgaactgtgggggatacttttgctatcgttgcaaccaggcaattaaaggatacgagcatttctggggtggaaattgtgtgctgtttgggacccacgcgcactaccaaattcgaaacccacagcagcagcgtgatgaaaatcctggtgaccacgctgaactcttagaacaacgggtgcagctcacttatccctgtccaaactgtggcagtcggaacgaaaagtacccaaaattagagctttcctatagcagtacaactttggatttgcagtag

SEQ ID NO: 24155 - DNA, 159 bp, Oryza sativa
  Clone ID: PAT_MRT4530_29165C.1
aaaactcataacatagcataaacatgaattaaggcaatagaatgacaactgtgcctggacataggtgacatgcggaacggtattggagaggcactgggtctgactaacggacagagcaagggagcttaccagaacaaaaaaaaataaaaaagggggggg

SEQ ID NO: 24156 - DNA, 1031 bp, Oryza sativa
  Clone ID: PAT_MRT4530_29166C.1
tttttgtttttttttattatgacttaagggtatcaatattcagaagaaaaaatgaggtacattattgattattcagatttagtactagcatatgcgtgtatcagtattcagaatgtagctagctagcatcaagccacagaagaacaaaaatcaagtctcaaatctatttatcagggtacaaaagagtacaacatcagaacgaatcttcgtgtagcacatcacaaaccaaccatccatccatccatccagtgtgcattcgtttcttgcagagtaaaagctgaacgacgtagagatcaagagacagaaaagattttttcccaaagaaaaatgggtgggtgactagcttgtttcacggatcagaagatggatgagaagacggcagaaaccatcgccgccgcgacgacgccgtagctgagccccgcctgaaccttgaagccgccggcggtggccgccgccgcccccggggtggtgcttgacggcgtcgtagccgctgccttggaggcgttggcgaagacagcgtagtccggtgagcttggggtcaggtgcagcaggttgatgcagagggagacgttggcgttggggagcttgcaggcggtgggcatggcgaggaggcggtcgaagcggaggccgagcgactggacctcgttccggccgccgtgcacctgctggatgatgtagcacaggcactcgggccgcgcctgctgcgtcgccgacatgtcgccgcagcacgtcgacgacggcgcctcctcgtgccccgtcgcgtagtccatgcagtccgtcagcttcgtgaagtcctgctggcacttgctctgcagcgccgcgtctggcgccgccgccgccgccgccgccacgcaccacgccaccaccgcagccaacgccagaccgcgccacgccgccatacctctcgccggcagcttggttggtagctagtgggctaactcgatcgagctgtgtgcagcaggtggtgtggtgtgaacgaccgtgctcctgccgcccgggggtcccgcgccccgtggtttataggcgagagg

SEQ ID NO: 24157 - DNA, 2964 bp, Oryza sativa
  Clone ID: PAT_MRT4530_29167C.1
atggcgagctcttctatggcggcggcaatccccaaccctctgtttggcctccaaatctcggagaagctaaccaaacagaatcatcctctctgggctgcacagatcctcaccaccttgcgaggtgcgcagctggaggagcacatcgtcagcacgaccgcagctccggcggctgaaattgaaaaagaagacggcgacaaggacaagaagaccaagattgtcatccccaaccctgagtacaagacatggtttgttcaggaccagcaagtgctcggattcatcttctcctctctatcaagggaggtgctgcaacaagtggccggcgctaggacggcggcccaggcatggaacatgattgatgacatgttctcgtgcaagtcgaaggcgggtacaatcaatgtactcctcgccttaaccaccacacaaaagggacctatgtctatcagcgaatatatcgcgaagatgaggtccctcgccgacgaaatggcggctgcagggaagccgctggatgaggaggagctggtggcgtacatcatcaacgggctggattcagaattcgacgccgcggttgaaggactgatggccacggcaaggattgctccagtttcaatttctcatgtttattcacagctcttgagttatgaaaacaggattcggattcggcaagcttatctcaccacttcggcaaatgcggcaaaccgaggtggtggtcgtggtggacgcggcagcagcactggaaacagaggtggcggacgcggcggcttcggtcgtggcggtcgcggccgtggcgcccctagcggcgcaagtcagggacgcgggcgaggcaatgatactcgccccgtgtgccaagtgtgtcacaagcgagggcatgttgcaagcgactgctggcatcgttatgatgactcatatgttcctgatgagaagcttggcggtgctgcaacatacgctacgctagacaaattgacaaccaaggagagatacaagggaacagatcaaattcacactgcaagtggcgaaggtatgagtattaaacatgttggtcatgctattgttcctactcctagtcgccccttgcatcttaaaaatgttttacatgttcctgaagcggcgaaaaatctagtatctgttcataaacttgttgcagataattatgcttttcttgaaattcatggcaaatattttttgattaaggacaaggccacgaggaggacaattcttgaaggtccctgtcgacgaggcctgtacccacttccagccagatcgtctttgagacaggccttcgttgcgacgccatcttttgtgaggtggcatgggcgtcttggtcatccctccaagccaattgttcttagaattctcagtcaaaataaattgccttgtcttagtaattctgtcaatgagtctgtgtgtgatgcctgtcaacaagcaaagtgtcatcaattaccttttcctagatcaactagtgtgtcaaataatcctttggaacttatccattccgatgtgtgggggcctgcctctgagtctgtaggtgcaaagaaatactatgtcagtttcattgatgattatagtaaattcgtttggatctactttcttaagcataaatctgaggtgtttcagaagtttcatgaatttcagaaacttgttgaatggcaatttgatcgcaaaattctttcgatgcaaactgattggggaggcgaatatcttaagctgcacactttctttaatgaaatagggatctcccatcatgtctcttgccctcacacacatcaacaaaatggagctgtagagcgcaaacatcgccacatagtagaagttggtctatctcttttagctcatgcctccatgcctttgaaattctgggatgaagactttttagctgctacttatctcattaatcgccttcctaatataccgggggcatttggcccggtacatggagcaaatggcgacttggcgggagaatccgcctcagattcatcgtcggtccaggcgcagctgcagcggcaggcctccggatctgcgacgcagggggagtcggagcagcagcgctcgggcatccaaccagcgcgcgccacgttgcctgctgcatcgcctactgctgctcctccatcgcctgcccgtgctgttgcgtcttcgtcaggtggtgcgcagcagtcacatcagccaggatcgtctgcgccgtctgagtctgcacagctatctgaggtaatgcgacctaaaacaaggttacaaagtggtattagaaaagagaaaatatacactgatgggacagttagatacagttgttttacatcttctggagaaccacaaactttgcatgaggctttaggtgataaaaattggaaagaagcaatggatagtgaatatcaggctcttatgaaaaacaaaacctggcacctagttccttctaagaaagggcagaatataatagattgtaagtgggtctataaggtcaaacaaaaggccgatggcagtctagatcgatataaggctagacttgtggcaaaggggttcaaacagagatatggtatagattatgaggacaccttcagtcctgtagttaaggctgctactatcagaactattttgtccatagcaatctctagaggttggacccttcgtcagctagatgtacagaatgccttccttcatggggttctagaggaagatgtctttatgaggcagccaccaggttatgaacagaaagatggctatgtgtgcaaactagataaggccttatatggtttaaagcaggctcccagggcatggtattccaggttaagtactaagctgcatgagttaggttttaaatcatctaagtcagatacatctttgttcttttacaaaaaattaagtgctcatgaaggtaatcctcttggaccagaagacagtaccaggtacagaagtctggttggagcattgcagtatttgactctgactagaccagatttatcattttcagtaaataag

SEQ ID NO: 24158 - DNA, 163 bp, Oryza sativa
  Clone ID: PAT_MRT4530_29168C.1
ccttatcaatgatagcatctatcttcttgatgagaggtttgaacaaaaatccttcgaactgaaagaaatataagcttaaatggctaatgttgtataatgggaaaacacgccacctcaagaaagagaagagagattgcgtgtatttcatcaatgggagaatgtt

SEQ ID NO: 24159 - DNA, 413 bp, Oryza sativa
  Clone ID: PAT_MRT4530_29169C.1
ttctctatgcagattggcaggatgttggatgatcggcgtctactggggttttgctgttttataggcctaatcttgtgtcatggagtgcacgcaagcaagctactgtatccagatctagtacagaggcagaatataaggctttggctaatgctactgggaattcaggcacccaaaattgctaaggtatggtgtgataatattggtgcaaagtatatgacagctaatcctgtttttcaggctcgcaccaagcatattgaggtagattatttttttgttcgtgagcgggttgcaagaaaacttttacaagtggaatatatatctaccaaagatcaagttgctgatggcttcaccaaaacactatcagtcagacagttagagatgtttagaaacaatctaaacttacaggttcagat

SEQ ID NO: 24160 - DNA, 531 bp, Oryza sativa
  Clone ID: PAT_MRT4530_2916C.1
cacgaacccgacggcgggagcaagcggcgaacggcggaaacggaggagagaggcacgggggacgattttatagcgccgagagggagagagggcggccgggcgaagggggaaacggccgcgaaagatgcggccgccattgatgccggcgaggtttaggggaaagattccgagcgaatccgagggagagagagcgggaaaagtggggggaaatggcgagggaatcacggggagtaattccccccacttcaatgcgcgcggggacggcgggatgcggcggattcggcggcggcggcggcgctagggcacgggcgggcggcggctgcggcgcgaggagggagatgacaggtgggtcccacccgtcagcgagagtggcgggcgggcccgcctgtcagcggcgcgcgcgcgcgcggggagccgatgggccgcgggagaggagagagagagggagagggaagtgggccgagccggcccaagagggaaggggggggaaaaagaacttcttttagggtttttctttttataaaacctttt

SEQ ID NO: 24161 - DNA, 377 bp, Oryza sativa
  Clone ID: PAT_MRT4530_29170C.1
aaacacaacctggaacccccatagggcaagggcccaaaagaatttacgggttccccctccttaccagtttttccaaagggggcaggaaaaatgggggggaattcattcaacccggtatttttctataccccacactttcaagaaaaaagtttcccaacaattttccagattaatggcccaggaaattaattcccccggggtgggctggcaaactatgggccgagctagaccggggggaaggcccctccggcatggccccccctggggggaaaggggccccggggccgcccggcccgggggcggaaaaacgggcaccctggggggccccggagccacttgccgaggcccttggggggggaaggggcacccccccccgg

SEQ ID NO: 24162 - DNA, 3096 bp, Oryza sativa
  Clone ID: PAT_MRT4530_29171C.1
atggcgagcttttctatggcggcggcaatctccaaccctctgtttggcctccaaatctcggagaagctaaccaaacagaatcatcctctctgggctgcacagatcctcaccaccttgcgaggtgcgcagctggaggagcacatcgtcagcacgaccgcagctccggcggctgaaattgaaaaagaagacggcgacaaggacaagaagaccaagattgtcatccccaaccctgagtacaagacatggtttgttcaggaccagcaagtgctcggattcatcttctcctctctatcaagggaggtgctgcaacaagtggccggcgctaggacggcggcccaggcatggaacatgattgatgacatgttctcgtgcaagtcgaaggcgggtacaatcaatgtactcctcgccttaaccaccacacagaagggacctatgtctatcagcgaatatattgcgaagatgaggtccctcgccgacgagatggcggctacagggaagccgctggatgaggaggagctggtggcgtacatcatcaacgggctggattcagaattcgacgccgcggttgaaggactgatggccacggcaaggattgctccagtttcaatttctcatgtttattcacagctcttgagttatgaaaacaggattcggattcggcaagcttatctcaccacttcggcaaatgcggcaaaccgaggtggtggtcgtggtggacgcggcagcagcactggaaacagaggtggcagacgcggcggcttcggtcgtggcggtcgcggccgcggcgcccctagcggcgcaagtcagggacgcgggcgaggcaatgatactcgccccgtgtgccaagtgtgtcacaagcgagggcatgttgcaagcgactgctggcatcgttatgatgactcatatgttcctgatgagaagcttggcggtgctgcaacatacgcctacggtgttgataccaactggtatgttgacactggggcgacggatcacattaccgggcagctagacaaattgacaaccaaggagagatacaagggaacagatcaaattcacactgcaagtggcgaaggtatgagtattaaacatgttggtcatgctattgttcctactcctagtcgccccttgcatcttaaaaatgttttacatgttcctgaagcggcgaaaaatctagtatctgttcataaacttgttgcagataattatgcttttcttgaaattcatggcaaatattttttgattaaggacaaggccacgaggaggacaattcttgaaggtccctgtcgacgaggcctgtacccacttccagccagattgtctttgagacaggccttcgttgcgacgccatcttttgagagaatctcccagaaatgtgaattcagatataccgggggcatttggccgggtggtgcgcagcagtcacatcagccaggatcatctgcgccgtctgagtctgcacagctatctgaggtaatgcgacctaaaacaaggttacaaagtggtattagaaaagagaaaatatacactgatgggacagttagatacagttgttttacatcttctggagaaccacaaactttgcatgaggctttaggtgataaaaattggaaagaagcaatggatagtgaatatcaggctcttatgaaaaacaaaacctggcaccgagttccttctaagaaagggcagaatataatagattgtaagtgggtctataaggtcaaacgaaaggccgatggcagtctagatcgatataaggctagacttgtggcaaaggggttcaaacagagatatggtatagattatgaggacaccttccgtcctgtagttaaggctgctactatcagaactattttgtccatagcaatctctagaggttggacccttcgtcagctagatgtacagaatgcctttcttcatggggttctagaggaagatgtctttatgaggcagccaccaggttatgaacagaaagatggctatgtgtgcaaactagataaggccttatatggtttaaagcaggctcccagggcatggtattccaggttaagtactaagctgcatgagttaggttttaaatcatctaagtcagatacatctttgttcttttacagtaagggagatgttactatatttatgttggtatatgtggatgacattatagtagccagctcatctattgttgccactaatgctttgcttaagaatcttaatcaagaatttgcactcaaggatctaggaagactgcattacttcctaggcattgaagtgaaagaagtaaatgatggcatagttttgacacaagagaaatatgctatggatgtgttaaagagagtgaatatgagtgactgtaaagcagtcaatactcctttgtctatttcagaaaaattaagtgctcatgaaggtaatcctcttggaccagaagacagtaccaggtacagaagtctggttggagcattgcagtatttgactctgactagaccagatttatcattttcagtaaataaggtgtgccagtatttgcatgcagcaaccactaagcattgggtggcggctaagaggattttgagatatttgaaacatacagttaagcttgggctaaaaattagcaagtctaattctcttcttgtaagtgctttctctgatgcagattgggcaggatgtttggatgatcggcgttctactgggggttttgctgtttttatagggcctaatcttgtgtcatggagtgcacgtaagcaggctactgtatccagatctagtacagaagcagaatataaggctttggctaatgctactgcagagattatgtggatacaaaccttacttcatgaactgggaattcaggtacccaaaattgctaaggtatggtgtgataatattggtgcaaagtatatgacagctaatcctgtttttcatgctcgcaccaagcatatcgaggtagattatcactttgttcgtgagcgggttgcaagaaaacttttacaagtggaatatatatctaccaaagatcaagttgctgatggcttcaccaagacactgtcagtcagacagttagagatgtttagaaacaatctaaaccttacaggttcagattga

SEQ ID NO: 24163 - DNA, 2582 bp, Oryza sativa
  Clone ID: PAT_MRT4530_29172C.1
agaggaggtggcaaggttgatggatgcatggccgcacatcggtcccatgatccccagccgaccattcctcctgcaatggtgagcccttcaggcaatcgtagcagcccatccacaatcaccatctacgagaccaactgcctctcctacgagagagagcccgagaaggtacaacacgtcctacagtgtcagtgccatcttcccacatggaatatggtatgtgtgcgtctcaggtctccaacggcctaccaaagtggccagaagggacttgtctgcatcccacagcttcatcaggtcagtgtcgtttgcgaccacctcgactagcctagacaatggtaggaggcctgcctcatgcaacgcataccacggaacttgtcgacgcgcaacagttgtcgcggaggacatgacggaaggtgctgagttgtgcaccctagactgctttcaggtaggaccgatggttcttttcaatgccttgcctagttattccttcctcctgtggttgacttccatccgttgtcgttccagatggaccaacatcagcgccgctaggacctactgcatcctttggtcatttctagtaagtcatagactcctatctcctgtttcggacatatacatgttatttctgatgcatcttgtcttacgcctgcctttttaaacccttaactaagttggatcttgaatgcaaataacctggggacttagagtcgtgtaagatcctaagatcccgaacccatatatctcttcactttatgtatgaaagattgtttctttccagaaataatgtgacacatagacatcgggaagtataccacaatcaccggctgtagcaagtacatgagagcaaggcaggtgccaaagcttaggcttcgtacagttgcaactgcatctgccatcctactttacgacacatttttgcacagcttgcctacggtagataccacgcctgctcctatcaacacaaattacttcatattgacaaatctatgcccttttgcccttaactattttatgtaccatgtccttagtaactcttgtcccataagatatattgttgtgtaccattgaggtatcaattttcttgtataggtccttaaggtaggcctgtgtgccatgaaggataaattcaacaataccaaccaatggcattccttgcactcctcgcattacccaattgtaaacctcagccagattagttgtcattatgtcatatcgagaaccatcagtgttgtacaagaggacccactactcctttggctcattctcaattcaatgcgagaaattccgaatcaatgatgccgacctccctctcatactaggtgaattgtcatgcagtggacctagagctactggaggcttgtcaccttcaaccagtggccagcgagattgctcgtccatttgcttggttttcaactcatccgaccttttccacaactcgttgaatttctactattgattttgtgcacaaagcctcttaaaatgattcatcaggtgcttgttcttgaattgcctgtagaaattagcacacatgtgacgcatgcaccatctactctgaacatcaggccacctagccagaagtcccttcttatcccaatctttttgcaagtagtcaattgcctgtagtatgcttgcatgacgatcatgtataatgcaaacatcaggcctcttatgcatgactttggtgcacactttcttgataaaccagtactagctttcaatgctctcactctcaacaaatgcaaaagtcataagtaaaacttgattgttcccaaaagctccaattgctgtcaatacctgacccctatatataccggtaaaaaatgtaccatcgatgcacaatataggacatcaatccacaaaatacgttcatgcaagcactcaatgcgaaaaaagctctatgcagcattctcttgttaggctcatcagatgatgggaatgtatgaatgtcgaagtaagtattactatcttcttagaattgctggctaacagacgaagcaaattatcataagatacttcaaaggtgccatacatcatctcgataatcttccgtttctccatccatgcttttgcatagcttatggtgcatatgaatttgtcttcattgtggctaataattaatcttggttcaaacccaatattgcggacaatgctgctatacatcttagttgcaataaaagctgaagtgatgttgcggtggtacttctccaccccttgtaagtggcatttatgctcggtcacaatgcttacttttcaatagtcattccatttacccttatatgcatgaacatgccactgacactcttcattcacacaccttgctttgtacacagatttggttgacttggccaccctaaactctctctacaatgagactgcacaatgctccaccgcctccttcagatcctccgaatgagcatacctagcaccctaaattaccttgttctccttgtattctcaagttacatgatgctcctcagagataacaaggcctaaaaagtcctcatttgtccaatcagcaggcattacatcatcttgctcatcagacgatgcatcacccttcacttgctcgagttcatttgcttgac

SEQ ID NO: 24164 - DNA, 2277 bp, Oryza sativa
  Clone ID: PAT_MRT4530_29173C.1
atgccgaaggaagtgaagactcgtgccaaccgtgtgcagagaaggggcatgcagatgcagcatctgcacaaactctgctggaggtggctgaagcaagatggtgtttctgatatggatattattgtaaggcaaagcatttactggcctgatggctcaatcaagaagcgtacaaaatcatatgcaactgagaagacccataagagaatgtgccaattggttcaagctttagtggacaagtataatgaggatcacaatctttttggggatctggcacatatgctccaagatgttttgcactaccaatcagttcgtgacaaatttatggggtactatcatctcaatttcactacaaagactaaagaagcagatgatttagatgctggcatcgacaatctattctttgtggaaatcagacgttcgggaagaggaaaacatgaggaaatgttggtcaactgtttctgcatggttaatcctactgacaatgtatgtggttctcaccaacctgaacttagatattattgtaaatgtgttcttggagaaatgcccggggtcttcccggctagcaacgcaagctgcgagctagccgatgaagataagatatgctatggttgtgccaaccaaggaagtgttgatatgaagcaccctgacccttgcaaatatgatggtggtcacttggatatgggtaggccatttgaatgtgttgaagagtggagtgactctgaagatgatgctgaatatgtgaaaactaaggaggctaagataaggcatatgtacgagcccattacttgcttgttccatgtcagggttcccctccctcttccaggatccaaaccctagaaatctcctctgcgttcctctccccaaatcaccgaaccctaatcccgcttcttccaccccaccaaccccatgccactgcttcgcacatacagccggcgccgtcgccgtcgccgcgacagccgtctcagtcctactcgctcgcgcgcaccatatcaggaggaggaacatgtggttgagactgcatctgcaaaagcgcgcgccgatccgctgtatgcaaaggaggggcatgtgccatcttacatcgctgctacttcctcatcctgtcagcaagcagatgcagtagctcaggacaccgaggtcttgccaccatcaggaagctgcctttcctcatctccggcatcacacgtctgggcccgacatgtgaaagattggggactcatattttacatcagggttgatcttcagggatctttccacacatatcctgatgtgggtgggccatttcaaagctcacaggaagctgacaaggctattgatcgctatcttgaggaccatcgggatccaaaaatgcacatagggcaaaatgatgatatctcttcaatggagaatgttatacggcgatgcctttactggcctgatggcacaattaagaggcgtacaaaatcatttgcgacttgggaagccaaaaagagaatgcaccaattcatccaagcattagtggacaagtataatgatgatcacactttgggggatttggcacttaaactcaaagatgttttgcactaccagccaatttgtgagaaccatatttggtactatcatctcaatttcactgcaaagactaaagaagctgatggtttagactctactagtgacaatctgttctttgtggaagtcaaacgtatgggaataggaaattatgaagaaatgttggtcagctgtttctgcatggttaatcctgataatggtaaaccatgtaaaggttgtaccaacaatggaactgttgacatgaagcaccctgacactgatgaatactttgctggccacttggatgcatatttgccttttggatgttttggaaagtggagcgactctaatgacgatgataaatacgtgaaagctagggaggccaagttaaggcatatgtacgagaatattaaacgtctgctatgtatatatctcaaatgtccttggtttgcatgctcactgtgatgagatttgcatgccttgctgaatttggatgtttggagataattaatttctgtggactgaatgcctgcactacacctgtttgcgcatgatcaccgtaggctacttcatactgtaattccggccaatccatcttaggacctactgtacttatttacttgggtcagtcattgaatgccggagtcggggttcatttgtcaggtgatagcactgtaaaacttgtagcatactgacctttcatagcgcactaagcggagaccatcaacacacgtttaaaaaaaaaaaaaaaaa

SEQ ID NO: 24165 - DNA, 1501 bp, Oryza sativa
  Clone ID: PAT_MRT4530_29174C.1
aggtggcggacgcggcggcttcggtcgtggcggtcacggccgtggcgcccctagcggcgcaagtcagggacgcgggcgaggcaatgatactcgccccgtgtgccaagtgtgtcacaagcgagggcatgttgcaagcgactgctggcatcgttatgatgactcatatgttcctgatgagaagcttggcggtgctgcaacatacgcctacggtgttgataccaactggtatgttgatactggggcgacggatcacattaccgggcagctagacaaattgacaaccaaggagagatacaagggaacagatcaaattcacactgcaagtggcgaaggtacgagtattaaacatgttggtcatgctattgttcctactcctagtcaccccttgcatcttaaaaatgttttacatgttcctgaagcggcgaaaaatctagtatctgttcataaacttgttgcagataattatgcttttcttgaaattcatggcaaatattttttgattaaggacaaggccacgaggaggacaattcttgaaggtccctgtcgacgaggcctgtacccacttccagccagatcgtctttgagacaggccttcgttgcgacgccatcttttgtgagggtatatgtatctcgtgatgtcacctttgatgaacaagtgtttccctttgctaatcttcatccaaatgctggcgcccgtcttcgagctgaaatttctttgcttcctcctactctaatcaatgagaaaacatctgatcaagggggagaggaacatcatgatcatctgtttaatatctctatgccaaatgctactgatatttcatgtgcagaatctcccagaaatgtgaattcagatataccgggggcatttggccgggtacatggagcaaatggcgacttggcgggagaatccgcctcagattcagcgtcggtccaggcgcagctgcagcggcaggcctccggatctgcgacgcagggggagtcggagcagcagcgctcgggcatccaaccagcgcgcgccacgtcgcctgctgcatcgcctactgctgctcctccatcgcctgcccgtgctgtcgcgtcttcgtcaggtggtgcgcagcagtcacatcagccaggatcatctgcgccgtctgagtctgcacagctatctgagaatgccttccttcatggggttctagaggaagatgtctttatgaggcagccaccaggttatgaacagaaagatggctatgtgtgcaaactagataaggccttatatggtttaaagcaggctcccagggcatgtaagggagatgttgctatgtttatgttggtatatgtggatgacattatagtagccagctcatctattgatgccactaatgctttgcttaagaatcttaatcaagaatttgcactcaaggatctaggaagactgcattacttcctaggcattgaagtgaaagaaattgggcaggatgtttggatgatcggcattctactgggggttttgctgtttttatag

SEQ ID NO: 24166 - DNA, 1379 bp, Oryza sativa
  Clone ID: PAT_MRT4530_29175C.1
atggtcattgaatggacagctggcatctatgagcctatttatgttttctgtgccttttacttgcttgttccatatcagcaagcagatgcagtagctcaggacaccgaggtcttgccaccatcaggaagctgcctttcctcatctccggcatcacacgtctgggcccgacatgtgaaagattggggactcatattttacatcagggttgatcttcagggatctttccacacatatcctgatgtgggtgggccatttcaaagctcacaggaagctgacaaggctattgatcgctatcttgaggaccatcgggatccaaaaatgcacatagggcaaaatgatgatatctcttcaatggagaatgttatacggcgatgcctttactggcctgatggcacaattaagaggcgtacaaaatcatttgcgacttgggaagccaaaaagagaatgcaccaattcatccaagcattagtggacaagtataatgatgatcacaatcttttgggggatttggcacttaaactcaaagacgttttgcactaccaaccactttgtgagaaccatatgtggtactatcatctcaatttcactgcaaagactaaagaagatgatggtttcgactctactagtgacaatctgttctttgtggaagtcaaatgtatgggaaaaggaaattatgaagaaatggtggtcagctgtttctgcgtgattaatcctattgataatggtaaaccatgtaaaggttgtaccaacaatggaactgctgacatgaagcaccctgacactggtgaatactttgctggtcacttggatgcatatttgccctatggatgttttggacagtggagtgactctgacgacgatgataaatacgtgaaagccaaggaggctaagttaaggcgtatgttcaagggccttgatgatccacgtgttacggagaaaatattcacactccctccgggtgtgactattgtggaagactaaaaagggatggaggaactactcacactacctttgggtgcggctattgtgcaagacaaatgggccaccggagtcaacgtcgcagcacgtgtagaatgtcggtatcaatgaaacacaaaggcggtatctaaaatattaaacgtctgctatgtatatatctcaaatgtccttggtttgcatgggttatctccgttggcgtgcagctccctgtgatgagatttgcatgacttcctgaatttggatgttgggagataatttctgtcgacggaatacctgcactaccccagtttttcttagaactgcactacacccgtttgctcatggtcaccgtaggctacttcatactgtaattccggccaatccatcttaggacctactgtacttatttacttgggtcagtc

SEQ ID NO: 24167 - DNA, 3942 bp, Oryza sativa
  Clone ID: PAT_MRT4530_29176C.1
atggcgagctcttctatggcggcggcaatctccaaccctctgtttggcctccaaatctcggagaagctaaccaaacagaatcatcctctctgggctgcacagatcctcaccaccttgcgaggtgcgcagctggaggagcacatcgtcagcacgaccgcagctccggcggctgaaattgaaaaagaagacggcgacaaggacaagaagaccaagattgtcatccccaaccctgagtacaagacatggtttgttcaggaccagcaagtgctcggattcatcttctcctctctatcaagggaggtgctgcaacaagtggccggcgctaggacggcggcccaggcatggaacatgattgatgacatgttctcgtgcaagtcgaaggcgggtacaatcaatgtactcctcgccttaaccaccacacagaagggacctatgtctatcagcgaatatattgcgaagatgaggtccctcgccgacgagatggcggctgcagggaagccgctggatgaggaggagctggtggcgtacatcatcaacgggctggattcagaattcgacgccgcggttgaaggaccgatggccacggcaaggattgctccagtttcaatttctcatgtttattcacagctcttgagttatgaaaacaggattcggattcggcaagcttatctcaccacttcggcaaatgcggcaaaccgaggtggtggtcgtggtggacgcggcagcagcactggaaacagaggtggcggacgcggcggcttcggtcgtggcggtcacggccgcggcgcccctagcggcgcaagtcagggacgcgggcgaggcaatgatactcgccccgtgtgccaagtgtgtcacaagcgagggcatgttgcaagcgactgctggcatcgttatgatgactcatatgttcctgatgagaagcttggcggtgctgcaacatacgcctacggtgttgataccaactggtatgttgacactggggcgacgaatcacattaccgggcagctagacaaattgacaaccaaggagagatacaagggaacagatcaaattcacactgcaagtggcgaaggtatgagtattaaacatgttggtcatgctattgttcctactcctagtcgccccttgcatcttaaaaatgttttacatgttcctgaagcggcgaaaaatctagtatctgttcataaacttgttgcagataattatgcttttcttgaaattcatggcaaatattttttgattaaggacaaggccacgaggaggacaattcttgaaggtccctgtcgacgaggcctgtacccacttccagccagattgtctttgagacaggccttcgttgcgacgccatcttttgagaggtggcatgggcgtcttggtcatctctccaagccaattgttcttagaattctcagtcaaaataaattgccttgtcttagtaattctgtcaatgagtctgtgtgtgatgcctgtcaacaagcaaagtgtcatcaattaccttttcctagatcaactagcgtgtcaaataatcctttggaacttattcattccgatgtgtgggggcctgcctctgagtctgtaggtgcaaagaaatactatgttagtttcattgatgattatagtaaattcgtttggatctactttcttaagcataaatctgaggtgtttcagaagtttcatgaatttcagaaacttgttgaaaggcaatttgatcgcaaaattctttcgatgcaaactgattggggaggcgaatatcttaagctgcacactttctttaatgaaatagggatctcccatcatgtctcttgccctcacacacatcaacaaaatggagctgtagagcgcaaacatcgccacatagtagaagttggtctatctcttttagctcatgcctccatgcctttgaaattctgggatgaagcctttttagctactacttatttcattaatcgccttcctagtaaggtcataaaatttgatacaccccttgaacgaatctcccagaaatgtgaattcagatataccgggggcatttggccgggtacatggagcaaatggcgacttggcgggagaatccgcctcagattcagcgtcggtccaggcgcagctgcagcggcaggcctccggatctgcgacgcagggggagtcggagcagcagcgctcgggcatccaaccagcgcgcgcgccacgtcgcctgctgcatcgcctactgctgctcctccatcgcctgcccgtgctgtcgcgtcttcgtcaggtggtgcgcagcagtcacatcagccaggatcatctgcgccgtctgagtctgcacagctatctgaggtaatgcgacctaaaacaaggttacaaagtggtattagaaaagagaaaatatacactgatgggacagttagatacagttgttttacatcttctggagaaccacaaactttgcatgaggctttaggtgataaaaattggaaagaagcaatggatagtgaatatcaagctcttatgaaaaacaaaacctggcacctagttccttctaagaaagggcagaatataatagattgtaagtgggtctataaggtcaaacgaaaggccgatggcagtctagatcgatataaggctagacttgtggcaaaggggttcaaacagagatatggtatagattatgaggataccttcagtcctgtagttaaggctgctactatcagaactattttgtccatagcaatctctagaggttggacccttcgtcagctagatgtacagaatgcctttcttcatggggttctagaggaagatgtctttatgaggcagccaccaggttatgaacagaaagatggctatgtgtgcaaactagataaggccttatatggtttaaagcaggctcccagggcatggtattccaggttaagtactaagctgcatgagttaggttttaaatcatctaagtcagatacatctttgttcttttacagtaagggagatgttactatgtttatgttggtatatgtggatgacattatagtagccagctcatctattgatgccactaatgctttgcttaagaatcttaatcaagaatttgcactcaaggatctaggaagactgcattacttcctaggcattgaagttaaagaagtaaatgatggcatagttttgacacaagagaaatatgctatggatgtgttaaagagagtgaatatgagtgactgtaaagcagtcaatactcctttgtctatttcagaaaaattaagtgctcatgaaggtaatcctcttggaccagaagacagtaccaggtacagaagtctggttggagcattgcagtatttgactctgactagaccagatttatcattttcagtaaataaggtgtgccagtatttgcatgcaccaaccactaagcattgggcggcggctaagaggattttgagatatttgaaacatacagttaagcttgggctaaaaattagcaagtctaattctcttcttgtaagtgctttctctgatgcagattgggcaggatgtttggatgatcggcgttctactgggggttttgctgtttttatagggcctaatcttgtgtcctggagtgcacgtaagcaagctactgtatccagatctattacagaagcagaatataaggctttggctaatgctactgcagagattatgtggatacaaaccttacttcatgaactgggaattcaggtacccaaaattgctaaggtatggtgtgataatattggtgcaaagtatatgacagctaatcctgtttttcatgctcgcaccaagcatatcgaggtagattatcactttgttcgtgagcgggttgcaagaaaacttttacaagtggaatatatatctaccaaagatcaagttgctgatggcttcaccaagacactgtcagtcagacagttagagatgtttagaaacaatctaaaccttacaggttcagattga

SEQ ID NO: 24168 - DNA, 1936 bp, Oryza sativa
  Clone ID: PAT_MRT4530_29177C.1
ggttcgcagcagcagcagccgcgccgaagcagcctcctcccatcaccgaggagagagagagagagagagagtagtgagagaggaagacgagagagccgcctccgcggccatcgccgccgccgcagcagcggggccactaccccgactgccccctcccctcctcccatggccgcgatgccaggtgggcccgaccttgccggggccggtggcgccgtcgccgtcgccgtcgacgcgatgcaggtcgacgacccgccgcgtgcgtccgccgaggagaagcatggtcccactataatgggaggaaatgatccagtcacaggtcatataatttcaactactattggagggaagaacgatgagcccaaaaggactattagctatatggctgaacgagttgttggaactggatcctttggtgttgtattccaggcaaaatgccttgagactggtgaaactgttgccattaagaaggtcttacaggacaaacgatacaagaacagagagttacagataatgcgatcaatggatcattgcaatgtcatctccctaaagcattgtttcttctctaccacaagcagagatgaacttttccttaacttagtcatggagtttgttcccgagtcactttatcgtgtcctgaaacactacaaagatatgaagcagaggatgccacttatatatgtcaaactttacatgtatcagatattccgcggattagcttacattcacactgttcctggagtttgtcaccgagatataaagccacaaaatatcttggttgatcctcttacccaccaagtgaaggtctgtgattttgggagtgctaaaatgctgattaaaggtgaagcaaatatatcttacatatgctcacgttactatcgtgctcctgagctcatatttggtgcaactgagtacacaacatcaattgatatatggtctgctggatgtgttcttgctgagctgcttcttggtcaacctctgtttcctggtgaaagtgcagtggaccagcttgttgagataattaaggttttgggtactccaacgcgagaggaaatccgttgtatgaatcccaattacacagaattcaaatttccgcagataaaagcatgcccatggcacaagatcttccacaagcgaatgcctcccgaagcaatagatcttgtgtcccgtctccttcagtattcgccaaatctgcgatgtactgcgctggaggcatgtgctcattcattttttgatgagttacgagaaccacatgcaaaactgccaaatggccgtccgtttccgcctctgttcaactttaagcaagaattagcaaatacacacccagagctcgtgagcaggctgttaccagaacatgcgcagcggcattcaggattttaattcattgttttgcactggaccataggacgaagtgtggtatgacgacatttacacttgtctgctcatacctgtgtatgccaaagggcaaataacatttctcaccttaaggttttagaacctaatcatcttcttgcaaagctgaaaatgggctcccctgacaaggtagtgtgcggtgtgccgtactacaatcaaatgttaaaccttgaggaggccattgtgtccagtgttctgccaagaggagcccgaatagctggagggatggtgggtgtattgttaagctgtggagggtgacttttatgttgaaacttcctttgctgtatgttccatgcctgtaccgcacctgcatccattcaacctcatattcacaactgatgtaatcatgataaaattgaatgtgtcaatgatggtcgattcgtatgccattatatgcgaattgactgttgtttctattatgatcaacttaacctgttattactaatggcaatgcccctgtggacgcgtggccaagcgtgctgctgagaggacatatggggtctgatattatatgttgaaagaaact

SEQ ID NO: 24169 - DNA, 4522 bp, Oryza sativa
  Clone ID: PAT_MRT4530_29178C.1
atgtcgccggtgctcgcctcggagaccgaggaggtggtagcaacggttggcggcggcgatttcgattttggcgaggcgacggcatcggagctgtctccgatttggggaggcggccccggcgatttggtccctttgttgttctgtactcaaaacatggcccatgtttcgttcaaatccaaggaagctgacagcatgtcccgctggtcgaagtaccttagtactgaagagtcacccccttcagcatcactaagctggagggctatgggtgtcgatggccctcaaggttctgcaagtggccagaaacatcttcagatggagccagttgtccaactgtcaaaggtcgctgaaggattgttagccaaaatgtataggctgaatagcatcttggactatccagttcctaatgtgcacacattttcagaagcattttggaaagctggtgttatgccaaatttcccaaaactttgcatcacattgtcaaagaaatttccagaacatcctaccaagctgcagcttgataaagtagataagtttgctcttgatgcgctgaatgaaaacgcagaaggttacttcagttaagatgctggaagctgctatgcaaaggctgacaagtctatgctctgtgcataaatgacatggagcctatttgtgttctcaatcatgtttttattctccgagacgtacatgagggactgcatcataggtaattttaggagaagattttcacagcatgattagaactgatagctgccttcaacgaccatcagtcatagaatctcttctaagaagacacctgagcatcatccatctggcagagcagcatatcagtatggaccttactgaaggtatacgggaagtgctacttgcagagagttttactgggccatttcccaacctgcaagtatttgagacaccaacagaaacacatggaggaggatctgccatagacataatatctaattggtatattgataacttcgtaaaggatgcaggttcctcagtccatttcatccacgttatcctgacatccttacaaactctgctcatcctatgagggcccaagacctggctaatgtaacatcatatcgtgaatgggttcttcttggatatcttgtttgtccagatgaactacttcgagtgaccagtatagatgttgcaatggttgttctgaaagaaaatttagtactctccctgttcagagatgaggtaaagatcaaatctcatgtggtggccatgtacatcttactccatgagaactatcaactctatgtccttccaaaagttttagaatcgaagagaatggctaaatctggacgtactaagcaaaaggaagctgatctggaatacaatgttgcaaagcaggttgagaaaatgttaatggaagtacatgaacaagcattggtgtcagctgatgctctacatcatgaaaggagaattcttctgaaacaggaaattggaaggatggttttgtttttcacagatcaacctagtcttcttgctcctaatattcagccaaatgcagatcaactgtctgtgcctaataccttgttattgcaaattgcaaggcatagtaacattcacatattcttgcagatggtcttttctgctcttgctttggctcaatcaataaaaggttatgcattatcatacttgtcatcttgtgctggaagaatacggttcttacttggtactccaggcatggttgctcttgacctagatgccacactgaagggcctgttccagcaagtcctccattgtctggaaaacattccgaaacctcagggggaaaatgtccctgctattacttgtgacttaactgatttgcggaagcactggctatccatcttgatgattgtcacatcatcacgatcatctgtaaatattagacatttggagaaggctactgtgtctactgggaaggagggcctggtctcagaaggcaatgctgcttacaattggtctagatgtgtggatgaacttgagggccagctttccaaacatggaagcctgaaaaaactttacttctaccatcagcatcttacaacggtcttcagaaacacaatgtttggtccagaaggccgtccccaacattgttgtgcgtggcttggagcagcttgctgctttccagaatgtgcttcttccattattcctgaagaggtcaacaagattggcagagattctatctcatatgttgagtcccttatcgagtctataatgggtggattggaaggtttgataaatattctagattcagaaggtggatttggttcattagagatgcagctttcgccagagcaagcagctatccgattgaataatgcaacaagagcaaaagctgtttcaggcttgttagcaccagggcatgagagctatcctgataatagttcttcagttaagatgctggaagctgctatgcaaaggctgacaagtctatgctctgtgctaaatgacatggagcctatttgtgttctcaatcatgtttttattctccgagagtacatgagggactgcatcataggtaattttaggagaagatttcacagcatgattagaactgatagctgccttcaacgaccatcagtcatagaatctcttctaagaagacacctgagcatcatccatctggcagagcagcatatcagtatggaccttactgaaggtatacgggaagtgctacttgcagagagttttactgggccatttcccaacctgcaagtatttgagacaccaacagaaacacatggaggaggatctgccatagacataatatctaattggtatattgataacttcgtaaaggatgcatctcgcactggagttgtttttgatgcatctcagaattgctttaggagctcacagcctattggtggtggatatttagcggaagcattcacagataaaagagaactcaaagcacttgttcgtttatttggtggttatggagtagataggctggataagttgttaagggaacatacatcagctctactaaattgcattgactcagcgcttaggtcaaaccgcgatgccttagagggccttgctggaagtgtaaactctggtgataggattgaaagagatgcaaatctaaagcagataattgacatcgaaacattggctgacttctgtatccaggcaggtcaggcaataacttttcgccggttgttggtagaagctgttggagctgttcttgaagagaaagtacctctcatatattctctgctcaagggattagctatgcagttgccagaagaggtacctgataaaaatgagatcattagactaagaagggttgctagcagtgttggtgtcggtgacaaacatgatgccgagtgggttcattctattctccggcagagaggttctgctaatgataattcttggaccttacttccatatctttgcgctgcatttatggcatccaatatgtggagcactactgcttatgatgtcaatacaggtggattcagtaacaatttgcattgcttagcaaggtgtgtaagtgctgtggttggaggaagtgaatacactaggatggaaagggaacatcggagaagttcactttcaaatgggcatatggatgagctgcaagagcctgaattactgagccgtgtctcagctgaagcaaatattaaatctgctatgcaactctatgtcaaattgtctgcagggttagtcctggattcatggaatgacactagcaggccatacattgttccaaagctaatattcctcgatcaactctgtgagatgtccccctacctcccaaggagcaccttagaagttcacataccttacacgattctgcgttcaatctaccatcaattatatggagcttcactgatggccacagaaccaatggagccatccccaaggcagtcccctctgatatctctggctcatgcatcaccatcaatgaagcaaaatcgagcagacacaacgcccaggtctcatactttcgagcctggataccacagttcatctgggtcccagtacgatgaaggttatgaaggggatagaagaactggagagaggcaactccgaagcatgaggcgatctgggccactagattacactggaaccaggaaagtgaagtttgtggagggttcaagttctggaagccatggggctggctcaggctcactacagagatttgctgtgtcaagatctggccccctatcctacaaataagatcatgttaacaagtaacaacagcattctactggcaatcatagtttgccagcatcagtatctagcaatttgtatttgagtggactccagtcaatgctcccattcgtctttgtagagcatctgagcatatatgttatttagctcctttgcgtgaagtaatatgtattctagctgtatttacgtacctagtgctcttgtaagtctatatgtatggtacctattgctcttgtaagtaaaccctcctctgttgctacatgaattagcaatgtgctagttgtatgtctgttaatgtaaatggattgtataattgccttctatcccagatgtaacg

SEQ ID NO: 24170 - DNA, 810 bp, Oryza sativa
  Clone ID: PAT_MRT4530_29179C.1
atggacgaccgcgacctggactccgccgcgctctgggccgccgtcgactcggcggccgccgcccaagcctcccgccgcgaccacgaccgtacgcacctccgcaatctggaggacgacgagcatcgagatcgaggaggcgaggtggtgcagcccgcccgtcccttcaaggtccctcgactcctgactacgccgcccccgccctctcctcggcctttgcaactgcagatggccccccggccccattcctcgcccaacctcaccctcacgcccgacgccaccaggctcgtcgtcgtcgacaccccacctcccacacctaccgcctgcttcgccgcccacgacctcttccccgccatctccgtcgccaacttcagaaagtaccaggaggcagccctctcgattctagataaaagcgactacacctccatcagtgggaatccatacatcaagaaatcaggctggaggaaaatatcatgcttcttcaatatctcatttgaaatcaaggaccgctccattgagttcgatgaaaaccgcaatgtcaaccgtgccgagtttctcgttcgagcatcgatgcagttagtggcaggttttcggatggttggggttcatgtgatcggcgtgagaaaaaatttaacaaaccaaaccatgatgttcccagcacagctgaaaccagagctaagaacaaagcctgtcagttcatcgggctggggtcaacaagcatcggctaatgcggccactgctcgcaatatacaaaggaacatactggttggtcagatattgtcagtgtcatctgaccctagtgatacaacgtag

SEQ ID NO: 24171 - DNA, 312 bp, Oryza sativa
  Clone ID: PAT_MRT4530_2917C.1
atgcggattgtttcggatgtcggaaatagtgcagagtctgttaggaaacggattaaatttatcggatattacaaaggtcggataatccgcatccgccggattttagagataccgtatcctcatctgcgtctgcatcatactatccacatctacatgcatatccgccggatttctgaaaccccataccatattcttatttcgaacggattcaaagcggatcagatcagatcggatcggatattacccaatccgttttcacccctacacattactcagagattgcatcattaccgattttttttaatctgcaaa

SEQ ID NO: 24172 - DNA, 228 bp, Oryza sativa
  Clone ID: PAT_MRT4530_29180C.1
atggtttctccaccagtgacaccagaaaatggcgagtgggccattgttggtggcactggggagtttaatatggcatatggcactattgtgcacactatgatcaagcataatgttggcaccgaggcacttagaaagcttgatattcatgcattttacactccaaaaactgcacaaacagttcatgatacattgatcactccaaagtgtacaacaggccaggctgaataa

SEQ ID NO: 24173 - DNA, 1342 bp, Oryza sativa
  Clone ID: PAT_MRT4530_29181C.1
atgctccgcctccagaaccacctcctcccacttctccgcgcttcctcctcctcctcccctgtacacctccgccgcctaatcccatccaccgccgccgcatcctcttcctcctctgtgcaccccaaccgccgcctccactccaccgccgccgccaggtccaccaccaccgcgacacccttctccatggaggactacctcgtcgacacctgcggcctcaccgccgcccaggcgctcaaagcctccaagaacgtctcccacctcaagtccgccaccaagccggacgcggtgctcgccatcctctccggggtcggcctctccggcgcggacctcgccgcggtcttcgccgccgagccacggctcctctgcaccaaggcgcccagcgtcgccctccgcgtcgcctccctccgccaccgcgtcggcttgtccgacccccagatcgccagcctcctcctcctgcccggcggcgccaagggcttccacacatgcgacatggccccgaggctcgagttctggatccccttcttgggatccttcgagatgctcgatcttgaagaggaacaacgcgatcgtcagctcgagcctcgagaaggttatcaagcccaacatcgcgctgctccgggagtgcgggctaaacaagctgagaaactccgcatgccgggttgctcatgggcattcaagaacgctgtgggcgccgttgcccgtagcaatgaaggcattgtcaatgcgaggatggagttcttgagcagttctcttggttgctccatggaaaagctccgctctgcgggcgccgtcgttcatcctgctgcttccgccgcatccatcctggtgagcacatcctccgccaccgccgcctgcgccgatccccatccatcgcgcgagcgatcgagcagggtcgccgtcgttcgtcctgctgctgctgctggtggtggtggtagaggaggagttgacggcgaggggatcgagagggagggagggatgcggcagcagcggggcaggggcgtggggcgtggggatcccgggctgctgacgagggcggtggagaaggtgttccgcctcgtccgcctcgccgagttcgagatcctcttcgtcctcttcttcctcatcgccttcgtcctcttcaaggatctcatgtcacgaccagagtacaactcgatctttgtcaagaagcctgatctagatgggagatggccaggactcatgtaatgtttgtgtagtgtgatcaatgttgttctttttcctcttgcccaaagtacacttttgaggtgcttctttgacttcagttcttatgactactaatgttatctttcaagatgatgaatatagtttttgatgaattgccttc

SEQ ID NO: 24174 - DNA, 404 bp, Oryza sativa
  Clone ID: PAT_MRT4530_29182C.1
ctcttcttgtacaaaacaccgttgttattacgtttgccccccctcgatcgatctccatcgatcgatccttgcgggaagcgagcgatctcgtgcggaaatcttggggggagttcgtgcgcgatcatccgctgatcggtgggcggccaccagatcagcccgcgcatccaactccggagagaggaggaggaggaagaagaagatgtctctctgcagaggcaccgaggaggacagctacggcccgccagtgaaccaggccgcttccggcgccaacgccaatactcccggcaatagacgccgaccgagagggccgggggcggcgcggccgaccggaccgccgaagccggtgaacatcgacttgccggcgataccgttcgaggagcttaagaagatcaccagcaacttca

SEQ ID NO: 24175 - DNA, 363 bp, Oryza sativa
  Clone ID: PAT_MRT4530_29183C.1
atggccctcggagccaaatatggccacctacgaaaatttaaactggggtggagcttgtcgttcgcctgcgaagatcagttcttttatgcggatcacttaagagtgacgaggaggggaggcgttggccgcaacgaggaggagaggggaggttggcggttcaactcctccctctcccggcaacagcggcggctcagcgatgaagaggtcttagggaggggaggtggtggcgatgaggaggtgaggggacgggaggggatgcagcgactcggctcctccctctcccggcgacggcagcggctcagcaacatggaggtcacgacgacgatgatgatgcctcctggatccgccgccatctcagcctaa

SEQ ID NO: 24176 - DNA, 2507 bp, Oryza sativa
  unsure (1)..(2507): unsure at all n locations
  Clone ID: PAT_MRT4530_29184C.1
acgcgatcgcgcctgtcaaggcgacgggcgtgcgccatgaaggcgcagaggacgagcggcgcgcaggggcttaaggcagcctactacagctgccgagggaggtctacgccgtcgtacctggcaaggagagactcgttattcgccacgtggaagaagagcttcgggcacaaggcgacatgccccagcgtgaagaggtccgggtccatgtaagtgatcttgtgccgggcctgttctagtccgtcgccaccgcgacgtccggtttagtcggctatcatggtcgaggcgtcgaagcaaaagtatcttcgaatcgccctcttgatcggcattgcaccgttagcttgttgggtagaacacaatttagtgttgagagatgatcttgcgatgtcgaagcggatcagagccgacgggttcttcacgatactgggcaacatgtccctgatatacagctacacggcgtaagaggaccagccggtgttcgtctaaatacaccgtttcgagctgcggcacgacctctttgggctgatcaacaccgaaggcagcggcaacgtcgtatgccacgtctgcggcgaggtcttcaccgcccacaggggcctgctcgcggcgcggtcaccggtactcggagctgcactcaacggcccaaggatgggatctggtggcctttatggcggcgtaactataaagacaaacgccttggatcctctcgtggacaagccactgctcaggtacctcgacaccgactcgctgccgccgcagatgcagcagggcgagctcgaggaggagggacgcgccatggcgcagcatctcctcgccgcagccgatcggtacgggatggaacggctgaggctgctatgcgaagctcagctttgcaagcacatcgaggtggccagcgtggcgagtatcctgatcttggccgaccaacacggatgctccggcttgaagaacgcttgcttcgagttccttaagagccctgggaagtttgcagctgccatggcgacacaagagtacgattacctgaagacgaaccactgtgctctggcggatgaggtcgtcaagggaaaccaggcaaaatggatgctagctactgttgaaactttcatgaggcaccgactgaactctaagagcattttagagactgctacaagagaaattgcgctccacgcctccacatcaaatgagacaccccctgtgtttctcgacctggaggaatcccttcgggccaagggcgatatgacgctgcgcgaggaggccacattgaaggtcttgaaggtggtcgcgaccctgggcaaggccatctccaccggggcgatcgccgccgtggggtattatgttcccggcattgttggagctaaatttggtgaaccatctcttcctcggctaccaagattcgccatggctgctgtcacttcatggtttgctggaaaggtgatgtattatgcaatcttgcaaggaagtactgaattcattttgaaacatggagaagaacgcatgaagatggagctatctaacataatactcaataagcacagtgatgataaaacactggttgaagctgtaaaaacgcagttctttgctgagcatctgtttagtgatcagtatcaagataggacacttttcaggtggcatctacgccgtacttatgttgacagcgcctttatggaaagggtgaaggagatcgaagtgaagagctcaaatgatgggcctggattaatttctggacagagaattataagcactagaccatttggagacctcatggaggacccactggcgtgtatacttggttctccagacagcaacatggaaagcaacaagtctgctgagcacacgggtactatcgtgaagagaagggagattgcttgcccacctgcagttctggttgaaccaatcaggttgcaacctaatgtgcccatctgcagtttgttagcacgatcgcgaacagggtcaaatttggaggtgaacccggtgattcttgacctggaggaatctctactggccaaggggaacatgacgcttgaggaggaggtcacaatccgggtcagcaagatgaccgcgagcgtgttcaaggtcttcgccaccgcggcgtttggtgcgtcgagttattatgccctcggcctcggacctaaaataggcgaacctcctattcctcggtttcctagaatcggcgtatctactggcattgcctggtttggtggaaaatttgtatattatacagccttgcgagcaggtgctgaattcattttgaaacgtggagaagaacgcatgaagatggagcttgctaatataatacttaataagcatagtgatgaaaaaaccctggtcgaagctgtaaaagagaacttctttgctgagcatctgtttagcgatcagtatcaagataggcaacttttcaggtggcatctacgcaatacttatgttgacagcgcttttatggaaagggtgaaggagatcgaagttaagaactcggatgatgggntctggatcaatttctgggcacagaactacaaaca

SEQ ID NO: 24177 - DNA, 424 bp, Oryza sativa
  Clone ID: PAT_MRT4530_29185C.1
ttgacggttgttagcgatcagtttcgcccgtcaatattacctttaaataaaagagaactagttatgcttgcaatgcatatttgtgtttaaataataaatattcaactagtactaggattattaaccccttgcagagaatgagcacaaaatggaggagaatcgacaacaaaacaggcgatcgatcaatcaggacaatgtcaagaattagacttatcaatgaatgggccaagaactcagaaatgacaggaccaattgggccaaaattcacaagtctgcaaaatatatcaagagacaaggccgctagccgaaggtgggctggattgggccagcccatggttcgaccaaaccctcgctggtaccattggatgcaggttttgtttttggacggcgtggatcactacccaatgacggttggagggcaatt

SEQ ID NO: 24178 - DNA, 468 bp, Oryza sativa
  unsure (1)..(468): unsure at all n locations
  Clone ID: PAT_MRT4530_29186C.1
gagtacggcatacccggcactgacttggatccaccacctgcagtcatcgccgggtccatgccagcgggctccatggccggcgcggcggcagttgcccccgtggacggcgtcgccgacgagccgccggccggagcagagcccgacgtcgaccctgtcgcatctgcgcaggcattgggaggcaggttgcaggcggttgggagcagcgactgcaccccgccgagcaccggcgcgagcggggacggcgccgacgccacggcggcgcagaggcagggcgcctgcgactggaacatggcccgcatctgctcgcagcacgcgtccgacggcgtcgacgagttgccgatgaagtagctgacgcacggcgacagcgaggcctgcaccggcgggcagctcggcgcgttcgccggctgaccgggcggctgcggaggctgctgctgntgctgctgcggctgcgccgaggacgccatgatc

SEQ ID NO: 24179 - DNA, 138 bp, Oryza sativa
  Clone ID: PAT_MRT4530_29187C.1
atggccggatgccccaccgatgacggtaaacctagcgacccgtcaaaggtgacggccatctgtgaccaattcataggcccgtcactggggaacgtcgtctctggtgagcttttgcactacagaacacagatgcattaa

SEQ ID NO: 24180 - DNA, 1419 bp, Oryza sativa
  Clone ID: PAT_MRT4530_29188C.1
atggagtacaggagagtgaaggaccaggagagctatgatgttgtatctcagaaagacatagaaagccctggtgagaggtctctttctagcacttcagcaacctccagtcttagcacagcaggagcttcaaagggcaagaatagttggaagttaaagtccattgttacacttgcattgacattactaacaagttctcaggcaatactaattgtgtggtcgaaaagagctggaaaatatgaatatagtgtcactacggcaaatttttcggtggaagctttaaaatgtctgttatctctcatagccctgtacagaacatggaacagtcagggtgttacagaagataataggttaagtacatcgtttgatgaagttagtgtttatcctattcctgccatactttacatggtaaagaatttactgcagtattacatctttgcatatgtggatgcaccagcttatcaaatcctgaagaacctgaacattattagcacgggtgtgttataccgcatcattctaaagaaaaagttaagtgaaattcagtgggctgcatttattcttttatgtgccggttgcactacagcccagctgaacccctcgtcagatcatgttctgcaaacccctattcaaggttgggtgatggcaattgtgatggctcttctaagtggttttgcgggggtatacacagaagcaatcatcaagaaacgtccttcaagaaacatcaatgtgcagaatttttggctgtacatttttggaatgctcttcaatttagttgcaatttgtgttcaggacttcgatgctgtcatgaataaaggtttttttcatggctactcattcattactgttttgatgattcttaatcatgcactcagtggcattgctgtatcaatggtgatgaaatatgctgacaatattgtcaaggtgtactcaacttcagttgccatgcttcttacagcagttgtatctgtctttttgtttggcttccatctatcccttgctttcttcctcggatctacgtggcattctgttctccaaagagcagaaaacatggttaatgcaataaaggggttgttcatctcctgcgatgtaccgatggcacagttcattgttaatctgaatgcttcaatgcccgcttcggacaagttcatcctgcacatgcttgacccgacacacatgtttgtgcagcctcatgtggcggagatgatcagaagttcaccgaattatcaaaaactgtactactaccaaaagtcaagagcatatgaagcaggaaaggtgcaaattgtctctgaattcaggaacatggagttgaaattttcaggcaatgggcgtcaatgcaagaagaaaacaagcgccgccccgtccgccgttgcctcctggcccatcgtcttcaatgccggcccgttcctggcattttcaccgtaa

SEQ ID NO: 24181 - DNA, 115 bp, Oryza sativa
  Clone ID: PAT_MRT4530_29189C.1
atggccgaggttctcctcgtccttgtggagccgagggaggcaacggcgtgggtctgcaatgactgtagcagcggggcgacgcggctggagtcggccagtggtggtggtggctcgg

SEQ ID NO: 24182 - DNA, 2833 bp, Oryza sativa
  Clone ID: PAT_MRT4530_2918C.1
tcaaatagcagaagtagctatcacccggagaccaggaaagctaatatgaggcagttggtggcgagttagaagcaaatgacaagcatggtatcttagtaatgacgagctgatctcgacgcatgacatgaagtgggtaacttgtatgaggttgactccaaagatatgaactatgcaaagttctggaactgaagccccatcttcaagtgccacaatccagtcgaagtcagctagaggtgcaaccagggaaaagtcaggtgaagagaagactccatctgtcatcgccttcctcgcgccgctcccgccgcccgcccgtgccctagcgccgccgccgccgcggattccgccgcatcccgccatccccgcgcaccattaagagggggaaatcactccccgtgattccctccctcttttcccccgctttcccctctctctctccctcgggttcgttcggatttgctcccgcgatcttcgccggcgcatcaatggcgcccgagatggccgcggccgtttccttcccctccggcctctctctctccctcccggcgctatataatcgttccccgtgcctccctcctccgtttccgccgctcgccgctcgctctccccgtcggaatcaagcccgcgccgtcgtcctctctctccgccgtcgccgccgagctccggttcgccgccgtcgtcgccccggacctcctcccgcttcggcgtcgcctccttcggcttcgccgcgtcttcgtcgacctcgtccgctccttcgtttcgcccgccgaccgccggagcgccgccgtcctcgtcgatccgaaccgcgccgccgcctctcgccgtttcggtcgccgtttccgtcaccgccgtcgacccggggtgagccgaggaccgccgcttcgcttccctcttctctcctctctctcggccgccgctccgccgtgcctatggccgccgccggcgaccataggggcgcgggcgcgccgcctcccgtcggccgtgccggcgaggccgccttcgggcgcgccccgtggctgccaggtggggcccggccgtcagccgcccgcgcccgcgggtgcggctgacgcgtgggacccacggcgccggccggctttgcttaatcaacttgcagaataagcctaacatacatcataacagcaaaagacttagatctgttaaggtcctatccttagtttctaatctgtctctcccctttgttttctctctctccctctccaaacctttgcaacagatggctaacaatgagaaaggcaataaggtcagaagtcaggacattggtacctcaagctcccgagtgaatgaagcaccagacaccagttgtgtgacactggtccaacacttgattaaccagaaccgattgcttatagagatactacagcagcatcagacgccaattctgaatctgagtcagatacaacctcaagtgcagttggaggcagtccaagcactcacaccacgagtcagcatgccgccagcatcccgaaagacccatggtgacgtgccacatgttgactcaaaagaagcaagcaagggagtgtcctcagcagaaaagaaaaacaccaatgcgaaccgaagatgaagtccgtaagatgatcattaccagcacagaatggcctccaccaggaatgacaaaacgtcaaagaagaaataccttccgaggtgcaccacagttgacagagcatcttttagctaatggaggtagagtgtttgatagtgaagattcagatcaagtctcctcagatgatgaagatgaaatggaacgtaaggcatgctctcgttgtggagaaatcggtcatgttgccagctcgtgtgccactacatgcgttcattgtgaggaagaccatccacccgacaggtgtccaacgagcaggatcacttgtttcttttgtgaaggaactgatcatgtactaaaagattgtcaattcagttttctgctgacgaagaagatggccaaccaacccgccagttccaacggagagaagcatcaaggcaacacaaatcctcgccaagattacagtttcagcctaactccagtgccaggacagaggaatcaaaatgagaagaaaatgccgagtccgggaagatatctgttgcttcaattgtcaaggaatgggtcatttcgccgacaagtgcccaaaaccgagaaacatagctgccggcccgtcagtccacgcaactccctgcaatcagaagcttgctcctcagcgaattgtcatccatgcatcccgaagcagcccaatagcccgcgttgcaacagctccaaccccagcgagtgcattaccacaaggtgtcaatgctcaatttcagccccagccgtcagttgacaagacagaggccagtatcggcattgtacctttggatgttccagcacagcagccaagaaatcaagtacaagatgaagaacccgagcaagaccatccaccaggggagtgccccactcgcaaggtgacatgttttctgtgcgaagaaacaaaccatgtgcccaaggattgccaactcagtgtgttgttgaccaagaccgcagaaatccaacgaacaaccctacgattgtctcatcagctagtcagctccaacagcaacattgacgatatcatccacagcaccaatgctcctcctgccccacctaactctgcaacaaatcatagcactaataccttcagcaccaaccattctctgcaccgacagcctcagcaaagaattgtcgtcgatggaagaagttgtttctcgacctactccaggccgagcgaagggcaatcaacctcaggagggcgataccaagcagaagaccgttattcgcttcaaccagcaatcagaaggaagcttctcctgtgaa

SEQ ID NO: 24183 - DNA, 388 bp, Oryza sativa
  Clone ID: PAT_MRT4530_29190C.1
cagccacgagctcgaggagagggagaggtgtacttaaaacggggttggctatggcacccctcgtccggaggatgctgctgctgtgcgcggaggcggactcctgctactactaccttctagtactccacacgcaggcctccgtgccgtcgagctactactggaacgcttacggggacgaccacacacgtgtctggaaggacaccatcctcagcgaggcctaactcgacccgctctgccccgacagcacgaacaactgggcgcccctaaggctcgccgtcaaacggtacgcctgcaaagggttcctcacagaacacccctttcgcctcccgtaccacacacaaattaaatggttccctgaagggcactttacatagctaacaaattgaac

SEQ ID NO: 24184 - DNA, 1254 bp, Oryza sativa
  Clone ID: PAT_MRT4530_29191C.1
atggcggcgagccttctgtcccacgtcgtgtccgatctctgcatcggcaagccgccggcgcgcgtgctgccgccgtccactcccgtcgcggccgccctcgccgcgctccgcaccggagatgaccccttcgtcttcgtcgtcgacgctgatgaggcgctccgccactcccgcgggaagaagatcgccgcggggtgcgtcgtcgtcaaggttagcgtcgcggacgtgctctgctacgtgtgcggcgacgcggacaacctcagcgaccccgcggccgcgctcggccggcccgtgtccgcgctcgcggcggccgtgcacgctggtggtggcgatcatcacggcgccgccctccgcgtcgactcgctcacaagcctgctcgacgccattgacgcgctgctgagcaacgacgctcagaccctgctcgtcccgctccacgcgcacgccgcccgcagcaggaagcaccaccacgtacacgtctccggctgctccccggccaaccccgccgccgccactgactactgcgtgctgacgcgggaagacatcgtccgccacctcttcagctactccatctccctgttcgcccccgtcgcggcgcgcaccgtcgcctccctcggcctcgtccgccgggacgtgcacgccgtgcacgcagacgacgacgcgctcgacgccatcccgctcctgcggagatccatcgcggacggcaccgccgtggccgtcgtcgccgatgacgacgccctggtcggcgagatctgccccggagttctcggctcgtgcgacatcgagtcggcgtccgcggccttcgccgcgctctccgccggcgacgtcatgacgtacatagactgctcgttgtctccgccggagttcttgcttcgctccatcagggcgcagctcaagggcaggggcatggacgccatggccgacctcatggacgccgcggacgacgctgcctcgtctctgccgttatccccatcgtcttcctcgtcggcatcgtccgacgaggactcaccttttgggcgtgcgcggcgcgcaaggaggtcgtcgtcgggaagcttcaggtggaggtcgacgaaggacgtcgccgcatgccatgctgggagctcgctggtggcagtcatggcgcaggctcttgcgcaccgagtcgggtacgtctgggtcgtcgacgaggtcagcggcgcgctaaccggagtcgtgagcttcggagatgtacttgcggtgctccgggagcatctccgtgatggtgatacgcagatgaactga

SEQ ID NO: 24185 - DNA, 433 bp, Oryza sativa
  Clone ID: PAT_MRT4530_29192C.1
tcttctgatcggcccggttgggacctctggctgctagtgtcaggtccgtgctgccactatgcttgagcagccaagacgggacacggatgccgccgtcagctcatggtctccgacgctggcctgcttccacgacgtagcggtgcctgcaggctccatcttcgacgtacggaaagaggctcttacccaagatcctgaacgtacagcctgacaggcagaggatcttgtttcgtgttaaggagcatagtgtcaatgcagtcctggatacacgctgatgtcagggatgaaccaaaacttgttctacttgagaagcatgaccctgccagtggacaagaccgggccgtgccaatgattatggatgagctcatgatgaaggcttgtgaggctctgcgccgtgtaagaagtcaagttgacagactgtgtggcaaggtatgtg

SEQ ID NO: 24186 - DNA, 799 bp, Oryza sativa
  Clone ID: PAT_MRT4530_29193C.1
actttaaaacccgcgtcctcgctgaggagtgcctacgtactttcttcatagaagaaagatcagggttgctttcgtagttctttcgaaatgatttacggtcattcttctttattttattgaatacattacagctagtaccggatttttccaattttttagaaaggtttatcagtccctgtaaggtatactctttacccttattgaggattccatgagcgactaagtggtccttttgctcattccagaatccatcccggtccgggaaggccatgcgatcgataatatctttcttaataaaaatgattgagtctatctcatcgtcgcttacttccctttggggagttcaagtttcaagtctgcttcttataacatcatgttgaatttggtggtttgatggcccggcattttcttctccaagttgaggttcagggttcggcggggtgtggcttgtggatggctctccccgatctggaacagccccgaatacgtgttccaggggaacttccggaattgaataagggtcaaaacggggctgttccccttgcggcacctcttccccgggggaatccggtgcgggtatctggcccgaaagcccattgaaaaaagaggacgacggagtagaggcttcagctgacttgcccgcagcggatccggaaggacccgcttcactaggcccaggccctggtgggttctccatagcggaagcaacctctgggctgcccgctttccatcgggaaacctgctctgccacctgccttaattgaatcgggcaacgctcgtggagaggcggtttggccat

SEQ ID NO: 24187 - DNA, 385 bp, Oryza sativa
  Clone ID: PAT_MRT4530_29194C.1
gggaagtcaaccgagtcatcgaggcgacgaggtcggattaatttgtttatggcgccggcaaggaaacacaacggcgcgaacgcgtgagaatcttgtgctccgatctagtagtagtagtatcagcttgtttgcgaggacccaagcgaggtcaaacggaggggggaggccccacttggagaggctcgctctgcatcgttgccaggtacgtacgggcgcgacgaatgcttgatcttcttggttgcctacccatcgatttttttctttgttgatttgttttggttggattgatctgtcgcttatattgcgccccccgtgtgcttgattgagctgctcgtttccatttctgctgaaatggagatgaaactgtaaaaaaaaaaaaaaaaaa

SEQ ID NO: 24188 - DNA, 1401 bp, Oryza sativa
  Clone ID: PAT_MRT4530_29195C.1
atggcgccggcggccaacggcggtgccgccgcggcgcacgtcctggtcgtgccgttcccggcgcagggccacctcatcccgctcctcgacctcgccggcctcctcgcctccagggggctccgcctcaccgtcgtctgcacgccggccacggcgccgctgctcgtgccactcctcgccgccacgcaccagggcgccgtgtccgcgctcaccctgccgttcccgtcgcacccggctctccccgccggcgtggagaacgccaaggggtccgggccggcgctgttcgccaagctcatcgtcgcgttcgcggggctgcgcggcccgctggggacgtgggcgcgcgccagggccgacacccccgaccgcgtcgtcgccgtgctatccgacttcttctgcgggtggacgcaggcgctcgcggacgagctcggcgtgccgcgcgtcgtgttctcttcgtccgccgtgtacggcaccgccgtgctccactctatgttccgcctgatgcccaagcgcgaggacgagcacgacgacgagtgcccgctgtccttgctttaccggttctacaaggccggcgacgaggtgtccgagggtgtcaagaacaacttcctctcgaacatggggagctcctgcatcgtgtcgaacaccttccggcagctcgaggggcggtacctcgagaggcctctcgccgacctgggcttcatgcgcgtgcgcgccgtcgggccgctggcgccggagcccgacgcgtccggcaaccgcggcggcgagaccgccgtggccgcgtcggacctctgcgcctggctcaaccagttcgccgacggcgccgtcgtgtacgtcagcttcgggagcatggcggtcctgcagccgcctcacgcggcggcgctggcggcggcgctggagcggacgggtacggcgttcgtctgggccgccgggtcgcacgcggcggcggcgctcccggaggggttcgaggagcgcgcggcggcgggcggcaggggcaaggtgatccgcgggtggacgccgcaggtgcccgtgctgcggcaccgggcggtgggacggttcgtgacccactgcgggtggaactccgtgctggaggcggtggccgccggggtggccatgctgacgtggccgatgacggccgaccagttcgtgaacgcgcggctgctcgtcgacgagcaccgcgccgccgtgccggtctcctggggcggcatcgcggtgccgccgagcgccgacgaggtggcgcgcgtgttcgaggcgacctctgcggcggcggcggcggctagcgagtggagcgaggtgggcgcgcgggtgaaggagctcgccggggaggctgcggcggcgacgcgggaaggcgggagctcgtggcgggaggtggacgagctggcgcgggagctgcgcgagctcgggggatag

SEQ ID NO: 24189 - DNA, 1260 bp, Oryza sativa
  Clone ID: PAT_MRT4530_29196C.1
atggcgccggcggccaacggcggtgccgccgcggcgcacgtcctggtcgtgccgttcccggcgcagggccacctcatcccgctcctcgacctcgccggcctcctcgcctccagggggctccgcctcaccgtcgtctgcacgccggccacggcgccgctgctcgtgccactcctcgccgccacgcaccagggcgccgtgtccgcgctcaccctgccgttcccgtcgcacccggctctccccgccggcgtggagaacgccaaggggtccgggccggcgctgttcgccaagctcatcgtcgcgttcgcggggctgcgcggcccgctggggacgtgggcgcgcgccagggccgacacccccgaccgcgtcgtcgccgtgctatccgacttcttctgcgggtggacgcaggcgctcgcggacgagctcggcgtgccgcgcgtcgtgttctcttcgtccgccgtgtacggcaccgccgtgctccactctatgttccgcctgatgcccaagcgcgaggacgagcacgacgacgagtgcccggtgagcttccccgatatcccgggctctccgtcgtatccgtggaggcagctgtccttgctttaccggttctacaaggccggcgacgaggtgtccgagggtgtcaagaacaacttcctctcgaaacatggggagctcttgcatcgtgtcgaaacaggcttcgggagcatggggggcctgcagccgcctcacgcggcggcgctggcggcggcgctggagcggacgggtacggcgttcttctgggccgccgggtcgcacgcggcgggggggctcccggaggggttcaaggagcgcgcggcggcgggcggcaagggcaaggtgatccgcgggtggacgccgcaggtgcccgtgctgcggcaccgggcggtgggacggttcgtgacccactgcgggtggaactccgtgctggaggcggtggccgccggggtggccatgctgacgtggccgatgacggccgaccagttcgtgaacgcgcgggtgctcgtcgacgagcaccgcgccgccgtgccgggctcctggggcggcatcgcggtgccgccgagcgccgacgaggtggcgcgcgtgttcgaggcgacctctgcggcggcggcggcggctagcgagtggagcgaggtgggcgcgcgggtgaaggagctcgccggggaggctgcggcggcgacgcgggaaggcgggagctcgtggcgggaggtggacgagctggcgcgggagctgcgcgagctcgggggatag

SEQ ID NO: 24190 - DNA, 636 bp, Oryza sativa
  Clone ID: PAT_MRT4530_29197C.1
gacgagtgccctcgtggccgggttgacgcgcaccacaagttcgcggcgaccattggagacgatgaaggtgcttgtggcggtggacgacaggtcgacagcagtggcagccaccgcgcgctggcctgggtgctcgaccacctcttcttcccccgccaccggcgacggcggcgaggaggagcagggtcggcggtgtacggcgcggcgtcgatgatggaagcggtgcgggcggcgcaggcggagaacgcgcggaacctgctcgtcagggcgaagctggtctgcgagcggcgaggggtggccgcggcgacggtggcggtggagggggagccccgggaggcgctgtgccgcgccgccgaggacgccggcgccggcctgctcgtcgtcggcagccgcggcctcggcgccatcaagagggcgttcctgggcagcgtgagcgactactgcgccgcgcgcaccgcgcgagctgcccgatcatggtcgtcaagccttcttccaacgccggcgacgaagacgacggcggccaccgcacgagcaactaagcgtggcattgatagccactcgggctaccccttttgtgctcaagagcttgagacggcgaaccacatcctcctcgactgcgtgttcgctcgtcaggactga

SEQ ID NO: 24191 - DNA, 250 bp, Oryza sativa
  Clone ID: PAT_MRT4530_29198C.1
gcccaaagtttaacacggccgttatgcaaaatttgggtcagaacaggaaaaaatcttcccaaaaagaacaaacctggcagcttgccgaatgcccctaacctgtttgatttgacagggggatccgaactagaaaagggttggttactttaccacggattttaaaacgcaattaaaacccaggggggaaaaaaatgcgcccaaaagaacttcacccgctcaaaagaagtgcttggcacatttttaaggggaa

SEQ ID NO: 24192 - DNA, 760 bp, Oryza sativa
  Clone ID: PAT_MRT4530_29199C.1
gtccaaactccaaagaaatcaagaattcgcagatgaaggtgcttgtggcggtggacgacagccgtggcagccaccgcgcgctgtcctgggtgctcgaccacctcttcttccccgccgccgccaccggcgacggcggcgaggaggagcaggtgccgcggccggcgccggagctggtgcttgtccatgccattgagccgctccaccacgtcatgttccccgtcggcccagggtcggcggtgtacggcgcggcgtcgatgatggaggcggtgcgggcggcgcaggcggagaacgcgcggaacctgctcgtcagggcgaggctgatctgcgagcggcgtggggtggccgcggcgacggtggcggtggagggggagccccgggaggcgctgtgccgcgccgctgaggacgccggcgccggcctgctcgtcgtcggcagccgcggcctcggcgccctcaagagggcgttcctgggcagcgtcagcgactactgcgcgcaccgcgcgagctgcccgatcatggtcgtcaagccgcctcccgacgccggcgacgaagacgacggcggccactgcacgagcaactgaactgatgatggatcgccattacatccggaagaccagctttcgagggggaaagagaatcaagagagagacacttgttttaccattgttgttcctgctcagtgctgaatttgtccttccaaagttcctaccctgaagcgccgtcaataaacatttttactgtgtgcaaaaaaaaaaaaaaaaaa

SEQ ID NO: 24193 - DNA, 897 bp, Oryza sativa
  Clone ID: PAT_MRT4530_2919C.1
atggggaggactccctgctgcgacagcaaggtgctcaagaaagggccgtggacgcccgacgaggacaagctcctcgtcgactacgtccaggccaacggctccggcaactggcgcctgctccccaagctcgccgggctgaaccggtgcggcaagagctgccggctgcggtggacgaactacctgcggccggacatcaagcgcgggcctttcaccccggaggagcacaagtccatcctccagctccacgccatcgtcggcaacaagtggtccatgatcgccgcgcagctgcctggtcggacggacaacgagatcaagaattactggaacaccaacgtcaagaagcagctccgccagggccaggcggccgccgtcggcgagcaggccgcgctggcgagcctcggcggcggcgcggccagctgccccgcggcgcgccacatggcgcagtgggagaccgcgcgcctcgaggcagaggcgcgcctctccctcctctccggcaccacctcggtcgcgaccgccagcgtcgctgcctcctcgtcctcgtcgtccacagccgcggccggcggcgccgaggcgccgccggacatctacctgcgcctctggaactccgaggtcggtgactcgttccgcaagtccgcgcgctcggcggcgcgcgaggatcaagagccggcgaacgcatcagacgaagcggcgccggtctcggcgacattcgcacgacccggcgacgactcctcggcggcgtccaacgtgaccgcggccgcggcggcggacgagtaccaggtgttcctggacctggcggccgaggacttcgagctgttccacggccgccacggcgggttcccgctgttcccggcggtggacatgctcggcgagacatccctctacaccgcgttcgactaa

SEQ ID NO: 24194 - DNA, 177 bp, Oryza sativa
  Clone ID: PAT_MRT4530_291C.1
cgaggagcagatctcagattttcttcagggccctcaactgactgcccatggcttgtcatgcttgcataaagaccttgaagaaaagaaaccttgtgtacttttctggaataatcattggagcacagtaattaagtttgaagaagaattatatattttagcttccgattcaagtttctt

SEQ ID NO: 24195 - DNA, 575 bp, Oryza sativa
  Clone ID: PAT_MRT4530_29200C.1
atatcatcttgcgacttgtgtattcattattataggctatcatgaacagtttcctgcttagagaccgtaacatagtgaatttttctttgtcaaaagtgaatatgtcgggtccataagttcataaattcatattttgagcctttgggcgtatttttttcagcgttctcaaaaggggctatgcctctacccttactacatcttacacatgactctgctacaatacgattgtgtcacttgtcatccaaagagacgatagttgaaattagcccatgcttaatgaattctatcttgttcagcctaacgcagcacaggacctgctcagggagtacatcttgcttgagggcctgtattgtgaaaaccatgccaaggatcccattattcatgcgtgctcggaatgattcccatcccttgcttgcagttttactgtatcggcgtgtatcgaggtctacctcaaaatagcatctctccctcgaataacatatgttggatgtcgacgagacgactggcttatccttatatgcttacacaaacttcctccctgcgggactcaattgaagatcctctgggttaaccat

SEQ ID NO: 24196 - DNA, 1134 bp, Oryza sativa
  Clone ID: PAT_MRT4530_29201C.1
atgggtgatgagatatctcgacgttgcatcggcttacaaggattgcatttgcagagtcaaactgactggcacgcctgcatctcatcaacttttggtcctgcacttgagctaagcagatctcccaggccattccgggcacgtctgtgcattgagggcattccaacgcatgcgcgcactgaggtcactgcagtcaagctgattgggcccaggctagagccgagtgcggtgcggggaccaaatgaagacccagatggggatggtggtcggcctcatccgcgctaccagagccgctccaggtcactgtggggccgcatcacggggagatcccacagcagtgagcgtgggggagatggtcaaggattctacaatgaagacacgaggggatgccagcgcaacagagacacatacatcaccataaaccacatccgccgttctagggacgacactgaggttagggccccaatttcactttcagccgcgcagaagcaaaagcccaagaggggggggggatccctcgctattgatctgtcttcttctccagctgagttgttttccttccatcacggggaccagggaaaccaggaacagcaagaggaccccataagggcactcacagtgcgtcgtcgcaaaatgccgttcctgagggttgaagcggctatcagcttctcgccagagggcgaacatggcgtgcagggctcccctgtgtatgtccctctgtcaggagggactgttgtaacgcaggccgaagacgttaacaacaacagtgctgctgacctgattgcttccctcacaactccgattgtaagctggaatgttagaggtctgaatgcaccagcaaaaagggaggcggtcagaaatctccttcaacagcagaatgcaactctggtttgcctgcaagagacaaagctgcaagatgtagataaggcctgcataattgaaacaaatggagtaaattttcagaacaatttctttttcctgcctgcagagggatctaggggtggtataatcctggcagctgatgagaactattttaccttgtcacattgtgatctccgtatgttttccctaacagccaaggtgactatgagagaaacaaatgcctactggacaataacaggggcttatggtccatag

SEQ ID NO: 24197 - DNA, 450 bp, Oryza sativa
  Clone ID: PAT_MRT4530_29202C.1
atgcgggtgcaagttcctaccctggagtgcccgataaccctcgcttatggcccaggattcggggcgttcttctcggcttcgggtactaggttgatgtcatcctccaaaatgatgaaggtctccctcgctatgaccccgcatatcaacttgtacctcttcagaacatttgggggacttatcaacactcctagcggaggaggagtgaggcggtgggcgtgctcggggacggcgggggacgtcgatgcggtggtggcaaggacgggggcaaggacggtgtggaggaggtcgacggcggccgacgctggcttggggttggcgccgggctcggtggacgacggtgttgggctcggggatggcagcgggctcccagagggcggcgccgctagggttcagagagtggcagagcttagaaaaattttcgatctagatctgagtgagagtgaaccctag

SEQ ID NO: 24198 - DNA, 1439 bp, Oryza sativa
  Clone ID: PAT_MRT4530_29203C.1
tattttttcgccttttctgttcgtgtgttcgtggtggagttcatctcgccttcccctcttccggtcctcccaccgctcctcgccaccacaaaccgccgccgcctcctcctcacctatctgtgcggaggaggtataccacaccttgggattttggggaagcagtacgttgattggaagaaatgtcaggaggtaggcaatcatactggtgctaccaatgtagacagcgggtgaggccccgcggccaggatatggagtgtccctattgtgattccggttttgtgtctgaaatggatgatgttgatgctctcatgcgccactttgttgggatggatcctgatttccatcgtgatccaagattcggtatcatggaggcaatctctgctgtgatgaggcatggcatggcgggaacgaaccgggaagttgatgtgagaggaaggccaaacatattttctgacctggagatggagtttggctcagggccatggttgctcttccgtggccagcttcctggtcatctctcagaagacaatggttttgatgtattcatcaatggacgccgtggtgttggcatgcgcagagcaaacattgcagactactttgttggacctggactggatgatctgattgagcaattaactcagaatgatcgacgagggccgccacctgccactcaatcatcgattgatgctatgcctactgtgaagattacacagaggcatctcagtggagactcacattgccctgtctgcaaggacaagtttgagctgggatcagaagcaagggagatgccatgcaagcatttataccactctgattgcatagttccttggctggaacagcacaattcctgccctgtttgccgatatgagttgccaccacagagctctactggtgctagctgctcgcgcacaagatcaaccaaccaaagtcagagttcaagtagcaatgggagaaccaatggacgtcaaaggagaaggaatccgttctcgttcctatggcctttccgatcatcaagctctagctctcgttagattagcctggtaatctggttggagtcctcaagactgtttaatcgaagatgctcataaaatgggtgttatgcatggcatcttatcgtccaatctgtaatgtatggcttgttatgatcaccacggaatgcttttccttgcaagtatatccttccacagcttcatatcagatactaattttaaaaatctgtttacataaaaggttaacgatagtatgatacttgtttagatagctagagaaggttattttcttaatgttgtattacttaatgttctacagcagaatatacttctgtcaactgtcattaagacgtttttttagctgtaaatctcaagggatcaatggtagcaagcatgatgatataatatagaagcaagttgcctgaaatttcagttaaataagtactagtt

SEQ ID NO: 24199 - DNA, 1340 bp, Oryza sativa
  Clone ID: PAT_MRT4530_29204C.1
caacacatccctccaaacaaaaaccgcctttttttttcttcaccacacaagagaccccaatcccaaagcaaagaggagcgcaaagatcatctctttgcttctcgcctgcgcctcctagtccttctcttcctctctttgcttctcgccttctcctcctcctcctcttctccctcctcgtgctccgcccgatccgtccgccgcctccagatccgcgcccatggcgtcgcgcaggcgaatgctcctcaaggtcatcatcctcggtgacagcggggtcgggaagacgtctctgatgaaccagtacgtgaacaagaagttcagcaatcagtacaaagcgacgatcggcgcggatttcctgaccaaggaggtgcagatcgacgaccggctcttcacattgcagatttgggacacagcgggacaggagcgatttcagagtcttggtgtggcattttaccggggagctgactgctgtgttcttgtatatgatgtcaatgttaccaagtcatttgaaaggctcaacagctggcgtgaggaattcctaattcaagctagcccatcagatccagagaatttcccttttgttgtacttggaaacaaaattgatgttgatggtggtaatagccggactgtttctgagaagaaagctaaagcttggtgtgcttctaagggaaacatcccttattttgagacatctgctaaagaaggcttcaacgtggaggctgcttttgagtgtatagcaaggaatgctatcaagaatgaaccggaagaggagattttgaaaagcgttgctaatggaaatcgagatatcttcctgatacaattgatgttggaggtgctggaaggcaacagcgctcgtcaggctgtgaatgctagaagatatggcaccagcgatatcgccagttgattctaccggatcggtgtagatcatcatcctcacctcttccactgtgtgatatctttagtttgaaagcctctatctatgtccaatgctacatattgtttttttagtgctccaacataattggagaagattcatttgtaactgtttttactcctacctttgtatctgctagatgctagagttgggatacctttttagtctttctacccttctgtttgattgctgcagtgcacatatcttttctgtttgattgcttcagtgcatatctggagagaccaaaacatgttctgtgaaagcttgtaaattgacagaacaacctatcaatctggttctgttctctgcccattttgatggtagagcgtgccagatctgtatctatatggcttgctacttgctaatacaaaaattccaataaatcttgcttgatgtaaaaaaaaaaaaa

SEQ ID NO: 24200 - DNA, 504 bp, Oryza sativa
  Clone ID: PAT_MRT4530_29205C.1
ctcagtcctgcaccgcgcatcttcactctgcgcgcgtgtttgctaaaattagaggcgctcgccaaggttggatcctcgagcttttatgatcacgactaaaactcttcgtcttgagccaccgacggggtatatgaagatggctacattcaccgccttaaatgggggttcacccaaagcaacagagggtgtcaacggcacagcaccggaattggacagaagagaaaatggacagcagcagaccaacagcgcagaggccagatcagctaccgaccggagagaaagagagacctggccggcgacaacagcaacagcaacaccagcaacaacaacaaccgcgatgtcgtgacaggctcccatttcctgggtgatggctatcaggattccgactcaactcacaagcggaagcgcgccctatcagactcaccaaggagagagcaccaaccttcaccgtccgagaggtacgagccatatggaccacaccggcctcattctgagtcacgtgat

SEQ ID NO: 24201 - DNA, 509 bp, Oryza sativa
  unsure (1)..(509): unsure at all n locations
  Clone ID: PAT_MRT4530_29206C.1
cgtccggnngangcngctgccgcggctacacgaccggaggaatctctcccgaccagcctcatagttaggttattcatctcagagcacggctattgggtctgttaagcaggtgttgttgtagctgcgctgcagccttcaggtgggacgaggcactgcataccaacgttgctggcttgtaactggggggggtgcagtanctgcagcaatggcctgttcggcaagctgtttgcggtggctgcagctgcggctgtggctacaccgtgtgcgtgcggcacgattggtgtcggctgcagtccagccacaaaacaggtaattttcagggcaatttattggctccggtttttggcacaattataaaagtgtgatgaagatgaagagtttctgaaagttgcatgtcgcaggttatagactacggttatgcanctttttgtcaattatggttagagttttacaaatcgacttcaatgattgcgatctccttacgttagtttggattctttgttctcctt

SEQ ID NO: 24202 - DNA, 435 bp, Oryza sativa
  Clone ID: PAT_MRT4530_29207C.1
atgctcctctctttcttcggcaacgtgcccgctgctcttgccttccgctcgcccgccgccgaccatcatcgctctgcccgcatcctggcgccgctccgcgctgccgctgctccgcccgcaagccgtgcttgcctgtcgccgctcggctgccgcgtggacccgccgccgcgctcgcccacttcccgcccatcgccgctctgccctctccgccgccggcctcactcaccaaagaagaagagaaagaggagatttcagagaaagagaagagataaaagagaagagaaggagatgagaagaaaaaaaagtgctactgatatgactgcggcctgctggggtgggggtgtctgggccgccggtagatgggccaagcgcaccagccactggggctgtgtccgggagggcattcaattatatttcaaagattttgatgggtag

SEQ ID NO: 24203 - DNA, 404 bp, Oryza sativa
  Clone ID: PAT_MRT4530_29208C.1
gtaagggatcaatcggtttcgatctcacctcgttcgctgccgtttgttgattgatgatcaggcgcgaccaactagccggatagattgcccgcttgctcgtccttttctggtgcttgatccgttcggtttggggggggtctagtttcggcgatttgcttctgctgttgtggcgttggaatgattcttctgtgtcagttcttagttaaagtttaacatcaggatttctcgcgaggatttaaggagctctttttgaccgccttccctgtggattaatttatcctagtacaggaactacagattacttgctgcttgacctgctcagtttgagttggtttgcttccattacaagcaactgtccaagaacattttatttgtaatacgaacatttataaaccagagaaatt

SEQ ID NO: 24204 - DNA, 331 bp, Oryza sativa
  Clone ID: PAT_MRT4530_29209C.1
tgatggtcgaagactcaggactctcctgcgggggggtttataggctgaccacctcaaccatcactaggagagtccgcggaaaaatgcattcgcgtcgctcgccgttgccatccacctgttggaggcaccgcaggtagctggttggtgggaacctgcaccggtgggcggacagggatgtcattgtggtcccgaggagggagccagctactggatggtaggagaggcagggagaccagtactgatgagatgatcggagcatgggagagagtccttgaacgagaaactgtatggttcgggtagggagggcatgcagggcacctgggggattaca

SEQ ID NO: 24205 - DNA, 6272 bp, Oryza sativa
  Clone ID: PAT_MRT4530_2920C.1
caaagttcaccaatggaaggagtcctactcggatagaactgggtcgttactataccgtgtggggtttgccacctccgagtcctacttggagattgactgacccgcggtataaaagggaccccccgggaagggattaaggcatcgagtcttaccgtcaacacacccaccacaacctacgaaatcctcgtaccagcgtaccccaataccctctatatccggtctacgggtatcccccgtcgacagtggcgcgccaggtaggggcacttggtgctcaaggttctactactatgtcatcaagcttcgtcgacaacagcgtcaaccccggcatcaaccaaggagtttctacctcgacaatgctggtgtggactcaagtcggcgaaatcgtcttcccggtttacaccacggtgccgatctctactggtccatcaatgaccagaagcgagaacgtcatggttacaaccctggatgactccatgtcgaaggatcctcctgcagaagtggagaacggaacatcaacgacatctgagcccgagaaggatcctagtgcggccaaatcttgtccttccgacgtgaatcacgagccgacaaggacaacttccgaagcgacgaggtcccggtgtcctatccacaaaacaaggaaacataccttgcaagcttgttgggtttttctcgacgtacaagctgagatccgtgcctgcaaagagcgtggaatccaacgtacttctccaacccgtgatgtctattgtcctattcacaagacaaagaatcacgacctctcaagctacaaagttcttctcagcgccatgaagacgtcacctcctaaggtccagcagtcacaaatctctcttagagatacaaacaaggaacgaggagcgacaattatctcagatcgattcgttggggtaatcgacatcgatccctacgagccgtcaattctacacttgctcgaagaccaggcctcgtcgtcaacgagtacaccacgcgatgtgttcactatcgatgggatcagtacgtctgcgcgcgctaacgcagaagtggaggatcaagtggttacaccggcccagcacatcagggccatcgacgcaatactgagggagaccccttatgatcccgttctgaacgatgatctcgcacagtggatagaacgactatgggaatcggtggccaacctcagcaacgcgttcgaggaggccgctgccagggtaccgccagaacaaccgccaaccggcgacgctaatggcgaactacctgagcagcgggcgtcacctcgtcaagccacccttccacctcgcggcaccagcgatctccgtgaccatctgaatggccgccgagaagcacgacacgctcgtgacaacgaaaaccattcctgacatcatgactcctcgcgacgtcgcgagaacgaagagcgaggaggacacccgagcgaaaaccaagactgtgataaccgccacaaccgccacgatcgcaaacatcgcgaacagtggatgttgggcgatactggtggaggacaccgccataatgatgatgatgatggggatcggcgccgggacaacaacggtgggcgacgacaggattctcgagaacccgtacgtcatcctcgtaatcgtaccccggaaccaagtcactcatcgtcatcgtcatcatcctcatcatgctcgtcatcagatagacatccacggaggacatacgatcgccgacaacccaccgcccccggcggcgggtgtagagctttcagtcgtgccctacgtgatgtctgatggcctaagagattccgaccaggagcaatagagaagtacgatcggagcaccgacccagaagaattccttcaggtctattccaaagtactctacgctgccggagcaaacgataacatgttggtgaattatttgccggcggcgttgaaaggatctgcacgttcatggctagttcacctcccaccatactcgatttcttcatgggcagatctgtggcagcagttcgtcgctaacttccaaggaacttacaagcgccacgcgatcgaagacgacctacatgtgttgacacagaatccgggcgaatcattgagggactacgttcggcgctttaatgagtgcagaaatacgatccccgaaatcaccgacgcttctgtgatccgcgctttcaagactggtgtcagagatcgctacaccacccaggagttggcgacaaggcggatcacgactgctcgaaaactattcgagattgtcgatcgatgtgctcacgcgaacgacgcattgagacgcaagaacgacaagccaaagacgacgggagataagaaactagccaaggacgcacctgagtcaagtaagaagaaaagtcacaagagtgggaaaaggaaaactcaaacggaagtgctcgcagcagagtacgcggactcgcccgagcacccagcccacaaggcaacgacacgaagaaaatatggtgccctatacacaagtcggacatgcactctctggaggattgcttcgtcttcaaaaagtcgctcgcgaagcaactggcattggagaaaggcaagcgagtacgtgtagtcgagaaggccactgaagcagctactcaggactcggacttggcatacccaaactctgatctccatgtctcatacatcttcggaggttccacggcggcgatatccgatcgtggtcgagcccactatccggaatatcaaagttgcacgggttctcatcgacggcggcaactccatcaacctactcttcgccaacaccttggacgcgatggggatcctacgaagcgagttgacgcccactgatcaacccttccatggaattatccctcagtcgtcgtccaagccattgggcaagatcacacttcctgtgactttcggccaagcaaacaacttccgaacagagcagatcacctttgatgttgctgagtttgacacagcatataacgccatcatcgggaggacggcactcgcgaagtttatggccgcatcttactacgcgtatcaagtgctcaagatgcccgggcgtatcaaagctggcaatgcagcgcgacaagcggagcctcgacatggtcgagaacacgcccaacccacccgccacagctgagccacccaagaaagtgagcaaaacaaacataacgccgaagccagacggctcaattaagatcgttccgctttccagtgccaaccccgacaagaccgaactcgcgctcatcaccttcctccgcgacaatgcagatgtgttcgcttggcagccgttcgacatgccaggggtccctagggaggtgattgagcacaaactcatggtgcgacccgatgccaagccagtaaaacaaaaactgcggtgatttgcaccagaccggaaacaagccatacgagaagagctcgataagcttctcaaagctggtttcatcagagaagtactccatccagagtggctagccaatccagtcatggtgcggaaggctaacgggaagtggaggatgtgtgtcgacttcaccgacctcaacaaggcgtgtcccaaggatcacttccctcttcctcgaatagaccaattggtggactcaacagctggttgtgagttgttgagcgttcttgacgcctactccggctaccaccagatcagcatggcgaaagaggacgaggagaagatagcattcatcacgctgttcggtgtaactgttacgttaagatgccgtttggactgataaccgcaggaaacactttccaacgcacggtccaaggggcacttaacgatcagcttgggaacaatgtcgaggcctacgtcgatgacattgttgtcaaggccaagacaagcgactcattgattgacgatctccgggaaacgttcgacaacctccgacgatatcgcctcatgctcaatccagagaagtgcacgtttgtagtaccatcgggcaagctactcgggttcctcgtttttggaagagggatcgaacaaaaccccgagaagatcaaggcaatcgaaaatatgaagtcgcccacaagagtcaaggaagtccagaagctaactggatgcatggtggcactgagcaggttcatcactaggatgggagagcgtggacaacctttcttcgctctactgaagaaacaagacaaatttgtatagacacaggaagccgaagaggcgttcatcgcactcaagcgctacctgtcatatccccctgtacttgttgccccctaatctaatgaagaattattcctctatgttgccgccacgccatattctgtgagtactgtcattgttgtcgagagagataaggtgcaaagaccagtctactacatcagtgaagctctccacgacacgaagacaagatacccacagatcaaaaagctgctctatgcagtaatcatgacatcaagaaagctacgccactacttccaagcccacagggtcacagttgtttcctccttccctcttggtgaagtcgtaagaaacagagacgttgttggccgcatcgcgaaatgggtagtctagctaagctagtttgatgtccactttgtgccacgaacaaccatcaagtcccaggtcctcgccgatttcgtagctgactggactatgcctgaaaacaggtcggacggtcaaaccgacagcgaaacatggacaatggcattcgacggcgcactcaacaaccaaggagcaggagtagggttcatcttgacatcaccttcgggagatcagttcaagcatgcaattcacctcgacttcagggcgaccaacaatacagccgagtacgaaggactacttgctgggataagagcagcagccgcacttggagtcaagcgattgatcgtgaaaggggactccgaactattcccaaaccacgtgcacaaagactagaagtgctctagtcccgagttatccaagtacctcgcagaagtcaggaagctggagaaaaggtttgatggaatcgaggtccgacacgtataccgcaaggacaacatcgaaccggacgacctagcacggccgcgcatccagacgggagccactcgaacccggcaccttcctagacgtcctgacaaagccatcggtaaaagaggcaaacgacgaagatagcacagtcgcccccgacatcagctcgggggctacagaggcagaacacgccggccgacatcgagaccacaaatgactggaggatcccactcattaaattcataactagcgacgagttgcccgaggacgatgcagaagccgagaaaataacccgtcaagccaaaatctattgtatgattggcaacgatctatacaagaaggcgccaaacgggctacttctcaaatgcgtctcgtccaacgatggcaaacatctcctcctcgacatacacgaaaggatctgtgggtcacacgcctccggtcgcacattggtcgaaaaagcttttcgacaagggtttttctggccgacagccctcaaagacgcttgcgacatgtaaaaacacaaagctaccagcgcaagcgctccaaactatccctcttacttggccattctcgtgctgggggctcgacatactcggaccattcccacgagcacagggcggctataggttcctattcgtggtgatcgacaaattcaccaagtggatcgaagcaacacccatgggggaaatcaaggccgacaacgccatcaaattcattaaagggatattctgcagatatggattgcctcaccgcatcataacagacaacagctcccagttcatcagtgccgacttccaggactactgtattggactgggagtcaagatctgcttcgcctcggtttctcaccctcagagcaatggacaggtcgagagggcaaacggcatagtactacaaggaatcaagaccctactatgggccgtgcgtaccacaccgacaacgtccaacaaggagacaccattcttcctcgtgtacggctcagaggccatgctccccactgagctacgacatcagagtacacgagtacagaagtactccgacgaggaccaggaggagcagcgaaacgacgatgtgaatctactcgaggaacatcgagaaagagttgtcgtcagagcagccagctaccaacaggcccttcgccgataccacgagaagcgcatcagagcacgaacgctttcgatcagcgactacttcctccgacgggttcaaagccaagcatggcgtaacaagctcttacccaagtgggaaggactgtacacgatcacgcaagtcttgcggccaggtgcattcaagattgtagacggcgatggtcgcgagttagcaaattcttggaacattgatcaattacgtaaattctatgta

SEQ ID NO: 24206 - DNA, 462 bp, Oryza sativa
  unsure (1)..(462): unsure at all n locations
  Clone ID: PAT_MRT4530_29210C.1
cccgctgcagtggcacatttggtgaggcttcgggaggtcaccagaattgttnctgttcacacgggctgctagttcttcacagctatctcgtgtcatccgagcagaagcaactacctaccaataagaggttgcttcagacccaaatggcatcgtcaggaatttttcctcggttattccagcatgtgcgttgttacgttgaaggatgaattccaaaagagcactacattaatcctctaggtcactttgtcaccatgaagttcattttctatctgttcagtattttctgttgtctgtgttcctgcgcacaaagccaaaacatctctgggaggcccgatgcagtgagaattggagctcagttcgcaaggaattcaacaattgggagagttgccgcagttgccgtccttgctgcttgtcaatgacatcaacaatgattcgaatatccttccgggacaaagctggatc

SEQ ID NO: 24207 - DNA, 2114 bp, Oryza sativa
  Clone ID: PAT_MRT4530_29211C.1
gagaacaatgccacaagagccatagagtttcattctatacagactaaatcagtatatggacaaaattaccatgttacaactcaggattatcaaaacaaattaccatgttacaactattatacagactaaatcagtatatggacgtctatatcatttgataattacaatttccaacatcagagggaagcttaatgaacacacaaattacaagatgacaccaaaccaacatacaagagggccaatcatatgttgaaatgaacccatatcctagctagttatggaacagtacaagcccatatgtaaaggatactactggagatgcaagctggaccaagtagaaatcaaatactgctactgagaactcctccatggttcataaagcaattgtttctactcagaagaaacttcaaacagatggctttataatgttgaggtccataaatgttcttgaaataaatcttcaaattaatttcacccaaagtagtcaaaagatttcagaatcaccttcacaaccttgtaatattgttcgaaagaactgccaaatgaatcgtctaccacagaaactttaggatgtgtcttcttagttactacataaccaccctcacagcaagttaataactgactgatatagcttttccggaagtaaacaagttaacgtcaaattctcggagaactatggccatgtctatgttctgacaagacaaccataaaagcgcagcaggatggacttaaataaccagagttttccaagcagacaaatggcctccaaataatatcaatctcacttgttattttgacccaaaagcgtagcagcagtcttgaatggaatggagaaaacatcttatacaccaaagactattcctaacaatgaccaatcccatacaacaagcttcaatttctctggtttataaatgttcgtattacaaataaaatgttcttggacagttgcttgtaatggaagcaaaccaactgcacaatattgacatattgaaatttcaataaattgcaattaaccatagccctaaaccaaagcatcaaggttcctaaaactaacaccagtaaacagggaaatcacgagatctgtacctcaaactgagcaggtcaagcagcaagtaatctgtagttcctgtactaggataaattaatccacagggaaggcggtcaaaaagagctccttaaatcctcgcgagaaatcctgatgttaaactttaactaagaactgacacagaagaatcattccaacgccctagcacatagtgacgatttttatcaaagccaaaaagcaatacatggtccggttaagatgacacacaaccatattcaagataatctgaagagtatgtcttgccgaaattgaacaagttaaagccggtgatttgaaagctctgaacagaccttaaattttctgatatgacttgaccttatcataaaaattactagatccgaaggaaaaactgcatagctgcaagcagacgaacggtctcaaacaaaaccaagcatcacgaacttgaaaggaaccgaacaataatctgaggccagtgagcaatcctaaccatgaccaattcagagcgaaaacttcagttcatctagcctttgatcaagcccaaaatatccatgacaaatccatcgcaccaaacatgaattgacacaaaccaaccgatcgcgcatattgtacccaacacagcaaaccacaattagccataaaccaatcgaaagagatactgtgttcagaaaactaacacaacagcagaagcaaatcgccgaaactagaccccccccaaaccgaacggatcaagcaccagaaaaggacgagcaagcgggcaatctatccggctagttggtgcgcctgatcatcaatcaacaaacggcagcgaacgaggtgagatcgaaaccgattgatcccttacctaccgacttaccagcccacccgcggcggaggggaaaaggggaagaatgaccgcgcgagaagaggaaggaagccatgggaccatcctcaacgaagaaaaagcagcgaggatcgggctgcatttatagaggagcggagaggagaaccaccgaggaggcccccgagttggtgggatgcccccgggttgcgagcggaatcggtggtcgaa

SEQ ID NO: 24208 - DNA, 364 bp, Oryza sativa
  Clone ID: PAT_MRT4530_29212C.1
ggaggaaatactaatttaaattattaaatgttattaacaaattaagttaattattatacatatttacagagagggaggttatagtcgcacaaacacacgacacaatacactagttacatatatgaacgaacatgcaaacctcaaggcccaattcacaggctttctttgcgactaggccagcaccaattataacgctgggatttgatgtgtttgtgtaactgcatattgctgcaagaacaacacttgaaattgctgtccaggcaagcatgccaatctgatttcatttccttcaaagggacacggtcatgaggactctttgggcctgaaatgcaaggcttcacatctgtaaagttgagcttaagtt

SEQ ID NO: 24209 - DNA, 1410 bp, Oryza sativa
  Clone ID: PAT_MRT4530_29213C.1
atggcgccgccgaccgccacgcctcacgtcctccttgtccccttcccggcgcagggccacgcgctgccgctctacgacctcgccgcgctcctcgcggcgcgggggctccgcctcaccgtcgtcaccacgccgggcaacgccgcccagctcgcccctctcctcgccgcgcaccccgactccgtccgcccgctcgtcctccccttcccctcccacccttccctccccgccggcctcgagaacacgatgaactgccctcccgtctacatcgccgtgttcatccacgcgctcgccgcgctccaccgccccatcctcgcgtgggccaggtcgcagcccgcgcaccccgtcgtcgccgtcgtatccgacttcttctgcgggtggatgcaacctctcgccgccgagatcggcgtcccgagggtcgtcttcacgccctccggcgtgctcggcaccgccgtgccgcactcgctctttcgccgcttggtgaagcggcccgtggggtgcgacgatgggtttccggtcgcgttcccggcgatccccggcgagccggcgtttgagtggagagagatctccatgttgtacaaggcctacatagaaggcctcgtagaagagcaggtcggcgagtcgctgaagcagaattgtctctggaatctggagggctggggattcgtgtcgaacaccttccgggcactcgaggggaggtacctggacgcgccgctggaggacctggggttcaagcgcgtgtgggcggtgggcccggtggcgccggacacggacgccgccggcgagcgcggtggggaagcggccgtcgcagccggcgatctcagcgcgtggctggacgccttcccggaaggttcggtcgtgtacgtgtgcttcggtagccaggcggtgctgacgccggccatggcggcggcactggcagaggcgctggagcggagcgccgtcccgttcgtgtgggtcgtgagcggcgacggcgtggtccctgaagggttcgaggcgcgggcggcggcggcggcgcgcgggatggtggtgcgcgggtgggcgccgcaggtggcggcgctgcggcacgcggcggtggggtggttcatgacgcactgcggctggaactcggtgctggaggcggtggccgccggggtgccgatgctggcgtggcccatggcggccgaccagttcgtgaacgcgcggctgctcgtggaggacgcgggcgtggcgctgcgcgcgtgcgcgggcggggccggcgtcgcgcccgacgccggcgagctcgcggccgtgctggccgacgcggtcggggagaaggggagcggcgcccgggcgcgcgccaaggagctcgccgccgatgccgcgatcgcggtgaggagcggtgggagctcctacgaggatctggagcggtttgtgcaggagattcagaagctttga

SEQ ID NO: 24210 - DNA, 1612 bp, Oryza sativa
  Clone ID: PAT_MRT4530_29214C.1
atggggaagctggtgagcaagagctggcaggagtcgaagctgctgtggcacatcgcgttcccggccatcctgacggccgtcttccagttctccatcggcttcgtcaccgtcggcttcgtgggccacatcggccaggtcgagctcgccgccgtcaccgtcgtcgagaacgtcatcgagggcttcgcctacggtgtcctgctaggcatggggagtgcgttggagacgttgtgcgggcaggcggtgggtgctgggcaggtgtccatgctaggcgtctacatccaacgctcatggatcatctgtggcgccaccgctgtcatcctcaccccgacctacgtcttcaccgccggcatcctcatagggcttcgccagcccaccgacatcgccgccgttgccggcacctacacccgttgggtcatcccgcagctcttcgcctacgctgccaacttccctctccagaagttctttcaatcgcagagcaaggtgtgggccatgacggccatctccggcatcgccctggcgctccacgttgtgctcaactacatcttcctcacccgcctcggccacggcctcgtcgccgccgctctcatcggcaatgtcacctggtggctcatcattctcgcccagttcatctacctcgtctccggctgcttcccggaggcttggaaggggttctccatgctcgccttcaagaacctcgccgccttcgtcaagctctcgctcgcctccgccatcatgctctgcttggagctttggtactacacagcagtgctcatccttgtcggcctcctaaaggatgccaaactccaggttgacgtcatgtctgtctgcatcaattaccagctctggaccttgatggttgcactgggcttcaatgcagcagtgagcgtgagggtgtcgaacgagctgggcgcgaaccggccgaaggcggccaagttcgcggtggcgatggcggtgtcgacgtcggcgatcgtcggcgccgttttcatggccgtgttcttcatttggaggacgcagctgccgcgcttcttcagcgacgacgccgacgtggtccgtgagtccgccaagctcggctacctcctcgccgcaaccatcttcctcaacagcatccagcccgtcctctctggtgtggcgataggagcagggtggcaatcactcgtggcgttcataaacataggctgctactacctggttggcatcccactgggtgtcctctttggcttcaagctgaagctcgatgcaatggggatttgggtgggtatgtcacttggcacgctgcttcagacagccatactggccttcatttccttcaggacaaaatgggagagacaggccatgatggctgaggagaggatcagagagtggggagggaggaacgacgacgcgctgccgtccacgacgacgccgacggctgatgatcataacgtagatagatgatgatgagatcagatggttaattattccttcaaattaattaaacttgcagttaaatagtggagttatttatacacacatcacaaaagctgagtaggcttgtagaattattttgtacagattcatatatggtctatgtagagagagaagctcggtttttataaaaaaaaaaaaaaaaaaa

SEQ ID NO: 24211 - DNA, 378 bp, Oryza sativa
  Clone ID: PAT_MRT4530_29215C.1
atggcggagagggtggcgcggctgtcgtcgcagagggcggtggtgatcttcggggcgagcaactgcttcatgtgccacgtggtgaagacgctcttctcggagctcggggtgagctgggcggtgcacgaggtggacaaggaccccaacggcaaggacgtcgagagggcgctcgccggaatggtcggccggacgccgccggtgccggccgtcttcatcggcggcaagctcgtcgggcccaccgaccaggtcatgtcgctccacctcgccggcaagctcgtcccgctcctccgcgaagccggcgccctctggctcagagatacgaagtactcctatatactaccagctaatcaattaattaactatcgatcaattaattaa

SEQ ID NO: 24212 - DNA, 244 bp, Oryza sativa
  Clone ID: PAT_MRT4530_29216C.1
gaggctaggcattagcaacaaaataagttatgaggtggaatgtcaaacttcaagtgcttatgtctccctcctctccctctcgcctccctcccacggcggatttggtggtggtgacggcatcttcggcaacagtggcggtgtctctggtggcagtcgtgggcggatctggctggatccgggccacggcaggtaccagcagccgcaacaagcagatggtggggcgcggtggggagaagaagaatag

SEQ ID NO: 24213 - DNA, 147 bp, Oryza sativa
  Clone ID: PAT_MRT4530_29217C.1
gtttctttttttttttttttttttttaattcccttctagctattttaacttttgtccgcccaaaacaagaggatgcacattgcatagttccagagggttactgacgagaggagaaatgcgggagcctgatcgcaccatcaactattg

SEQ ID NO: 24214 - DNA, 453 bp, Oryza sativa
  Clone ID: PAT_MRT4530_29218C.1
atggatgaaaaccttcctccccgtaccaccaaaagggatcacgtcgatccaccgaaaccatccctaaccccaactccgaccactcctccccagcgggagaacaacgaagaaacatatgagctacccgcggaattccgcgtgacaagccctcctccaccgtcgccaccctacccgttcccgatttcaccatctatggaagaagatggcatgattttcgcggaagatcttgggtacatgtcgaccccatgtccctcaccaccttcggacgtcgatgatatgaaccctccggagaggcacccaatcaattaccccaataggaaccacccagcttacgacgacgacgacgactttgaactactgaacgaggattggttattcttcagagatcaccagacaccaccgaaggatgttcattctccgagcacacggttcaagcggcacaaaagagattag

SEQ ID NO: 24215 - DNA, 1020 bp, Oryza sativa
  Clone ID: PAT_MRT4530_29219C.1
atggatcgaagttggatgtacacgactgacttgaggcgtcagtacaaggagtatagagatggcgtattaagttttatgaaagccgcagaggaagataggataagaagaaacgacaagtacatgtgttgtccatgtaacgattgcaggaatgatattttgttggacgatgaaaaggaagtacacgctcacttgatacgccggggattcatggagagacacacatgttgggtgaagcatggagagcaagatctgggtactgatggtgcaactgcagacagaagtggtgcagacaatcacgaagaaggagatgaagaagagcatgacatgtttgtcccatctccattgggcggtgaaatggttgatgtggaccctgatatgctgcaagacatgttacgtgacgttgatgacccaactatgaacgagagagattccatgaagttcagcaggttggtcagtgactcggacactcctctatacgcaggatgcaagccaaagcacaccaaattatcagcaacattagacctaatgaagttgaaggctagtagtggatggtcagacaagagttttacagaacttttgggaatactgaaggacatacttcctcaagagaatacattgcccgagacgacatatgaagcaaaacaggttctgtgtcccctagggttagaggtccggagaattcacgcatgtccaaacgattgcatattgtaccacaaacaatacgcggacttagatgcttgtcctgtctgcaaggcttctcgatacaagcgaaagaagagcgcggctgtgcgggggagggaaagaagtcaaagcggggtggtccggcgaaggttgtgtggtatctaccaatcattgatcgtttcaagagaaaatttgccaaccccaatgaagcaaagtccgagacaaccccgcaatgatatcgatgtgttcttggagcctgttatcgatgaccttgagattatgtggaaagagggtgtggaaacttgggatgcatatggtcaggagaacttcacgctatga

SEQ ID NO: 24216 - DNA, 5191 bp, Oryza sativa
  Clone ID: PAT_MRT4530_2921C.1
attccgacgttccgggagagtccgattttgcaggagaagaatttgaggaattccaaggccagcaaggcaactcctggtttggaatggttaattcctggtttggagattgaactgtacagccggggttggttgttcagtatggttgggcctatgcaagaggatgccgcgatacaagcctgagtatttgttcggtaccgaaggatttgtccaagagttgcgtacgatgtccttcctcataggatttgggattgcccctttgtatgcccagatccctcatgatcgtgatgaagagaagtgccgggtcaaagtcgccttgaacagcaatcgtgaagatattccatcagtaatgttcgaggctggaggaggaagctacattcatgcttgtcaggaggtggcaaggatcgccataggagagctccgtaaaagctacaatgaccggttggccgacaccgagtatcgctaccatcctcgtcaaccctagggaagtgaccgtggcagctaccttgaacctgcggggatcgagaatgatgctaccacaaggcatttggttgagatgctgtgggctaggatgaaacccgcgctgagattgtgatagccgctcaagaccgtgaagaccggaattgcgacaagatttgcaagctagaagacaaggtggatcgtttggagaaggaactagctgcattgaagggagaagcaccaccgcagaaggccagagttcgtcttaccgcaaggaagagagctctattcgtccctcgctaccagttggcaccaaagatggtgctcactcgcagcaatgggaatggccccaaccccaacaacaacaacaatgcagagaatcccatgcttgctcaagtcctggctcaccaggcacagttgatgaatttgatgatgcagcaactccaaaaccagcagaaccaagggaacaatcatgcacctccccaaaacaagctggcagagtttcttcgcgtgaggccacctgttttgtctagcaccactaatcctgttgaagctggcgattggctgcacgccatagagaagaagttggatctgcttcagtgcacagaccaggagaaggtctcttttgcttcacaccagctgcatggccctgcatcggagtggtgggatcacttccgccttaacaggactactgctgaacctatctcttggcttgaattcaccgctgctttccggaagacgcacataccatcgggagtggtgtctctcaagaagaagaaattcaggtcgctcacacagggttcccgcacagtcactgagtatctgcatgagttcaatcgtctggctcgttatgctccggaggatgtgcgcactgatgaagagcgccaggagaagttcttggaaggacttaatgatgagctttcttacccactcatggctggggattatcatgatttccagaagttagtggataaggctattcgtcaggaggacaagtataaccgcatggagcagaagaaacgccggatcgctcacttcaaggcacaacagggaaatagttagaggctgcgacttgctttgggaccccagtccatgccacagggaggttcttcatctgttgctcgtccgcagcgtcagttcttcaacaacaacacgggcaacaacaaccgcaatcaagctccacgccctgttgcagctccatcacagcaacagcctgccaagagggagcaaggcagcaagcccagtgtgtgcttcaactgtggagacccaggacattatgctgacaagtgtccgaagccccgtcgcgcgaaggtcgtccctgctcaaaacaactcctccgcaccagcagccaaggctcgtgtcaaccatgttgctgccgcagaagctcaaggtgctccagatgtgattttgggtatgttccctgttaactcagttcctgcaacagtgcttttcgattctggtgctacgcattcatttttatctatgagttttgcgggaaatcatgggatggaggtagaagagcttagacgtcctttgatggttactactccgagtaaccaagcactctcatcacaacgtagcccctctgtcagaatagagatccaaggtgtaccctttctggccaaccttattctgttagaatccaaagatcttgatgtcatcctagggatggactagttagccagatataaaggtgtgatagattgtgccagtagaaaagtaactctcaccagcaatgatggtcaagttgtaaccgttcatgcattgccctttggacctctacggtcaagcctgaaccaaataactttggaagagattcccatagtgcgggagtacctagatgtgttccctgatgatttacctggtatgccgcctaaaagggatatagaattccgaatagatctagtaccaggaacaactccgatccataaacgaccctatagaatggcagccaatgaattagcagaagtgaaaaggcaagtagatgatttgctttagaaaggatacaacagaccgagttcatctccatggggagttcctgttatctttgtagaaaagaaagaccatactcagcggatgtgtgtggactatcatgcccttaatgatgtgactatcaagaataagtacccgctgccgagaattgatgatttgtttgatcaactcaaaggtgccaccgttttctccaagatagatcttcgatcaggatatcaccagttaaggattaaagaagaagatatacctaagacagcttttaccacccggtatgggttgttcgaatgtacattatgtcttttggacttaccaatgcccccgctttcttcatgaacttgatgaacaaggtgttcatgtaatacctggataagttcgtggtagtctttattgatgacattctcatttattcccgaaccaaagaagagcatgaagaacatcttcgccttgcattagagaagctgcgagaacatcagttgtatgccaagtttagcaaatgtgaattctggttgtctgaagtgaagtttctgggtcacgccatctcagccggaggagttgccgttgatcctagtaatgtggaatccgtaaccaactggaaacaaccgaagatcgtttcagagattcgcagtttcctaggcctcgcatgatattaccggagattcatagagaatttttccaagattgccaagcccatgacacgactgcttcagaaagatgtgaagtacaagtggtcagaagaatgtgagcagagttttcaagagttgaaaagtcgcttaatatcagctcccattttgattttgcctgatccaaagaagggtttccaagtgtactgcgatgcatccaagcttgggttaggctgtgttttgatgcaagatggaaaggtggttgcctatgcatctcgtcaactacgtccgcatgagaagaactaccctactcatgatcttgagttagccgcagtggttcatgcattaaagatttggcaccactatctttttggtactcgaacagaggtgtatacggatcacaaaagtttgaagtatatctttacccagccggatctgaacatgagacagcggagatggttggaattgattaaggattatgacctgggaattcattatcacccgggaaaggctaatgtcgtagcagatgcccttagtaagaaaggctattgtaatgctatggaaggacaacagttgccattggaattgtgcaaggaatttgaaagattgaatctggaaattatcagtagaggctttgttgcagctttggaagcaaagcctactctcattgatcaagttagagaagcccaaatcaatgatcatgatattcatgagatcaaaaagaatatgagaagaggtaaagctatcggtttcttggaagatgagcaaggaactgtatggttgggtgagagaatctgtgtcccccagacaacaaagatttgaaagatgcaattctgaaggaagcccatgatacgttatactccattcaccctggtagtactaagatgtaccaggatctcaaggaaagattttggtgggcaagtatgaagcgcgagatcgcggaatatgtagcagtatgtgatgtttgtcatcgagtcaaggcagaacatcagaaacccgcaggtttgctgtagcctttgaagattcctgaatggaagtgggaggaaatcggtatggatttcatcactggtctacccagaacgtcgtcaggtcatgactctatttgggtgatagtcgacagacttaccaaagtggctcatttcatcccagtaaggatcacctattccggaagtcatttagcagaattgtatatggcaaggattgtttgtttgcatggtgttcctaagaagatcgtgtccgatcgaggtagccagtttacttcaaagttttggaagaaacttcaggaggagatgggttccaagctgaacttcagtactgcctatcatccgcagatagatggacaaaccgaaagggtaaattagatattggaagacatgttgagagcttgtgctttagacttcggtggaagttgggataagaatttgccttacgccgaattctcgtacaacaacagttatcaagctagtctccagatggctccttatgaagcactgtatggtcggaagtgttgcactccgcttttgtgggatcaaacggtagaacgtcaggttttcggaactgatatcctgagggaagcagaggaaaaggtaaaaatcattcaagaaagactgcgggtggctcagtctcgtcataagagctacgccgacaatcgccgcagagatctaagttttgaagaaggagattatgtgtaccttcgtgtcacgccacttcgaggggttcatcgttttcacactaaaggaaaattggcaccgcgtttcgtgggaccttacaagattgtcagtagaagaggagaggtcgcttatcagttggagttacctcaatctttggcaggagtccataatgtgttccacgtgtcgcagttgaaaaagtgtttaagggtacctaccgaagaggctaatcttgaacagatagaagtccaagaggatctgacatatgttgagaaaccaatccgtatcttggagacagatgagagaagaaccaggaatagagttatccgtttttgcaaggtccaatggagtaatcactcagatgaagaatccacttgggaacgagaagatgaattaaagtcagctcattcgcatctgttcgctagttcttccgaatctcgaggacgagattccgtt

SEQ ID NO: 24217 - DNA, 309 bp, Oryza sativa
  Clone ID: PAT_MRT4530_29220C.1
atggagagatacacatgttgggtgaagcatggagagcaagatctgggtactgatggtgcagctgcagatggaagtggtgcaaacaatcatgaagaaggagatgaagaagagcatgacatgtttgtcccatctccattgggcggtaaaatggttgatgtggaccctgatatgctgcaagacatgttgcgtgacgttgatgacctagctatgaacgagagagattccatgaagttcaaacttttgggaatactgaaggacatgcttcctcaggagaacacattggccaagacgacatatgaagcaaaatag

SEQ ID NO: 24218 - DNA, 1237 bp, Oryza sativa
  Clone ID: PAT_MRT4530_29221C.1
ccacgcgtccgaaacaataaatctcgccctctctctctctctctctcccctggtctctcgctctcttcgctcgcggcggcttctccgcctccgcctccgccgccctctcctcctctcgcctcgccgccggcgccgccagccaccgcgcgggtcgggcgggccgtatcttcctttctgttccgatggcttccgcgaaggtggagaaccgcggcggcggtgggttcggttcgaagaggtcacgcaacgacgtgtctgtaagggagggggactggacttgtcctcagtgtggtaatgtcaacttcagttttagaaatgtttgcaaccgcggagcctgtggtgcaccccgtccatcaccgagtctaagcccaagagtgccacctcctcctgctgctggatatgatcggccacatcttggatatgatcggccacatctgttttatggtagtgctggcaccccacctcctattcctcttggatctggtagctatggtgccccctatccacatcttggcttgcggtatggatatggtccaccagtaggacctcctgcttcatatggccttttttcttcttatggtcaacctggaccaatgggcagtccgatgggaggcatgggctatggccctggacctgagctaggccgatatggttatggttttagaggatctccaatgccggtttctagcccatggtctggtggagcattagtggaaaataatgacagctctgcttcacgcaagcgtcgtggaggcccagatggaatggctgagaatgactggatctgcccaaagtgtgagaatgtcaacttttccttcagaaacagttgcaatatgaagaaatgtggagctccaaggccaagccctggatctaatgctaccccatgtcgcaaagacaaggacgctccggaagggagctggacctgcccggagtgcaacaacctgaactaccctttccgcacggcgtgcaatcggaaaggctgcggaagcagcaggccggcagcggccacggcgaactaggaccctactaactttgcgccggcgattgggggcagagagagtattgttgtatcctagctatatacaagttaatttaaactgtaaacggctcaaatatattttcttgtggcctgagattcgttgtgcctgatttttaaattcgccttctgaatttcctttacgaaaaatagaacttttatatacattggattaaaaaaaaaaaaaaaaatgggaaaaaaaaa

SEQ ID NO: 24219 - DNA, 1992 bp, Oryza sativa
  Clone ID: PAT_MRT4530_29222C.1
gtccgagacaaccaggcaatgacatcgatgtgttcttggagcctgttatcgatgaccttgagattctgtggaaagagggtgtggaaacttgggatgcatctggtcaggagaacttcacactacgagttctattgttctgcaccattaatgattatcccgcgttgggtaatctttctggacaaaccgtgaaaggaaagaaggcatgctctgattgtatggaacatacacgcagtagatggctgaagaaatcaagaaagatcgtttacatgggtcataggagatggctccccctaaggcacgcctttagaagaaagaagaaaattttcaatggtaagaaagaacttgggtctgcccctgcggatttgtccggagatcagaagaaaagaaaacgtagcaaggaggacaagaagaggatgtggaagaaaaaatccatattttggcagctaccttattgggaagatcttgaggtccgtcattgcattgatctgatgcacgtggagaagaatgtgtgcgataacttgctggggctattattgaatatgcctggcaagacaaaggacgggttgaatgcgcgtctcgatctacaggagatgaacattcgcagtgaacttcaccctgttacagatgagaagacaggaagagtgtacctcccaccagcttgccacacattgtcgaaggatgagaagattgcaatgctatcatgtctggcaaatattaaagttccttcgggctattgcacgacaataagtaagtacgttaaattggaggatcttaagctggttggaatgaagtctcacgattgccacgtgctaatcacacagatcttgccagttgctataagaggcattctaccaccacaagtccgtcacacgatccaacggctttgtgccttcttcaatgcaatcggtcagaagattatagatccagaagacctagatgggttgcaggccgatattggcagtaccctatgtcacttggagatttattttccactggctttcttcgatatcattggtgatctcactgttcacctagtgaagcaaacaaaaatatgtgggccagcttttatgagagaaatgtggccattcgagaggtacatgggaattctgaagtcgtacgttcagaacagagcaaaaccagggggaagcatcattgaaggtaacacgaccgaggaagccattgagttttatatcgattacatggccgagactgatcctatcaaagtttcctacgtctcaccacgaaggaaggctcatttcgcagtgctgcaacatatggctgaagtaacccagtgaacttcagcctattatagatgagaagacaggaagagtgtacctcccaccagcttgccacacattgtcgaaggatgagaagatcgcaatgctatcatgtctggcagatattaaagttccttcgggctattgcgcaagaataagtaagtacgttaaattggaggatctaaagctggttgaaatgaagtctcacgattgccacgtgctaatcacacatatcttgctagttgctatcagaggcattctaccaccacaagtccgtcacacaatccaacggctttgtgccttcttcaatgcaatcggtcagaagattatagatccagaagacctagatgggttgcaggcagatattgtcagtaccctgtgtcacttggagatgtattttccactgttcacctagtgaagcaaacaaaaatatgtgggctagcttttatgagagaaatgtgaccattcgagaggtacatgggaattctgaagtcctacgttcggaacagagcaaaaccagaggggagcatcattgaaggttacacgaccgaggaagtcattcagttctgtatcgattacatggccgagactgatcctataagagttcttgcgtctcgccacgaaggaaggttggcaggtgtcggcacaactagcaaaccgtcattccttctctctgtggcatgccaacgtactaactttgcttcattggggttgg

SEQ ID NO: 24220 - DNA, 450 bp, Oryza sativa
  unsure (1)..(450): unsure at all n locations
  Clone ID: PAT_MRT4530_29223C.1
atctttcttggcacatcctcctccgccgccgggtggttcccaccggctcccgatctgcgaggcaagcagctctcgcacccgtccggtgtcgccgtcccctgggtggtgctgactatcgtcggcgttcggcctcctcgtgcagatggtctgcttcctgttcgtgttgaagggatgctgctctggggcgtgtgggaataaatttcttgtggtgcttatcntgtggctgtcttgtcatccaggactgcggtgtccccgtggggttgcggtgcccctggtcggtttggtcatggtggttctgttgatgggaatactccttctttggttgaagcgttgctggattcgctgggctgctgtgttgtgtgtggttnttacttcgctgccgcngtgtgccttctttcctgggtgtctgggcgtggtctgcccttgtgctctgggtgccgtcggccgttt

SEQ ID NO: 24221 - DNA, 1333 bp, Oryza sativa
  unsure (1)..(1333): unsure at all n locations
  Clone ID: PAT_MRT4530_29224C.1
cccccctcccccccgcccgcccgcgactgcgtgcgccggggcgaccgagagctgggccgcgcgcgccgccggcccgcgggaccccccgccggacctcccgcgcccgcgcggggcgcccccccccgccgccgcccgcgtctgtatcatctcctcctctatccattaccatattttccccttttccatccgcgagcgagggagtgagtgagcaatcgagatcgagatggaggtggcgagaggcggcgggaagctgaacccgtgggcggagcccttcgtgccggcgggctggtcggccacctactggcgctgcggcggcgtcgctgccgtggagccggctgtggccgaggtggaggacttctccccggagtggtggcgcctcgtcggctcctccccggccttccgcgaccgctggctccgggactactccgcgctgggcctcctcgacgacaacgacaacggcgacggctacgacctcgaggggttcctcctccccgacgacctcttctcctccacccctcatctggtgggagaaccggcggatgagaaggagggcaagggtttcggcggcgccggggggaagaaggtgaagggcgggtccgccgaggtggtggcgtggggcatcgacaagtggtggcgcgcgcactcctcgccgccggaggtgcccaggtacgccgacaaggcgcccaggagggtcgccgccgccgccgctagggtcaacccccgccccatccagcagccgcgctgagcgtccgtctccgccgccgcccgcgtaatcatccatccatccacccatcttgacaaacaagcagaaaaaaattagggaaaaaaaggttttgttttgttattttcgatctactcctagcttttttgctaatctcgtcgcgtcgtcatcgtcgtcaagatctgggttttggtcaggatctatggagctgcgagagatctcccctgtgttgtgtacagaatcatgtaaaaaaaatgctgatgtaataaagattgcagcgagagatttcgcagctgctgccttgtaatttccgagatatggatacagttcccctttcgtgtcaaaaaaaaaaaaaaaaatactccgtcccccgtgctgattagcactngctttggtgcgatttgccaccctcagataaggaagagagactgaactctgaacaagtgcagcctagggggtatgacggacagaagcccagacattgttcctgtaaggaaaaattatacttttgactctactcctttaaccattaaaaccgatgcaaattatattcttgggcggttttaaaaaaaaaaaaaaaaaaaaaaaaaaaaaaaaaaaaaaaaaaaaaaa

SEQ ID NO: 24222 - DNA, 825 bp, Oryza sativa
  Clone ID: PAT_MRT4530_29225C.1
atggatcgaagttggatgtacacgactggcttgaggcgtcagtacaaggagtatagagatgacgtattaagttttatgaaagccgcagaggaggataggataagaagaaacaacaagtacatgtgttgtccatgtagcgattacaggaatgagattttgttggaagatgaaaaggaagtacacgctcacttgatacaccaccggggattattcatggagagatacacatgttgggtgaagcatggagagcaagatctgggtactgatggtgcagctgcagacggaagtggtaaagacaatcatgaagaaggagatgaagaagagcataacatgtttgtcccatctccattgggtggtgaaatggttgatgtggaccctgatatgctgcaagacatgttacatgacgttgatgacccaactatgaacgagagagattccatgaagttaagcaggttggtcagtgactcggagactcctctatacgcaggatgcaagccaaagcacaccaaattatcagcaacattagacctaatgaagttgaaggctagtagtggatggtcagacaagagttttacagaacttttgggaatactgaaggacatgcttcctcaggaaaacacattgcccgagacgacatatgaagcaaaacagattctgtgtcccctagggttagaggtccggagaattcacgcatatccaaacgattgcatattgtaccacaagcaatacgcggacttagtgcttgtcctgtctgcaaggcttctcgatacaagcaaaagaacagtgcaggggagggaaagaagtcaaagcggggtggtccgatga

SEQ ID NO: 24223 - DNA, 1680 bp, Oryza sativa
  Clone ID: PAT_MRT4530_29226C.1
gttcattgttcagcgatggatcaaagttggatgtacatgactggcttgaggcgtcagtacaaggagtatagagatggcatattaagttttatgaaagccgcagtggaggataggataagaagaaacgacaagtacatgtgttgtccatgtagcgattgcaggaatgagatttggttggacgatgaaaaggaagtacacgctcacttgatacgccggggattcatgaagagatacacatgttgggtgaagcatggagagcaagatctgggtactgatggtgtagctgcggatggaagtggtgcagacaatcatgaagaaggagatgaagacgagcatgacatgtttgtcccatctccattgggcggtgaaatggttgatgtggaccctgatatgctgcaagacatattacgtgacgttgatgacccagctatgaacgagagagattcaatgaagttcagcaggttggtcagtgactcggagactcctctatacgcaggatgcaagccaaagcacaccaaattatctgcaacattagacctaatgaagttgaaggctagtagtggatggtcaaacaagagttttacagaacttttgggaatactgaaggacatgcttcctcaggagaacacattgcccgagacgacatatgaagcaaaacaagttctgtgtcccctagggttagaggtccggagaattcacgcgtgtccaaacgattgcatattgtaccacaagcaatacgcggacttagatgcttgtcctgtctgcaaggcttctcgatacaagcgaaagaagagcgcgggggagggaaagaagtcaaagcggggtagtccggcgaaggttgtgtggtatctaccaatcattgatcgtttcaagagaatatttgccaaccccaatgaagcaaagttagtacgttggcatgccacaaagagaaggaatgacggtttgctaagacaccctgcggattcgattcaatggaggaatatcgatcgaaagctcaaaggctttgctgccgaccccagaaacatgaggatatgtttgtgtacggatggcatgaatcctttcggagacatgagcagttctcacagcacttggccagttcttattgcgaactataacctcccgccatggttgtgcttcaaaaggaaatatattatgttgtgcttgttaatccaaggtccgagacaacccggcaatgacatcgatgtgttcttggagcttgttatctatgaccttgagattctgtggaaagagggtgtggaaacttgggatgcatatggtcaggagaacttcacactacgagttctattgttctgcaccattaatgattatcccgcgctaggtaatctttctggacaaaccgtgaaaggaaagaaggcatgctctgactgtatggaacatacacgcagtaggtggctgaagaaatcaagaaagatggtttacatgggtcataggagatggctccccctacggcacgcctttagaagaaagaagaaaattttcaatggtaagaaagaacttgggtctgcccctgcagatttgtccggagatcaggtacacaacatggtgaaggacattactaatgagtttgggaagaaaagaaaacgtagcaaggaggacaagaagaggatgtggaagaaaaaatccatattttggcggctaccttactagaaagatcttgag

SEQ ID NO: 24224 - DNA, 453 bp, Oryza sativa
  Clone ID: PAT_MRT4530_29227C.1
atggctgcaaatacagcccgcggtggccaccgcctgccaaagcccacaccgcggtcaccaggtggtagaggggaggggattggaggagcccaggcgtcatcgtcgtgtcctcttaacttggccgccaacgaagatccattttcgctaacagtgctaggtgaggaagaaaaagctgagaatggaatatggctgcagaggcagtggtgcaacgatgggtggtcaacgacaaggaggtggtgccaatggacggcctatggtctacggttgatgatggcgtcgactgaaatttcggaggtagcagcctatgctctccagatgatggcaaacagcgagagacagcaccagatggtggaggtgaagccggagggttggaagatggtagagaagaaggaagatgggagtagactgatactcaccaacgatgcaaccgccatggacgacgtgtggggatga

SEQ ID NO: 24225 - DNA, 300 bp, Oryza sativa
  Clone ID: PAT_MRT4530_29228C.1
tcaatcgatgatgtcgagcggccgcgtagaaatacgctgcccagaaacctttacaccgcccccgtgcaggtgcgaatgcggcgaaggctcggagacaccgctcgccggaatgctcgttgcacgacgagcaccacggccggcttggatcgacggcgacgcaacacggcggcagttgaggaatttcagagtagatggctgttgtgttctgtgtccttcaaagacgtctccttcactccgtccccgcgccagcgcccggccgccgccccgacccatcccctttgccaccgccggagcctccat

SEQ ID NO: 24226 - DNA, 183 bp, Oryza sativa
  Clone ID: PAT_MRT4530_29229C.1
atgtcgacagacgacaacatcaacggtgctgctgagggagatgtcgacaatggcgatggaggaggcggtgcagggaacagctccatcaacagaggcaactctacctcatattccagcggagagccattctcaggcttcactttcgtcgccgcctctcgtggtggcaaggaaaatgaaggctaa

SEQ ID NO: 24227 - DNA, 436 bp, Oryza sativa
  unsure (1)..(436): unsure at all n locations
  Clone ID: PAT_MRT4530_2922C.1
actgacgatccanctcacggggcgngtgaaccagaagctgtcggccatgggagcatgtcaagaaacgccatgaaaanaaaggcttcctctatgcctgcttgttcatgctgtgctgctgcttctgctgctacnaaacctgcgancactgcctcgagtgcttctgctgctgctgccanaaagacaactgataaaatcaanatcgatttcctggatttgttancgaattgttcgtccaaataataaaaggctancttggtgtgattctccncggtttaattgtgttttactatgcgttaaccgtggtganctactaataattatgtctccatgccgtgactatnaatnaacgaatnaattgcnngtggattgtggttgttantttgttancnggatttctgatttncnngtcnntccntgttgttntcaaatcctgtnt

SEQ ID NO: 24228 - DNA, 1884 bp, Oryza sativa
  Clone ID: PAT_MRT4530_29230C.1
tcgtaaacctagcagcagcagcacacgtacgcactcgatcacacgtgcgcatcatctccatctcctcaacaatggcgggctcgacggcggcggcgctgaagttcacggtgaggaggaagccggcggagctggtggcgccggcggggccgacgccgagggagctgaagaagctctcggacatcgacgaccaggacgggctgaggttccacatcccggtgatccagttctaccggcgcagcgccgccatgggtgggcgcgacccggcgccggtcatccgcgccgccgtcgccagggcgctcgtgagctactacccgttcgccgggaggctccgggagctcgaggggcggaagctcgccgtcgactgcaccggcgagggcgtgctgttcatcgaggccgacgccgacgtgaggctcgagcacttcggcggcgcgctgcagccgccgttcccgtgcctggaggagctcgtgttcgacgtccccggctcgtcggaggtgctcggctcgccgctgctgctgtttcaggtgacgcggctggcgtgcggcgggttcatcctcgccgtgcggctgcaccacacgatggcggacgcgcaggggctcgtgcagttcctcggcgcggtggcggagatggcgcgcggcggcgcggcggcggcgccgtcggtggcgccggtgtgggggcgggagatgctcgaggcgcggagcccgccgcggccggcgttcgcgcaccgggagtacgacgaggtgccggacaccaagggcaccatcatcccgctcgacgacatggcgcaccgctccttcttcttcggcgcgcgcgaggtcgccgccgtgaggtcccacctcgcgccgggcatccgggagcgcgccaccacgttcgaggtgctcaccggctgcctctggaggtgccgcacggcggcgctggctcccgacgacgacgaggtgatgcggatgatctgcatcgtgaacgcgcgcggcggcggcaagagcggcggcggcgccggcatgatcccggaggggtactacggcaacgcgttcgcgttcccggtcgccgtcgccaccgccggcgagctccgcgcgaggccgctgggctacgccgtcgagctggtgagggcggcgaagggcgaggtgagcgtggagtacatgcggtcggtggccgacctgatggtgcagcgcggccggccgcacttcacggtggtgcgcgcctacctcgtctccgacgtgaccaaggccgggttcggcgacctcgacttcgggtgggggaagccggcgtacggcgggccggcgaagggcggcgtcggcgccatccccggcgtggcgagcttcctcatcccgttcaagaacgccaagggggaggacggcatcgtcgtgcccatgtgcctgcctggccccgccatggacaagttcgtcgaggagatgggcaagctgatgaaacccgccgccgccgccaccgccgcgacgcggcagcagccggccgacatgttcgccatgatcaagcgccgggaggggcgtggacgccggcgacccgcacatcgaggggctggggaactgggcggcgagcaagcacgaccgggccaacggcgaacacctggtgttctccagcaggtgtcccgcgccgagagccaggacgtcgtcggcgtggactacctccaccacatcaaggccgtcgccggcgacgccggcggcacggcgctcgtcgccgaatacggcattcggaagctcatctgcgctctgaatcgatcagccgcgcgcactatgtgtgtttgtgacgagttccctcttcattttgtaccatggtaaaaatatgtacttgaataactccgatgaattgcaatgtataatactccttccattttatattataagtcgcttcccccttttttcaaaaaaccaa

SEQ ID NO: 24229 - DNA, 880 bp, Oryza sativa
  Clone ID: PAT_MRT4530_29231C.1
tttgaataagacagatggtcaaacatggtgagaaaaagtcaacggcgtcatctattaaaaaacagaggtagtactggcgcccgcacgatctccactctgcgtaaccgagccggataagtcgcgcgtaacttatccggactccacgccgttttcacgcaccggatttttcggaatgtttccaacaacaagctagggaatgggcacggcgaatccggaaaactaaagatgcaataatatataaactgatcgcacatgggacgatagagaagaaaagctatcatcagcagatacgcaaagctttccctaacaatctaagtactataaaagacactcagcagaggatattttgttaaattcagggacatgatgggtttgttcgcactgcatcaaatattgtcagtcaattgtctttgatgtgaatattggggctctaaatgatcttcaacaagatcagatatgtgcaggcatagaaacgggaagcaccgttcctctgaccaagcagatgaagaatccagcattctgaagtgattttatgatgctcaggtcattcatagtgcgataaatcatgatgccataatgaatgccatcaatgatcagaagatgcgcctagaaacagaagctttacacgtctcttcaagaaccgtagaattgctctcaaccatgaatgctcagaagttgtgatggtttttctgttcctacatgaactggaagagttagtcgtatgtatgcaggatgcaacactcaatagccagttagttagtagttcttatccctcagaaactgcaaacaacaggttccaaagtcttcagttgtgtactctagatggctcaacattttaagaatctgctgaaggaaatatcatcgttgcaaagaggtgaag

SEQ ID NO: 24230 - DNA, 1488 bp, Oryza sativa
  Clone ID: PAT_MRT4530_29232C.1
tagtggatccccgggctgcaggaatcggcacgagggagggagaaatcgcctaaccctagcggtggtgcgccatgacgcgtgacggcgcgctgccggcgagcggcggcggcggggcggcggaggggccgaggcggtgctcgcagtgcgggcaccacgggcacaacgcgcggacgtgcacggcgaggggccccgtgaagctgttcggcgtgcggatcggcgacaagccgccgaccgcggccgcgggcggaggaggagggatgaggaagagcgccagtatggggagcctcgcgcagctggcggaggggggcggcggcggcggcgggagggaggaggggtacggctccgatgggaacgacgacaaacggcggaagcgaggtgaggcatggtcagaagaggagcacaaaaagtttctacttgggcttagtaagttaggaaaaggtgattggcgcggcatatcacgcaattatgttggttcaaggacgcctactcaagttgctagccatgctcaaaagtacttcattcgccaaacaaatgtgcacaggagaaaaagaagatcaagccttttcgatatggttatagatgattctgatgaccaaccactgtcccgtacatcttcacaagaagtagaagtagaagagaatctagaagatggacatcctgttactgcaccagtgatcccacctgctcctgtgcctatgctatcatcctctttggttccgccaccagtaccagcaatggcaccagttgctccaggtcctgtgttaacatctgcttcggccacactaccagtgtcagcagtggcaccccaaaccgatgaaaaggaacaagttgcctcaggttcaaatacaacagagacaggggctgcaattccagaagtcatgcccccatatggttatccaatgatgcttcctccatactacccaccggcatttgttccaatgccctactatggttatgtgcctgttttctatgcaccaccaggagcagtgcaagcacaacatgaggttgtcaagcctgtggccgtgcactcaaaacctccagtgcacatcgatgaactctacagcatgtccgaactcagcctgaagggcgaggctggtgtgaaaaacggcactcctaattctctgttgcctccaagaccaattggtagaccagacaggcaatctgcttttcatggaaaaggaccttctgatggctcttcaaatggactgattcctgcaaagtgattctgcagtaaaacatccattcatgtgtatctaatgcttagaagatagtaaatcataaaccccatgctgctgaaatggtgctgttgtacatgcaaaatgcttttactggtcattttagtttcatgtttggaggaagccatgtatgtcctgcgagtaaattgacttttagtttgacaaaaatgtaccatttctttgtcgttgtttctcaggcttcctcaaattgatttgaaaatctgaaggtttttctaaaaaaaaaaaaaaaaaa

SEQ ID NO: 24231 - DNA, 997 bp, Oryza sativa
  Clone ID: PAT_MRT4530_29233C.1
cgttgcgaaatttttgcgagctcgcgacgcgaaccccctacgccgcagccgcaggcttcctcttcatctcctcctcctccagacctccacgcgagcgtgccccggggtggaagcggaggcggcggcggctcgagcgcaatctggtggcgtgggggcgcgtcacgatggcggcggcgctggcgaggcgtggcggtggggggctggcgcgcgccctggcgcgggggagggggatgtgctcggccacggcggcggagcgcgccgccggggcggcgctgacgtccgaggagctcatgcggatggagcgcgagcgcagcgcgcacaactaccatccaattccggtggtgttctccaagggagaaggttcacatatattggatcctgaaggcaacaaatacattgatttcctgtctgcttattctgcggtcaatcagggccattgccatccaaaagtcctgagagcgttgaaagagcaggcagaaaggctcacactgagttctagagctttctacaatgacaaattcccaatctttgcagaatacctgacaagcatgtttgggtatgaaatgatgttgccgatgaatactggagctgaaggagtggaaacagctatcaaattggtgaggaaatggggttatgagaagaaaaagataccaaaaaatgaggctttgattgtctcttgctgtggatgttttcatggtcggacattaggtgtcatctctatgagttgtgataatgatgcaactcgtggttttggcccattggttcctggccatcttaaagttgattttggagacactgatgggttggagaaaatctttaaagatcatggcgagaggatatgtggttttttgtttgaaccaatccaaggagaagctggggtaataatcccaccagatggctatttgaaagctgtcagagatttgtgttcaaggcacaacattctgatgattgcagatgagatccaaacaggcatagctagaactggcaaaatgctggc

SEQ ID NO: 24232 - DNA, 877 bp, Oryza sativa
  Clone ID: PAT_MRT4530_29235C.1
tcgttcgtcaacaaaaaggcgcctctaagaattcctcccaaactttttggtgttgtcaagccgtgcgtttcggggtacatcaacggcggcgatgagctcccggatggccggatcggcgatcctccgtcacgtcggcggcgtccgcctcttcaccgcgtcggcgaggccgttccttgcaggcggagaagccgtccccggggtgtgggggttgcggctgatgtccacgtcgtccgtggcgtcgacggaggcggcggccaaggcggaggccaagaaggcggacgcggagaaggaggtggtggtcaacagctactggggcatcgagcagtcgaagaagctggtgcgggaggacggcacggagtggaagtggtcttgctttagggtacttgcgcttcgctttgctcctgatcggtttcctgtttcgattctgtttgtcccgtagattgatcgccagatcgatgtatccatactccgagatagtaggctcggtccttaacttgtcgcgccgccgtgtgtaattttggtttgattttctccgcagccatgggagacctacaccgcggacacttcgatcgatctgacgaagcaccacgtgcccaagacgctgctcgacaagatcgcctactggaccgtcaagtcgctgcgcttccccctgatatcttctttcaaggaggtatggctgccgcgcgatgatgcttgagacggtggcgggggtgccggggatggtgggcggcatgctgctccacctccggtccctccggcgcttctaacagagcggcggctggatccgcccgctgctggaagaagccgagaacgagcgcatgcacctgatgaccttcatggagggggcgaacccaaagtggtacgagcgcgccctcgt

SEQ ID NO: 24233 - DNA, 1706 bp, Oryza sativa
  unsure (1)..(1706): unsure at all n locations
  Clone ID: PAT_MRT4530_29236C.1
tttttttnnttttacacacacaaaggaataaccaaattcacgtatatacaccgtaaggcacagagaagataatcacatgagaacagacagttgtacagggtaagacccctctctgatcagatacccagaggagatccatcaacatgtatatatatttatatctgatttgcaactacacatcgcaattactctagctagtacattctcattcctatgtataaactgagttactactcttactgacatgtgccggtatctgtgaaactaccatacatgtacatcaattgcatatacttccttggacgtacacgtactaaagctgctgtgctggtttcagccatcggtctcagtttgcatctcgagcttctgtatcaaggccttcttttcttcttcagggagggcgttgaacataaaaactgatttgtcaccaatgtcatccttgatgggctgctggaattttcttgctgcgaatacagtgaagagaaccatccaaactcctaaaaggccggcttttgttccgttgtccattagaccagacaggtgtccaagaagaaggccagggataacaaaagttaaaataccagcttccagttttccatagcagagaccttccttgaagacgaggcctgtgagcgccgcaaacgtagggccgacgaaccacagcgcagccgggtggtcgagaacgtagccgacgaggctctcgtcgagcggctgcgcgccggcgacgtacgtcccgatggacccgacgactccgaccacccacagcgcctggaggaaccgcttgatcggagtgacgtagatgtgaatcagcacgagcgaaagccccagccccgccgctccggtggcgtagaggaggtcggcgccttgcctgatggcgtcgccggcggcgttcccctcggggaggaacgcggccgaggcggcggccacgaaggacgcggcggcggtgaccagcccggaccgatacagcaagacctcgcgcacgtcggagtcctcgacggtccatgggccgtagacgccgttgtagacgttccggtcggcgacggcgacgagctgcctcgcggcggaggcgcggcggccgaggaccttccttgaagacgaggcctgtgagcgccgcaaacgtagggccgacgaaccacagcgcagccgggtggtcgagaacgtagccgacgaggctctcgtcgagcggctgcgcgccggcgacgtacgtcccgatggacccgacgactccgaccacccacagcgcctggaggaaccgcttgatcggagtgacgtagatgtgaatcagcacgagcgaaagccccagccccgccgctccggtggcgtagaggaggtcggcgccttgcctgatggcgtcgccggcggcgttcccctcggggaggaacgcggccgaggcggcggccacgaaggacgcggcggcggtgaccagcccggaccgatacagcaagacctcgcgcacgtcggagtcctcgacggtccatgggccgtagacgccgttgtagacgttccggtcggcgacggcggcgagctgcctcgcggcggcggcgcggcggccgaggtaggcgaggggaagaggccgtccgactgcggtgggggtcagccccagcctggggtgcggccgtagaggcgcgacggcgaggcgcggcgagaggaggaggacggtagcggccatggcgtcgcggcgggatgataattttttgggggagaat

SEQ ID NO: 24234 - DNA, 266 bp, Oryza sativa
  Clone ID: PAT_MRT4530_29237C.1
tcccggggtcgccccacgcgtcgcgtccactcgtccgcccacgcgtgccgcccacgcgtcctgatctgtgctgtttaatgttttattttaatggacatcgacatattactaggttatttattgatcaaacgatataaaatgactctcggcgcgtggtacgcttgtgctcgcaaccgtgtgtaattatcatgtgatgggcaataaagagcaggtgatgagcagtgtctcatattatttatcattaaacagcaaaagaaaaaacacag

SEQ ID NO: 24235 - DNA, 318 bp, Oryza sativa
  Clone ID: PAT_MRT4530_29238C.1
atgccgtggcgtggcagggtccctctccagctcagcacccacgcgccccgcgccgcacgccgcgtgtatgacatgcggggcccccctgccgcagccagctcgctcggcgagggtgccacaccaggtgccaccgccccgcgcggcgcacctgcacacaccgcccgcgaggcgaggctgctgctgtggctgcaggggtatgacgtacggggtttcatccggtctctagtggggtggagcggagcgctgatgtgcgacaaagggagggaggtgtgcgagacggatggcgatgtgggtggctgccgcttttgcccaggttga

SEQ ID NO: 24236 - DNA, 1368 bp, Oryza sativa
  Clone ID: PAT_MRT4530_29239C.1
atggcgtccacagctgctatactagccctcatcctcctcctcctcccgccaatagctctcgccgccggcgacctaaatggcttccgcgcgacccttactcgcatccaccagctctcgccggggaaacattccgaagcggtgcgccgcgacggccaccgcctcgcattcctctcctacgccgccaccgccgcagccggcaaggctaccaccaccggcaccaactcgtcgtcggtgaacgtccaggcgcagctcgagaacggcgcgggagcgtacaacatgaacatctccctcggcacgccgccgctcgacttcccggtcatcgtcgacaccggcagcaacctcatctgggcgcagtgcgctccgtgcaccagatgcttccctcgacccacgccggcgccggttctgcagccggcgaggtcgtccaccttctccaggctcccgtgcaacggctccttctgccagtacctgccgacctcctcccggccgcggacgtgcaacgccacggccgcctgcgcctacaactacacctacggcagcggctacaccgccggctacctcgccaccgagacgctcacagttggggacggcacgttccccaaggtcgcgttcgggtgcagcacggagaacggcgtggacaactcgtcgggcatcgtcggcctcggccgcggcccgctgtccctcgtgtcgcagctcgccgtcggccgcttctcgtactgcctccgctccgacatggccgacggcggcgcgagcccgatactgttcggctcccttgccaagctgaccgaagggagcgtcgtccagtccacgccgctcctcaagaacccttacctgcaacgctccacgcactactacgtcaacctcaccggcatcgccgtcgactcgacggagctcccggtgacgggcagcacgttcgggttcacgcagaccggcctcggcggcggcacgatcgtggactccggcacgacgctcacctacctcgccaaggacggctacgcgatggtgaagcaggccttccagtcgcagatggctaacctcaaccagacgacgccggcgagcggcgcgccctacgacctggacctgtgctacaagcccagcgccggcggcggcggcaaggccgtgcgcgtgccgaggctggcgctgcggttcgccggaggagctaagtacaacgtgccggtgcagaactacttcgccggagttgaggcggactcgcagggccgcgtgaccgtggcgtgcctcctggtgctcccggcgacggacgacctgccgatctccatcataggcaacctgatgcagatggacatgcacctgctctacgatatcgacggtgggatgttctccttcgcgcccgcggattgcgccaaactgtga

SEQ ID NO: 24237 - DNA, 1068 bp, Oryza sativa
  Clone ID: PAT_MRT4530_2923C.1
atggctgacaataaaaaaggcagtatggtcagaaatcaggacgtgggtacctcaagctcccgagtgaatgaagcaccagacaccagttgtatggcagtggtccaacacctgattaaccagaacaaattgcttatagagatactacagcagcatcagacgccaattctgaacccgagtcagatgcaacctcaagtgcagttggaggcagtccaagcactcacaccacaagtcagcgctccgccagcatcccaacaggcccatcgtgccatgccacttgtggactcaaaagaagcaagaatcatttgttttatctgtgttgaacaagggcactatgcaaggaaccgtcctcagcagaaaagaaaagcaccaatgcgaaccgaagatgaggtccgtaagatgaccattaccggcacagaatggcctccaccaggaatgacaaaacgtcagagaagaaatttcttccgaggtgcaccacagttgacagaacatcttttggctaatggaggtagagtgtctgatagcgaagattcagatcaagtctcctcacgggatgaagatgagaagtctctccaaggtttcaatcagaataaaaaggaacataaggcatgctctcgttgtggagaaatcggtcactttgccagctcatgtgtcaccacttgcgttccttgtgaggaagaccatccacccgacgagtgtccaacgagcaggatcacttgtttcttgtgtgaaggaactaatcatgtaccaaaagattgtcaattcagttttctgctgacgaagaagatggccaaccaacccgccagttacaatggagagaagcatcaaggcaacccaaatcctcgacaagactacagtttcagcctaactccagtgccaagacagaggaatcaaaatgggaaaagaaaatgccaagtctggaaagatatatgttgcttcaattgtcaagaagtgggtcatttcgccgacatgtgcccgaaaccgagaaacatatttgccagcacatcagtccatgcaactcccctcaatcagaagcttgctcctcagcgaattgtcatccatgcgtcctga

SEQ ID NO: 24238 - DNA, 265 bp, Oryza sativa
  Clone ID: PAT_MRT4530_29240C.1
agwaystggragaagmaggsayccsraccctgtgccmaaggtcgaccraggywgccabccrwaggmcgaamwagctcctgcgttscaagwcsgkggsyyyggcsttgtacysgcmtkkktmaagmyyttytmmkcctwwkkrctgmaycccgwwcaagtttyygtcscacgggcyaytgsgwccaccgttkgsaatkkascctttahttawdccadatbgccccvccttgtgtyggccctagbggtgkgtyycaaamaccctaca

SEQ ID NO: 24239 - DNA, 492 bp, Oryza sativa
  Clone ID: PAT_MRT4530_29241C.1
atggctgaccgacgggccctcctccttgctgacaacgaaaggggggggaagggctcccgccgcctgaagtgcgcctcggggcgagccgccgtcgtcgtatgtcaggcggcgtcgtgccccgacacggcgtggcttcccccccgcccggcggcggggagaggcccgagccacccgatagggtgggatcttccctccgtgagggatcacggcggggaggagtcggagaattgcggcgacggtggcgggcgatgccttgatgggacggggcatacctgcccccactccgccgagcacaaggcgggacgtgggggcactgccgcccgtccaatcggatgtgaccgacgacaggccgcctgggtctccaccccactcgctcctcccgccacgtggcggtcgggcaagggcctcggggcgaggcagtgcaagggcccgaggggtgtgacgtggcaccccgagtcccccctggctgcctctgcgtcgtccaaagtgtag

SEQ ID NO: 24240 - DNA, 210 bp, Oryza sativa
  Clone ID: PAT_MRT4530_29242C.1
atggcgaaggaaaggaatagagacgtcctagacaacgccttcaagaaggccatggcaacaaagacatcaccgttgcccgtccaactagactcggttttcacctggagagtcctatcgaggaaggggagagaggctgctcgacaacgccccaaggagggaacacaacatccaaggatgttgccgttatcggctcaggcagtcccgagctag

SEQ ID NO: 24241 - DNA, 733 bp, Oryza sativa
  unsure (1)..(733): unsure at all n locations
  Clone ID: PAT_MRT4530_29243C.1
gatccatccatccccactccctcagaaaccatcgacgttaccccaaaaatcgcctctgctccctccgctcccagaaattgacgncaccaatttcttccccctattcggattccggtcatggagatgctactgccaccaccgatgaactnctcctcccagtcgcggcgaatcaagcgaccccgatgaaaaatcgagctccccggcgacggatcgacctgccacgatggcggattgagcggcctcacctctcctcaccggatccagccagtgtcgtggccatcttcgagctcgagctgcatgcctccgtgcgacagcggcggtggatcggacaagggtgacgcggatctgtcggcctccaccccagatgagcgattttccactctaccggattgagtgtatatttggctttgtcttttatctgactggatttctcttctttttcttcttaattaggattcaattgttcttaccataaagatgtttttaggcccgatttggttaggttttgggggaattttgggttaaactctatcggttttctataggagagacggggatagattcggtcggtttctttaggagggacggacagaggaagtgcggagggcggaggggatcgtgaacaaaggggacgctccaccaaaatgtcttaaaagatccctccattgtaagtcatttttaccatttctagagataaaatattttaataaaaaatgaaaaaaaaaaaaaaaaa

SEQ ID NO: 24242 - DNA, 859 bp, Oryza sativa
  Clone ID: PAT_MRT4530_29244C.1
ccatccatgttcctcttcttcctcctccgactccgaccccggccgggaggaacccaagaggagatcggaagaaagagagagagattgaggaggaggaggaggaggagccatggctgcggtggtgcgtggcgtgttgaacggcatccgggagaagggcctctccaacttcctccgccatgcccgcgacgaaggctacttcaaatgccttctggatggaaacctcttgcaaactaaaatccacaatatcggcgccacacttgtaggagtagacaagttcggcaacaaatattatgaaaaactacatgacactcagtatggaaggcacaggtgggtagaatatgcagagaaagggcgctacaatgcatcccaagtgccccctgaatggcatggatggctgcaccacatcaccgacagcactggggacgagctactggagcagaatgctaaagcgtacatcgtggatcacaaggagaacttctccggcgagggtgaggaactgatctaccactccaaggggcatgctctaaacccaggacaaagggactggacgaggtaccagccgtgggaaccaaagaaagaagaggcaacctaattaaggcactgatccagtgtgtcatttgatttggtgtctaaaacaacagtcagccggctcggtgggctgaatctgaataatgttgtcttgaggattgtttacctgagaatggaagaacatgatggagttttaattcccataaaaaaaaaaaaaataaacaaaaaaaaaaaaaaaaacgtccccattgaatggacgagggttgaatgctggtttgctgaaatgaaatattgtcgattgtctggattaaaaaaaaaaaaaaaaaaaaaa

SEQ ID NO: 24243 - DNA, 272 bp, Oryza sativa
  unsure (1)..(272): unsure at all n locations
  Clone ID: PAT_MRT4530_29245C.1
gantacgagtgctgatgctgcagcggcgccggagaggagaagaagaagaagaagatngccggagcatattcgatacgcagctcatcattcgcgagccggtgacggcacgggggccgccagccacccacgaccaccaccgggttccccttctcggtntcgctgagcctngccgcgccgccgatncttcccacgtccacctncacccgatngcngcgcccacaccctcaagcacggcctctcctcgctcctcgccncggacgccaccaccttct

SEQ ID NO: 24244 - DNA, 355 bp, Oryza sativa
  Clone ID: PAT_MRT4530_29246C.1
tccactcgtgcgcaggaacacgtagcagaatgccaacatgacttcagctagaaatagagtcggagcgacagaccaaacaagaggttggatgtatgaataaacgcatggaccacatgcaacaacgtgttaacataatggagcatatgggtatgcctcaaggtgtgcaaaatatacaaacaagttcctattatgcttataattctcgacatgctgggagcccaatgagtacagtgcttgaagagctgcattctaatgagcctacccataggcacttgctggaggagccttatgctgagccctccagtaaggacttggataatatcctaatcggggatgactttaatattccgaaaaa

SEQ ID NO: 24245 - DNA, 264 bp, Oryza sativa
  unsure (1)..(264): unsure at all n locations
  Clone ID: PAT_MRT4530_29247C.1
ccgatcgcaaatactctatntngccgatagcagcagcagcagcaatngccgccctcgncgccgcatccaccgccttcgccgccaagccgcgcctggcncanccgtgcagtncccnaccgcgngtttctccgtgtcgtgctccgcgtcgggcaacaacggcggcgcacgaagatggcnagtcgctggcggcgtcggncaagacgttctccgcggcgctggcttgttacctcggtgctgctctcctcggcggcgacgtcccgcnca

SEQ ID NO: 24246 - DNA, 402 bp, Oryza sativa
  Clone ID: PAT_MRT4530_29248C.1
atggaatcgcggtgctcgtccgcctccggcaacttcagttcatcccatccacgaaaaccaccaccagtagcagcaaaaccaacggcaccaaaacccgagaagaaaaccatcgtcagcatcagcaacagaagcgcacgagggccgcagcacacgggtgcgtcggaggagcgcggggtatcagggagagcctccgaggccgcggccgcgggaggccagcgcgcaacggcgccgcccacggcggcccagcaccggcaatccgcagggttgaccgttgaggcagcatcccacgtccgccgccccgtcggcggcgcaccggacgaggaacgtttgaaatcgcggagagcggggcgcggacggcatggcggcggcggtggcgatgagaagccactaggctacgcgggg

SEQ ID NO: 24247 - DNA, 346 bp, Oryza sativa
  Clone ID: PAT_MRT4530_29249C.1
ctttgcctgttcgtccggtagccgcgccgcctaagatgcctggtgtgctagcgcctaagtgaccccggcggcggaagctcatgcggagaaggaagagcacccacgcccatggacacggctaaaatgccacaacatcctctggaactgtacaggggacgacatgcgcgcgctcttccgtaagcaccactctatcgacgatgtacgagctatccatgtacaagcaaaccagaaacagacgacaggcgtttgcaaccatgggttcagaagaggaggatctaaacacactcaaagaaataaattcaactactctaaacgtttgaacaaaaaaaagagacgggactagacc

SEQ ID NO: 24248 - DNA, 1392 bp, Oryza sativa
  Clone ID: PAT_MRT4530_2924C.1
atggcgtctccgaacagcgaagctctggaacggtacaagaacgccatcacggcggcctcctccgtcgtgggcgctgccatgctgctgcgccggatcgtcgccgacgtcctcccggacacggccctgggcgcgctgctcctcctgccgccaccctcgtcccgccgccactgcgtggtcatcgaggagttcgacggcgccttctacaaccgcgtcttcctcgcggccaaggcgtacgtctccaccctcctcgccgcggcgcccgtgccgctgatgaaggcgagcctgccgcgcggcgccggcgcggagcagatcacgctcgccatgcgccccggcacggcggtcgtggacgtgttcgacggggcggagctgacgtggcgcctgagcagccacggcggcggcggcggcggcaggcggcggggcggggacgacgcgcgggaggtgttcaagctgagcttcgacgggcggcacaaggacatggtgctcggcgcgtacctcccggccgtcatggcccgcgtcgcggccatgtcccaggggcagaggcaggcgaagctgtacagcaacgagtggggcaagtggcggcccgtgaggctccgcaacgcctcgacgttcgcgacgctggccatggacgccgcgctgcgggaggcggtggtggacgacctggacaggttcctgggcaggaaggagtactacgagcggacggggagggcgtggaagagggggtccatattgttgatcgaggatgtcgactgcgccgtcgtcgcggcgccgcggagggaaccgcatggaggtcctgacggaagcaacccgccttccgtgaatcgtaaggtgactttgtctgggctgctcaacatggtggacggcctctggtccagcagcggccacgagcggatcctcatcttcacgacgacgcacgtggaccggctcgaccaggcgctgctccgcccaggccggatggacatgcacgtgcacatgggctacctcggcttcggcgcgttcagggagctcgccgccacctaccacggcgtcgccggcgacgaccacccgctcttcccggagatcgaggcgctgctgcgggaggtggaggtggcgccggccgaggtcgcggagaggctgctgatgaccgacgacgccggcgcagccatcgagatggtcgcgaaacttttgagggacaggaaggccgggaccgaggaggatggcggcgggtacgtcagccagaagcttcacgcgggcacggggcgtaggcacccgcgggcgtctcgtcgaggaggaggaggaggcgccgtggttgcgacgacgacgaggcggggagtgttcggcgatgaaattgggatggagatctcgcacggacagggacggcgtggagtccgcggccgaggacgaggacggcgatag

SEQ ID NO: 24249 - DNA, 645 bp, Oryza sativa
  Clone ID: PAT_MRT4530_29250C.1
gttacagttcatgtctttgtagtttataccagtaacgggaatcagttcatcatatacagattgttcaaataataatcttcccttttacaataataagtttgtcccagttctggggggggaattatgaaaatggcaagccacatacaaatagaacatatgcctgccttcaaactaaacttggccaacaaagaatagccagcacaactgctttgctaaaagagcaataaaccaccaccatggcaaaatgtatcaaactggataagccaagccatggcatggctacttcagggaactgggcatagtaaggccacttggtcagtaaccagtctgaaggtacaacttggacactggaggtacttggcaatcttgtttcaactgatcaactcagggatttaattgagctataatacataatacaatgagatttgagaaagcatcacggatcagctagtttaaagattccaatatcagtaacagtagactgcgtatacaacggaaccacttaacagacacaaaatcaatagcattgtttcttttcagtcgatccaggtttcccaaaaactatataacccagcactccactgctgaacataaccaataaaggcaatttatttgcaaaaggctagcttgggagttgcatcaagg

SEQ ID NO: 24250 - DNA, 495 bp, Oryza sativa
  unsure (1)..(495): unsure at all n locations
  Clone ID: PAT_MRT4530_29251C.1
attcctgcgcccctccaagatcccaagaccaccgccgagctgttcgagctggcggacaaggtggcttggaaggaggcgtgggcctggaactcccccggcaccggtgcggcggctgcggctacccccccactgatgggccctcatgggccccgtgcaagggaaaggccaccggcgataagccaagctccactgctccatccgggtcgacgagagggcaaagcccccgcgaccccagccgatgaccgacgaggggaagcgaagaagaaggcccccaccgatgatggtgataacagcgaggatctggagttccagatacctcagggaaccgtcgccacgctcgacctgnggggagggggggcttgcgctcacacctcccgccgaggcttcaaggccataaggcgagagcttctagccaccgtcccaacccacgaagcggctcggaaggcgcactggtcggaggtgaagctcacctttgaccagagcgaccatttgaca

SEQ ID NO: 24251 - DNA, 261 bp, Oryza sativa
  Clone ID: PAT_MRT4530_29252C.1
atggcggccgagtccgggcggcggcgactggcgcggcgggccatgcggagagctggcaggcggcggcggatgggagggcagctggagccggcgggccgcgtggatgggagggcgacggcgtggccgcgctggcgggcgggcggcggcgtcgtggtcacgctggcgagcggcaggctgcagcgtggccgcactggcgggcggatgggagggcggctggagccggcggcaactcgattttgttttttttttaagaatttgtga

SEQ ID NO: 24252 - DNA, 369 bp, Oryza sativa
  Clone ID: PAT_MRT4530_29253C.1
ctagctaccgcaatccccaagtgcgcgtcgcccgggaacacgatataccgctaacgtcgccacactttggccactggagcactggcgccccacctccctccttcctctctcaacgtcggaccgttggttgtaaagcccggcataaaccaaacccaaggtcgaagtgctgctcctggcaccccacgccttgatgcgtacatcggtcggagcttcactatcccctcgacctcctattcttctagctgatatgctgtctatcgacattgtgatcctagccgctccgccgccactcacggttgtcggagagctaaacacagccttagggcattaaagtcggaggatgagtccgacgacgctgacatgagctag

SEQ ID NO: 24253 - DNA, 543 bp, Oryza sativa
  Clone ID: PAT_MRT4530_29254C.1
gctaaattaaccctcctaagggaatagcttgcggccgctctgtttttatgttttccctactatttatttttggaattcttggttctttatggcctttatttccttttttgagtgcgaattaaaatttttttgaagaaaaaaaacccccctgtgtgaaattgcaatccttttagggttccccacggcactccaggcacccaaactttggagggaccattctggggagcctccggagggagcccactccttttttgggcgttgcgctaactgcccgctcccccctctggaaacctggggcccaaactgcatttttcattgggggaaaacaaagagaaaggctgtttgcgtatagaacgctctggctctccctaaatgggggagtcccttagctcggtcgatccattgtggggggcggaatgggctcactcaaacgctgtcccccggaaaaagggggacccaggggataacccatgacccaggggggagaaaaacgccaaaaaaggtcattaaccgaatggaggccccgaaaaaagcgcctgtccg

SEQ ID NO: 24254 - DNA, 311 bp, Oryza sativa
  unsure (1)..(311): unsure at all n locations
  Clone ID: PAT_MRT4530_29255C.1
cccctttgggctgcaggatgcggttgagttcatgtccnnttcagcgcangaancngtcangaaggtcgcccncatcagganacancgnnaagtccngnntcnncagnnccttctaacccaacgtccacaacatcgtcgacaccccaatcgagggaggtcacccagggtccggatccngtncggngaactccacttcggnccgaaacggctactccttcnccggcttaccctccttgggaaaatgatcagttaagacagaagatgaattagcctccctcgcgtcatgaatctggatgttgagcaaccgggtt

SEQ ID NO: 24255 - DNA, 1409 bp, Oryza sativa
  Clone ID: PAT_MRT4530_29256C.1
ctgcaggaattcggcacgaggctagggttccgccgactcgcgagtggcgggagggccggtcgtccgtcagcactgcatcctccctctctttcgctagccgccatcgctctcttccactggtaaccacacttgattttgacatgatcaagtttttatatgaaaccgatacactctgcacttgctcttttggtaaagatcatactactattaagtgttgatgctcttggaacctgatctctgcaactcagatcctgtactatttcaaaggttttcattttgcaagtcatagcagaggttgactccacattactcccaaatggatcaaggggtggataagaatgttattgataattcgctagtttcaaactgtgacttccctgttgtaaaaaagttggacaagtgtgtaaatgaagaagcttctgtgcaatctccctttgaaaataaggacacaagatcccttggcatggtatgtgatcatgaaaataacaagagtggtgttgctgaggtgattacaccaccagagaatgaagcgattgaatcatatatctcaaaaagtgttgcagatgaagatccttcatatggatgtcagacaccgcgcgaaagcatctttgatccttttgctccaggaccagaggagttagcttgtgcaccaaagaagaaggtgaccaaggcaccagaacttccttcgcgaaggcagctaagttttgattcaggtgattaccctgttaaaaggttaagttttgaattcgatgatgctgaggaggaggatcagtttctcgaacggatctgcatgatgtttattgatctgattatctcaaatcaagcactagagacgactggaaaggatctgataggttctaattcacctagaagctgtgagaccccttcttcagagcctctacttacaggcattgcagacacctgcccagatgcgccactgaggcgacctcttaaagcggtacagctcagcccaagcatttgtcgaaagctcgactttgattcagtcagtccaaggtgtttattcgttaaagagaataagtgatatcttgacacccttttgatctgcccaggaacagcattttggggcagtttttggctaccaatttcagttgccctgtgccaatatggtaactttgctaactgaaacatgtaggtagtgatgctaaaggagtaggaggcagtttaataagttatacatgtaagctttaatcagtcttccttttgggtgggttagtcatatacaattaggagttgtggtctgtgaccacgtaccttttgtaagtcttaaaatggatagctgtgtctggttgaactagtgagtctgttgcaggttcatgatgtggatcgtctgaatgctgctcaatagtagttcatttttctttcacaaaaaaaaaaaaaaaaaaaaaaaa

SEQ ID NO: 24256 - DNA, 3078 bp, Oryza sativa
  Clone ID: PAT_MRT4530_29257C.1
atgaatttagatcacaactcaacagacccaaagatcacgggctgtctggtccggttccatagcgacatcaagaatcgcgttggaaacagaaccgaaaagccaaccccggacacagcaatcagcttgttcccaagccggatcttcagggcgagcaggagcagtaccatcaatatgagcgaggagtccggacttgccgcacatggaagtgaagaaggatttccatctgttgaaattaggatgcttaagctcgagggtaatcgggatgtgtgtcttgacattgacagtggcataagggttgatgacgatggcgccggcagaatctccagtggtgccggcggaggagccggacgtcgaggacgacatggtcgcggaagcagtggtggaagcggtagacatggcgcagaggaggaagcagcgcggctagggcgcggctggggcgtggcgcgagcgagggtgcggctgggtcgcggcgcgaagtggggcagggcgcgacgcggcgtggggcagagcgcgcgacgcggaaggcgcggcgagcagggcgcggcgcgggagcggcagaaacgcgtcggttccatctacctgtattccactggaagcatacaagttttaaatgttactgatccaaacatggtgaaggagctagccaactgcaaatctttggatcttggaaaaccttgctacttgcaaaaagagcgtggagctcttcttggtatgggaattctgacatcaaatggtgatctatgggtacaccagagaaaagtgattgcacctgaactattcatggaaagggttaagggaatggtgaatttgatgatggaggctgcaatgtcaatgttgaactcatggaaaaatgaagttgaggacagaggaggcagtgcagagattgtggttgatgagttcttgagaaccttttcagctgatgtcatatcaagggcttgttttggaagcagctttagtgaaggcaaggagattttcataaaaatacgacaacttcagaaagcaatggcaaaacaaagtatgctcattggtgttcctggaagtaggtatttaccaacaaggagcaatagagggatctggaatctggatagtagcatccgtaccctcattttaaacatatcaaagaaatatgaacatgattcatcgacctcagtaaacaaggatctcctgcactccattattcaaggttctaaggatggtccctttgcttcatgcacgcccgaggatttcatcgtcgacaactgcaaaaacatctacttcgcagggcatgagacaacttcgaccacggctgcttggtgtttgatgcttctagcttcacaccatgaatggcagtcccgtgcccgggtggaatcccttgacatttgtcaagggagaccactagattttgacattctacggaagttgaaaaagctgacaatggtgatccaggagacactccgattgtacccaccagcctccttcgtcgcccgggaagctctgaatgacatgaaacttggcggcatcgacataccgaaaggaactaacatctggatcccgatcgcgatggctcaccgggatccttcagtatggggtcctagtgccgacaaattcgatccggacaggttcgccaacggcatagcaggggcctgcaaaccccctcatatgtacatgcccttcggcgttggggtccggacatgtgccggccagaatctagccatggttgagctcaaggttgttctgtcactcctgctgtccaagtttgaattcaagctttctccaaactatgtgcattgccctgcgttcagactgaccatcgagcctgggaaagattatgtaattattgaaaaggagattcccttcttccccgtgtacgtccggatcgcgaagagtccgcaatgttcccacggcaagcgcaatatgtccgctactgcttccaatccattcgtggccggctcaaatgcttccaattcgttcgtggccagcttaaaaccttcagagttcgaggaaaacaaacatgtccacatggttgccaatccaaaaccttcaaaattggaggaacatgaccaaaaatcggcaacaagaatagatgaagctgcaaacgctatccagttatatgagcttttcaccatagtagaagacgagaacttcataataaaataccaaaaattcgaacaactcaataacacacaagaaaagataaatgacagaacaaacgtgcgccaacaaggaacacgcatccggtttgctccccttctcaatctcatctattcggttgaactggaagatccatccgggcttggattggattggattgatttcttcttttgttggttttcattttgcaagttacaggagaggttgagtccacattactcccaaatagatcaaggggtggataagaatgttactgataattcgctagtttcaaactgtgatttccctgttgtaaaaaagttggaaaagtgtgtggatgaagaagtttctgtgcaatctccctttgaaaataaggacacaagatcccttggcatggtatatgatcatgaaaataacaagagtggtgttgctgaggtgattagaccagacaaggaagcaattgaatcatctagctcaatgaatgttgcagatgaagatcctttgtatggctgtcagacaccgcgtgaaagcatctttgatccttttgctccgggaccagaggagttagcttgtgcaccaaagaagaatatgatcaaggcaccagaacttcctccacgaaggcagctaagttttgattcaggtgattaccctattaaaaggttaagttttgaattcgatgatgctgaggaggatgatcagtttcttgaacggatctgcaagatgtttattgatctgattgtctcaaatcaagcactagagacgattggaaaggatctgataggttctaattcacctggaagctgtgagaccccttcttcagagcctctacttacaggcattgcagacacctgcccagatgcaccactgaggcgacctcttaaagcagtacagctcagcccaagcatttgtcgaaagctcgactttgattcagtcagtccaaggtgtttattcgttaaagagaataagtga

SEQ ID NO: 24257 - DNA, 1723 bp, Oryza sativa
  Clone ID: PAT_MRT4530_29258C.1
atggagacattcctgccagcgatcttgagcgacctcctcggcaggtccatctcttacctggtgcagcgataccggcagcagagcacggtgcaggacgacctcgagaagctgcgcctcgcgctggtcagggtgcacgtcaccgtcgaggaggccgaggcgcggcacatcaccaacaaggccatgctccggcagctcgacgtgctcagggaggccatgtacagcggctaccacatgctcgacgccctcacgtaccgagcccacgcggacggggcgtcgttctcgttcgcgccgtccaggctcaacgccgccaagcgcctccgcctcctcgccgccgacgagggcgccgcggagctgcgccgcacggtcgacagcctcgggcggacgatcgccgacatgagggagttcgtcgtcttcctcaagggctaccctcgcatcagtactcagccttacagcatgcacctgctcctcgacaagctgatgttcggccggcagaaggaggtggagcaggtcgttggattcctgctgcagccggacgtctgcggcgctggcgccggcgccggcgccggcgtgctgcacatagttggcgtcgcgagggtcgggaagagcaccctcgtcgaacacgtctgccacgacgagagggtccgcggccgattctcctccatcgtgtgcttgagccgagaagaccttgaggacatgggagaccatcgtgctctgaccgtcaagcacggcagccatgcctcccacgggagctcgctcgtcgtcgtcgacctagccgaggacgaggagcccgtgggcgacggggcatggaggcggctgcggtcgtcggcgatgtgcagggcgcgggggagcaggatcatcgtgacgagcaggtcgccggagacggtccgtggcatcccggcggcgcgcgccatcgagctcaagttcctccgcgacgacgtctactggtacttcttcaaggtgctcgcgttcggcagcgcgaacccggacgaccacccgaggctggcgtccatcgccatggacatctccgcggagcagaagggcggcttcataggcgccaccatcgccagcagcctgatgagggccaacccggacgcgcactactggaccctcatcctcaagaacatgagggagtacacgcggaagcaccgcgccatgttcggcaagcacccgcacgacctgctgcggaacaaccacccggtgtacctgtggaggctggccgagagctccaagatcttcctgtgccacggcttctacaccgcgtgccccgccaagcaggagatccccagggtgacgttccaggaggtgctgtccggtagggtgacgccccgcgggaggttcgaggtcctggcgtggacgtcgcagatacccccttgccggagctacctgatgagctgctcgctggacacgccgcctggtccgcaccgtgtccttgataggaagaagcgtcttaggcagctggttacatgaaatgaagctgatcatctcgtttcatcttgtcatggtgtatgtagatccgatcctctgcagcggctgtgcgcgaaattgtacattgcattaagttgtggtcccacgtaatgtgtagttgaatcaaactcctccgccttccaatgcaacctgtggattgaaactgtggcgccaacaacgaagttgcgccaaatagcatcctgccatgcttatgaccgttaaaaaaaaaaaaaaaaaactcgagactagttctctctcc

SEQ ID NO: 24258 - DNA, 251 bp, Oryza sativa
  Clone ID: PAT_MRT4530_29259C.1
gttctccccacacacacaaaccaaccgacgcacgagagatttgtaccgaagcactgcagcggcgacccaatggagacccgactctgaccacctgctcaagcgcgtgccacgttccctcgcccgccctcccgtcccggccaagttcgacttcgcaccgcgctgacgcgctcgtgaccccgccctttagagatccagctacgtacgcgtcatgcgacgtcatagctcttctataggtactattatcctgccta

SEQ ID NO: 24259 - DNA, 594 bp, Oryza sativa
  Clone ID: PAT_MRT4530_2925C.1
agaggaaccatggaagacacccatgactattgtcacgcccagaaattcccgaatagaattccaagcagaatgtgcattagaatccccgtccaggaccagccggggtacacaaacgacaatgttgacattcagatccacgtcggaaagaggccgtgacaggacaattcgcataaccccctctaaccaagcacaccacacctcaggtttcacccccactcctcgcaaggcagcgggcagtcccctctcgtgcctaggtgaatccggaagccgcataggccgtcgcagggcccatccaaactccatcacgcccacccttgcctggatgcgtcagctagaggaaagctacactacaagcccagccgttgcccacgctggcttgtggtatgtacgataagttcttccagggcatcccgcgaaccggtccttaattgccatgggtgcgactagcaaaaccatacacctacagcccaccattcagtcgcattttagttggataattacgaccatgaagcatggccagatgtctcgagcacgcagctcattctgatactaaaaaggtctaatactgtaattatcgcatcaactgagctagtg

SEQ ID NO: 24260 - DNA, 428 bp, Oryza sativa
  Clone ID: PAT_MRT4530_29260C.1
ttcttttttttttaagaattgcttataacccccttcatccacgctccaaacaatgtcgacgagtcctcctttggacgacccaacacaatcctactcctttggcacaaggatgtcgaacccactcaacgtccactccgcctccgcatggttgctgagggggatctccgttcccacgtccagcgacgaccacctcctcttcgccggtggcgtgcccggatcctggtagaagtagagcgcctgtgacatggcgccgacgtcgagctcccacgccctggggtcaccgatccagccctggcctttcgccgggggggacccaaactcgccccacaccgggtgcgggacgagctgcatgaacttctgcggctgcgggttgctggaaggggcgcacgggggggggggctggttggcggcgccccccttcccggggg

SEQ ID NO: 24261 - DNA, 498 bp, Oryza sativa
  Clone ID: PAT_MRT4530_29261C.1
atggggaggtccggcggcggcggcggcgacgcaggagaagggcaaggcgtttgcggccggagcgctggggggaggggctccgtgcacggggcgctgcccgtcccgagaagctgctcctcgtcttgggccgcggcgtcggcgcggacccccccgcgggggcttggggaggagttcggggccgcggcgctgcccgtctccgacgagctggagctcgcgcgggcgcggtgctgggagctgcacgaccgcgtcgtggcgtccccttccctgccatggcagcccgcgcgctgcgcacccgcgcgagctccagttcgtcggagatgggtggtgccaaggcaccgaactcctccacgagccccgcgcggggtccgcgccgacgccacgggcgaagacgaggagcagcagcttctcagggcgggcggcgccccgtggagcccctcccccagcgctcccgcatcatcgccgctgccgccaccgccggacctccccatggccccgtaa

SEQ ID NO: 24262 - DNA, 789 bp, Oryza sativa
  Clone ID: PAT_MRT4530_29262C.1
atggatggggagtttcacggtccgaggagaatcggcgggggcgtggggcgaaggggcaaagttctagggttcgccgtgtgcgagggggagagaggattccgaccaggaggcgtcatgcgcgaaaacacgattcccgcctctaccggccacgtccgagctccccttcccctatttaagctccaccgccaccccctctccccctctctctttttccccatctggccgagctctcccgtgccctctaacgccctagcgccgcgccgccgctatccgccgtcgccgccgccgccgctccggtcgccactagccgccgtgccaagctgcgccgtcgacaccgtcgcgttcgccgttgtgcaggccgtcccgtccaccccttgcccgccgaaatccgccgtcggaattcactccgcgccgtgcgccggtgattccggagatcgtcccgccgtcgccgctgccctccgttgctcgccgtcgtcggtcgccgtcggcttcgtccgtgccgtcgaggatgcttgtggagtggtgttcccgctgcagtccaagtcatggcttagctctagcgtgacagatgagaacgacgagaggaactcaccggtgggcgacacgacgacgaacgacgatgggagacggccggcgacgagcttccaaaggcggcggtctcggcttgatggcgtcggcggtgcttcggtgggctttgtcagcaatggaggggtggacgaggtcctcctcgcgaacccgatggtagcgacggcgaccggcggcgaccaccacggcgatggcgcgaggtag

SEQ ID NO: 24263 - DNA, 618 bp, Oryza sativa
  Clone ID: PAT_MRT4530_29263C.1
atggcgaggccgcgggccgggcgggcgacggggcgcaccgcaccggagcgtgcgatgtgtgacgagactggcaggggtgggagggcgcagcggagcatcacggcgaagtcggcgagcgagcggaacaagcacgtggccacttgcgggaaccctgtcccctacccccctcgccagaatccggatctactgtgcccgttcgctctccattgcccacagctcgccaccatcagcgtcttcttcgtcgaggtcagcggcggcgacacggtgttgggtcatggcgagctacggcgacgacggcgtggagctcaccgagctgacgctggggcctcccggagccagcgctcgcagggccaggcgcggcaggaagaacggccatccgccgccgtcgtcctcgatgcagcgtacttcgtgaaggtgagcatggacgggacgccgtacctgaggaaggtggacgtcgcggcgtacggcgactacctcgagctcgtcgaggcgctcaacgacatgttctactgctccaccattggactgatggacgggtacggcgagtgggagcacgccgtcgtgtacgaggacggcgacggcgactggatgctcgtcggcgacgtgccctgggagtaa

SEQ ID NO: 24264 - DNA, 342 bp, Oryza sativa
  Clone ID: PAT_MRT4530_29264C.1
atgaagaagaagccgacggcggcggcggcggcggcggcgttgatcctgatattgtgcgcggtgatgcaggcgcaggtggaggcgaggtcgatgaagcgggcgcctcctcctccggcagcgcacagggccgtcaacgaggacggcaccctgcctccagctgcctcaccgtctcctcctccgccgctggcagcggcagacgcgccgccggccgggagcagaagaaccaacccagatgccaaaatgagaggggatcttgttcattcgccacggctagctctctgtcatcaactgtttgactgctgctgcttaattatcagcgagtctgcagctaatcaagttgtc

SEQ ID NO: 24265 - DNA, 285 bp, Oryza sativa
  unsure (1)..(285): unsure at all n locations
  Clone ID: PAT_MRT4530_29265C.1
gtgttttttttttttttttcttggtgctgtgtgcttgcgtatatatctggtgtggattcttaatgtccgtgggcataagcttgtggtttgtcaatggggtttgatgtggttctgctgtgtgttttatttnagttccgaattgaagtaggtgtgctggatgtggggtgtgggttgtgatctggttgaagggctttggtgtgacatttttgttttggttggttgcctccatggttgtgtctttcttgttgttggcattggcctccattgtgtggtgctcgatctggt

SEQ ID NO: 24266 - DNA, 919 bp, Oryza sativa
  unsure (1)..(919): unsure at all n locations
  Clone ID: PAT_MRT4530_29266C.1
atggaggtggaggcgttcccgatacggttcacgaggggaatacggtcgcactgggggaggcgcaagtaccagcggctggaggcggcgaacggcggcgggaagacgagggcgacgcagcagctgggcggcgcgcgccgcggcggtgcggggtgggggctgcggctgcggcggctgctccgcgtccgcgtgcgcgtggcgagggcgtggctgtcgtccccggcgcggctgctggcgcggatccgcgacgcgtacgtgggcggcatgctcgccgtgtcgaggaaggcgtcgggcatgtcgctgccgaacgcgcccgaggggctgtggcccaggcgcgtgccgcgccggaagcagctcccggcggcgcggccaggccagctcaccgacttcgagcagaggctcgtcgtcgagatatacaagtccatcgtcgcctccaaggagctcaccaccatgctccaccactccaccgcgcacctgccgcagcagcacaacacggcggcgccggcgtccagtggccagctgctagtcaattagcgtgctgtctgtatccaccatcgacatggaaactgaaccgcgagagctcctgcaagttcgtttgctcgatcgctgctcatgttgatgattattactactgctgtttcttccttgtaatttgtaagaagtattagttaggacaagatgatgatgtacacttcaatttctacctggtacggatagtaactagaataagaaggtggtgtgactgtgcatagtatactagatgatggtgttgttcttagatgtgaagaggtttttatttgtattggaatttgaaaggagtaaaaatgaactgntgtagtccttatttttgacctatttagatggtgatggatttacaataaatgatgatgttgaagtaacattgttgtgtgttggctgtatt

SEQ ID NO: 24267 - DNA, 219 bp, Oryza sativa
  Clone ID: PAT_MRT4530_29267C.1
atgcactacgagaacggcggatggttcgatgacggggagtgcaccgcgacgcggccggtcaacaagagcgagaacagggcggcgtcggagatggcggcgacggaggcggagttctaccgagcgcaagccgaggagttcccgggggcggtggccccctcgtccctcaccgccgcagcctccgcgtcccgcagcgccgcccaccgtcgttcacaggggtaa

SEQ ID NO: 24268 - DNA, 420 bp, Oryza sativa
  Clone ID: PAT_MRT4530_29268C.1
gacttgcatcaagacaaacatggacatggtctgtggtgagatcaccaccaagggtaacgttgactatgagaagattgccagggagacatgccgtgacattggctatgtgacagatgatgacggtattgatgctgaccactgaaaggtgcttgtgaacatggatcagcagagctgtgacattgcacatggtgtgcacggacacttgaccaagatggctgaggagattggggctggagaccagcgacagatgtttggatatgcacatgatgagactcatgagttgatgaccctcagcgcatgtcttgctaccatagctggagctggtcttactgtaggttcgcaagaatgggacctgtgcgtggctgatgcctgacgggaagacccaagagactgttgagtacctgactgagagcggtgtca

SEQ ID NO: 24269 - DNA, 417 bp, Oryza sativa
  Clone ID: PAT_MRT4530_29269C.1
tttgttgtttttttttttttttttttttttttttttttttttttttttttttttttttttttttttaaaaaagggaggggggatgcactggaccggcaaaaaccgagcaaggggccccagttctaacttggaagcaaaaaaaagggcaaggtcatttggggcccatgaccaacaaattaaatctgcccttttcctactggaaagacaccaaacgttccagggggcttccgtttcgattagaaggttaaaacccttgacaccatgggtacgggtagccggcccaaagcaggcatgcccacccccaaccctggtaccacggttctcttttgggggggaaatgaaccggaggaggcccccgggggcccccccttgcccctgaagaaacccacgttgacgaacctggcggcccccccccgg

SEQ ID NO: 24270 - DNA, 1745 bp, Oryza sativa
  Clone ID: PAT_MRT4530_2926C.1
atggcgtctccgaacagcgaagctctggaacggtacaagaacgccatcacggcggcctcctccgtcgtgggcgctgccatgctgctgcgccggatcgtcgccgacgtcctcccggacacggccctgggcgcgctgctcctcctgccgccaccctcgtcccgccgccactgcgtggtcatcgaggagttcgacggcgccttctacaaccgcgtcttcctcgcggccaaggcgtacgtctccaccctcctcgccgcggcgcccgtgccgctgatgaaggcgagcctgccgcgcggcgccggcgcggagcagatcacgctcgccatgcgccccggcacggcggtcgtggacgtgttcgacggggcggagctgacgtggcgcctgagcagccacggcggcggcggcggcggcaggcggcggggcggggacgacgcgcgggaggtgttcaagctgagcttcgacgggcggcacaaggacatggtgctcggcgcgtacctcccggccgtcatggcccgcgtcgcggccatgtcccaggggcagaggcaggcgaagctgtacagcaacgagtggggcaagtggcggcccgtgaggctccgcaacgcctcgacgttcgcgacgctggccatggacgccgcgctgcgggaggcggtggtggacgacctggacaggttcctgggcaggaaggagtactacgagcggacggggagggcgtggaagagggggtacctcatccacggcccccccggcaccggcaagtccagcctggtcgccgcgatctccaaccacctccgcttcgacgtctacgacctcgagctcggcggcgtccgctccaacaccgagctgcggaagctgctgatccggatgaagaacaggtccatattgttgatcgaggatgtcgactgcgccgtcgtcgcggcgccgcggagggaaccgcatggaggtcctgacggaagcaacccgccttccgtgaatcgtaaggtgactttgtctgggctgctcaacatggtggacggcctctggtccagcagcggccacgagcggatcctcatcttcacgacgacgcacgtggaccggctcgaccaggcgctgctccgcccaggccggatggacatgcacgtgcacatgggctacctcggcttcggcgcgttcagggagctcgccgccacctaccacggcgtcgccggcgacgaccacccgctcttcccggagatcgaggcgctgctgcgggaggtggaggtggcgccggccgaggtcgcggagaggctgctgatgaccgacgacgccggcgcagccatcgagatggtcgcgaaacttttgagggacaggaaggccgggaccgaggaggatggcggcgggtacgtcagccagaagcttcacgcgggcacggggcgtaggcacccgcgggcgtctcgtcgaggaggaggaggaggcgccgtggttgcgacgacgacgaggcggggagtgttcggcgatgaaattgggatggagatctcgcacggacagggacggcgtggagtccgcggccgaggacgaggacggcgataggggaattccggcaactcgcgaaacggtgatggtaaactagtggcaactggcaaaaaagcagagagtttattacgtgcacggacactttctgtaatttttgctttgccttcctactctactcgtgagagagctatagcacttacattgagttttttcaagacaacgttttgaatccaccatgtccaatttgaaattatttatgt

SEQ ID NO: 24271 - DNA, 233 bp, Oryza sativa
  unsure (1)..(233): unsure at all n locations
  Clone ID: PAT_MRT4530_29270C.1
ggcacgagctatcatgtccctgcgactgcttctcgccttccatctcctatcctgctactgcctactccacgccgccgatcatacntcgtcccgtcgactcatacacctccttgtcgtctccgacgacgaccgcacgttcgttgtcatactccctggcctcgatgccgcgctccctttcccgattagaaaccaggtccgataacctgttgacgagtgtgatcggatggtgaaga

SEQ ID NO: 24272 - DNA, 119 bp, Oryza sativa
  Clone ID: PAT_MRT4530_29271C.1
gaccgtcccagggaatcgagctgagcggctgttcacaatcccaatatctagggtccccaaacaccatcgtgcacgggaggcccaagacccaagtagttaggtcgatcaagcgcttctag

SEQ ID NO: 24273 - DNA, 1065 bp, Oryza sativa
  Clone ID: PAT_MRT4530_29272C.1
atgacgaccgcgcggcaatggtggcggcgggcggcggcggcggcgaaggacaggaggagcctgtacctgacgcgcgtggcggcgctgcggccggcctccccggcggcggcggcggcgctgaggaacgcggagctggaggcggtggtgatccgggcgacgagccacgacgagcggtcggtggactacaggagcgcggcgcgggtgttcgcgctggcgcgcgcgtcgcccgcggtgctgcagccgctcatgtgggcgctcgcgcggcgggcggggcggacgcggtgctgggcggtggcgctcaaggcgctcatgctcgcgcacggcctgctgctgcggtccgacctcgccccgcgcgcggcgcgcctcggccgcgtccccttcgacctcgccgacttccgcgaccgctcgtcgtcgccgaccaagacgtcgggcttctccgccttcgtgcgcgcctacttccacttcctggacacccgctccctcttcgccgcccaggacatggacaacaacgacgacgacgacgccgacgacgaggacgcgcgcctcgacggcgtgtcgaggctgcagcacctgctcgacctgctcatgcaaatccggccatacggggacggcatggagcagggcctcatcctggaggcgatggactgcgtcgtcatcgagatcttcgaggggatgcgtgtgctgcggaaggcctcggagcagagcgcgcagctcacgtcgtacttcgagctttgccggagcctcggcgtgctcaacgccgccgagttcccggcggtggagcgcgtccccgacgacgacatcagggacctcgagaagctcatcatgagccacgtggtcgaggaccgcgggaaggagaaggtgagcgaggagaaggcgttggtcgccgtggaggacaccggcgtggcgtcgaggacggtggtgacgagagagtgggtggtgttcgacgacgacgacgaagacgacggcgtcgccggcgcgaggcaagggcattttggtcactacgtgaacccgttccttggcgcgccgtgggaagctgtgacggggagcgggaacttgctagtttag

SEQ ID NO: 24274 - DNA, 359 bp, Oryza sativa
  Clone ID: PAT_MRT4530_29273C.1
atcgtctgcttattggactaattaacgccacttcaacacctcaagtgctcaattagtttacataaaatgcttccatatcatacatgatactagtacatccaatgagagcatagctggtttgttaatccttaagatttttttttctcagatgtaaccccaagtgattttttttaagatgtattttgttttgtacaaccttccgtttcacaatgtaaaattttttttagcattgtttacattcataaagatataaatgattctaaatatttatatgtgtttagattcattaacatctatatgaatgtgaacaatgctagaaagtcttatattgtgaaacggaggaagtaccattttgtact

SEQ ID NO: 24275 - DNA, 311 bp, Oryza sativa
  Clone ID: PAT_MRT4530_29274C.1
ggatggaatatgctgacattaaagctcaaatgagcctaagtacggaagcgagagctacaaataggagagcgaatggagcagcaggatcactactacactgcagtgctacagctaatgagcgcgagactcgtgaaacaagactagaaaagtactgagaggatcattttttctacagaatcgcggatatgaccctggtgttctgcagaattcttcatataccacaggcataggattcaccaactctctctcttagctagcaggctctccgaattcctttaacttccagtgctacgtggactcagcccaccacg

SEQ ID NO: 24276 - DNA, 417 bp, Oryza sativa
  Clone ID: PAT_MRT4530_29275C.1
ttttggttttttttttacatgagatagtcaagtattctcagcgaacaactgtaaattaaacaaactatgtaatcaaatgaatattgtaacaaattacaacagggagttttggtggtggtggggaggagcaatgcaaaagaatcgtcgttcaaaaatcaatttcatgtgagaaatgtgtcatcctatattatacagatgagaagcgacttcagctattgccacttcatggcaaagcgggcagggatgcagcagcagcagcagcagcagcttcagtaactgacgcttgtatgcttgttggagatgtaacggcaacggctgatctcctccttttgcatccccagcatatccggtgtattttccgtttgcttctcaagttaaatggtacctttatacagttggtccaaggtaacaaatgtg

SEQ ID NO: 24277 - DNA, 125 bp, Oryza sativa
  Clone ID: PAT_MRT4530_29276C.1
acgtcgagcggccgcatattatatacgttgtcagaaacctttacaccgcctccatgcaggtgcatatgcagcgaaggtttgaagacactgctcatgaagatggtcgttgcacgacgagcaccacg

SEQ ID NO: 24278 - DNA, 3030 bp, Oryza sativa
  Clone ID: PAT_MRT4530_29277C.1
gtccgatctctggctgctgaatcctttcgagcataccaaaatggtccacttgagcctaccttttatcgggaagcatctactgcattttcagtaaatgaactggagggtttttcaatcccatcaagatatggccgtatgttggattggtttgctgttgaccttgaaggagaacactctgcaatggatggacgcatacttgaggagcatactgaatatgttgtttacgccattcacaggatccttgatcaatacaaagaatctcatttagcacgatcaaagggtcgtgctcaatcctctgacaacttgccatccagtaatgattgcctgtccaggtaccctcccattgctctgcagccatctctgggtcagttttttttgcatgtcaatgaagaatggagaaatggatacaagacagggttatcacgcaccagcagtgcaaaactctcaaatgttgttgttgtctctgtagctggaggcatccatgattatcaggtatggtcgttccttaaaggccaattgaacctcaagtttccattcattcttattcaggttaggtcaaagttagctttgctggatggaattgtaccttctactcatggttttatggttgcacacacacttcttagtatggtagatcctttgaatggacagccatttttgagttcacaaaaaagactttttgtatttgcaaaaatgctccaaagtgcagttccgcagtctttgagttgggtggctcctgtttcaggtgttaagcctccaaatctgattgcaagtggtaacaaggaagctagtgacttgcagcaaaaggattcactttcttgccctccatctcttcaatggacaagtgatggccttgaaaaggacctgcatattcagttaaattcagttactgttttagcaatggatggcaagagaagatggttagatattaaaaaactgggatcaaatggcaaagggcactttgtttttgtaagtaatctttctccatgttctggggtgaggattcatttgtggccagaaaaggatcattcatctgaacaaaatggagtacctgccagcaaaaagatagtggaagttacatcaaagatggtccaaatacctgcaggacctgcaccaaaacaggttgaacctgggagtcaaaccgagcaaccacctcctactgcatttcttctgcttagtccagaagaaatgagtggtttccgcttcatgactatctcagtggcacctcgaccgacaatttcaggtagaccacctccagcggcatctatggcagtaggacagttctttaatccagaggaagggacgagtgcactttctgctgcccgaattattggctccagctatattcctgaagaaatatttttgaaggaggaccacccactggctttaaacttgtcgttttctgtgagccgtcgtcttctaccagttatattatctttgagaactgctggatgtggagtaaaagctactggcgaccaattggaagctgagaaaaataaactttgtaaactgcggtgcttcccacctgttgctttggcttgggaccctgtatcaggtctgcacattattccaaatatttactctgagactctagtggttgattcttcacctgccctttgggattcacatcaagggactgaaagatctactgtgcttgtcctggctgatccacattgctcatatgaagtgagtcttcgtgtttcacttagtgctgcagcaagcagattctttttgctgtactcatcacagattcttggtttcatgattgctgtaatgtttttcggcctgatgcggcaatcatcagcatgggaacatgattcttctgtgccgtctgttttgtcagctatagagtctaatctgaggctgcctagagcattcatgttcctttgcttcataccagttcttctttttcttgcctttcttgttttcaccagagagcaaaatcctccacttggaaccttcctgctagttaccatgatgtgctacatagttgctaatggcttcacaattttattgatactaagttcaaaattgattctttatgtcgctgctattcttcatgtcttcatcaagaggcgctggcaatcatgggaggatggtactcaatcaatgattgttcgccacttcctcactctctcattaccatttcagtcgctaaagataattaaaaacaatccaagtataattgtagcatttgctacaataccacttgtctgcttagttcatccagcaattggtcttggtgtattacttctctcacatgccttccatgcacactccaccctttgcagtttcttagcagcttcatttcgcagtatcactcagaaaaaggatttgtataaatccatgggtgataatattattctgcccgaaaataaacaagatggcctcgagcaacttctgccgatggatgatagcccaacatctgttaaaagttttactgactgccaattggaagtatttgactgtcggcatgggatcatgatcttgcaccttcttgccactctaatgtttgcaccttctcttgttgcttggctacagagaatcggaatgggtcaaaattttccatggtttgtggattcagtactttgtgttggcactattctgcatggacttttcggatcaccaccaaatgtgagctgtatatctttcaagctacctggaaggagagggcgagatgttggactaagctttctctaccttgtagctggatattattcatttgttagctcaatggctctggctccttatagggcgctctatgcattggcaatcatcggtttcatctgctttgcttccagaattattgaaacaagaagtacgcgccaccgcgcccaccgccgccagggacgggccggctgcagcactgccgctggggacggaccggaggcggggacagtgatggtctgcacaggggaggaggaagcagcggaggaggtgacggcaaagtcagagacggtgccgttgcatgaggcgaaggaggggagctgcacggccatcatggcgatggctggcgcctgcggccggtag

SEQ ID NO: 24279 - DNA, 978 bp, Oryza sativa
  Clone ID: PAT_MRT4530_29278C.1
atgggaggatggtactcaatcaatgattgttcgccacttcctcactctctcattaccatttcagtcgctaaagactatgctgatgtgcccttggaaaagattgtgcagataattaaaaacaatccaagtataattgtagcatttgctacaataccacttgtctgcttagttcatccagcaattggtcttggtgtattacttctctcacatgccttccatgcacactccaccctttgcagtttcttagcagcttcatttcgcagtatcactcagaaaaaggatttgtataaatccatgggtgataatattattctgcccgaaaataaacaagatggcctcgagcaacttctgccgatggatgatagcccaacatctgttaaaagttttactgactgccaattggaagtatttgactgtcggcatgggatcatgatcttgcaccttcttgccactctaatgtttgcaccttctcttgttgcttggctacagagaatcggaatgggtcaaaattttccatggtttgtggattcagtactttgtgttggcactattctgcatggacttttcggatcaccaccaaatgtgagctgtatatctttcaagctacctggaaggagagggcgagatgttggactaagctttctctaccttgtagctggatattattcatttgttagctcaatggctctggctccttatagggcgctctatgcattggcaatcatcggtttcatctgctttgcttccagaattattgaaacaagaagtacgcgccaccgcgcccaccgccgccagggacgggccggctgcagcactgccgctggggacggaccggaggcggggacagtgatggtctgcacaggggaggaggaagcagcggaggaggtgacggcaaagtcagagacggtgccgttgcatgaggcgaaggaggggagctgcacggccatcatggcgatggctggcgcctgcggccggtag

SEQ ID NO: 24280 - DNA, 585 bp, Oryza sativa
  Clone ID: PAT_MRT4530_29279C.1
atgggccgcttgggcttatcatgcttgggcaagtcggggttcccgtggaggcataggtacggcccaagaggacctagtgttgttcgctacactgcagtcattgctcgtggtagcgacgtcgtcgcttcggtgctaaagagagtgcaagaaggttctggtagcaagctgctagaccaagagtctcgaaggggggtatcttcggtcccggtttcactgcgagctcaagtccgtatcatcaaggatatggggattttgcaacaaggagagctggtgggcaatgatgtggttgctgatcagtacatcaagcactttgaggctcctctgccgatggttgtggtgaagggaatcgggcactcgccaggatggatggaggcacgcctctgccacctgatgtggcaggggagaccgatggcacgcagccagagtggtctgattttcttgcttgcattcgaatgtggcggctccctgcttagtgctaatgtacccttgactctctgtatcgtttatggtcctacataccccctaccagatattagtgctgtcggtgttgatgtttggatgcttagcatgtccaatgatgcctag

SEQ ID NO: 24281 - DNA, 336 bp, Oryza sativa
  Clone ID: PAT_MRT4530_2927C.1
ccggagctccgttggcccgacggccgccgccgccgtccagtttgtcgtacctctcgtacggtccttagccggcgctaccttcttggtcggaccgctcgggaccgtgagcctgcctgccgcccaagtatgacgggaaccctcgctcgcgtaagaccgcggacaggtggggggccgggtccagaccatgcgcgacgtcgatccggtcccgaactaaggcaacacgacgggcggggtgatccaaaactaccacgactggatgacgcacgggaggcccatcatggagttcttgctgtggcggaggtgtaccggtgaccgccgcgaggggtgccagctgct

SEQ ID NO: 24282 - DNA, 465 bp, Oryza sativa
  unsure (1)..(465): unsure at all n locations
  Clone ID: PAT_MRT4530_29280C.1
caacacacgattcaggaaggaggaagaggaaagagtcgatgctcgaggtcaaggggcggcgcctccattgtnttcttcttcccctcctcaccatcgccgatgccatcttcctcaccggttgcttcctcccttcatgtgctcccacgtgccaaatccagaggccgacggtcgccccatcaccaccatcttcctcgcgatccccttcgctgccaccgccgtcccctcctttctccngccgccggaccaccggatccggtggctatnagctcacgggcaaacggatctggccaccgatggcaacaaacaatggaggggaggagatgaaagtggagagcggtgtggttggggaggtgggttgcgaggaagaaggggattgcgcaanaggaggaggangaggttcggcaaagtttcttggtcggcgagtagtnaaacaaccgttgaggtttncttcaattgatccgggga

SEQ ID NO: 24283 - DNA, 274 bp, Oryza sativa
  Clone ID: PAT_MRT4530_29281C.1
gatgtacaagaaaatgtacatcgaccttattcaacgggcaacatgatccacaggctatcttacactataaatagttgtacaccatatagaatgccttcatcgagcaccggaggtgaaacaggacgctacaacaagcggcagcagggtcgttccacccagaaactctgatgattctgacacgtatttcacatctacgacctcacgcgaagcatactatatggacccaactcagtctaactatcatgacgatattttaatgcttacactaaagtgt

SEQ ID NO: 24284 - DNA, 1935 bp, Oryza sativa
  Clone ID: PAT_MRT4530_29282C.1
gcgaggcgcgagcgagcagggcgccgtcgttcgtcatgctgcttccgccgcatcctgatatttatactcattgacgcttgattgcccaagtttggtggtaaacctgaaatctgtttacgatgaaagtggaggagaaaaaaagatctataacagttgcccccttcgagtgtgcttgggatgaggagtttcggttcagggagactggtcgcgggtgcatcacctttgaggcatctgcacacaatgatgttaccctggtgttccgcgaacaacctgggagccagcattatcactacaaaatggataacagtcgtcactacattgtgatcttgggcagccataggaacaaaagattgaaaattgaagtagatggaaagactgttgttgatgttgctggcattggcctatgttgctcctcgtcttttcagagctactggatcagcatctatgatggactgataagcatcgggcaaggaagacatccaaataacaacatcctgttccaatggcttgaccctgatcccaaccgaaatgttcagtatgtgggactatccagctgggacaagcatgttggatacagaaatataagtcttatgccatcagctcctcaaaacagcatcctttggagccaaattgagtgtgcatatgttgagccggatggtgctggagggcatacaagaaaacaagaatcaaaagatggcttagaccaaagggcacttgcaaactttctagagaactgggatttctcagattctatatttgtggttggcagcgaaagaaaggttgtcccagctcacaaagttgtcttgggttcttgtggtgatttcccttttaacctgatgatgagtcgaccagctattgagcttccatctgtctcctacccagttctgcactcccttcttgagtacatctacacaggttctacgcagatttcggaatggcaactggtttcactgctggagttgagttcacaatttaaagttaaaccattggtaatgtattgtgaagaaattattggctgtttgaagatgagtgatgcagtttctgagtctagcaaaaaaatacagttatcaagtggtggttctcaagctcatcaattttattatttccctttcaaagctccattaaatacacagaaaattgaacagttccttgtaaatggtgagcacagtgatgtaaatatctatgtaaatggacatggtcttgttactcatgctcacaaactcatccttagcttgtggagcatgacatttgacaagatgttcacaaatggaatgaaagaaagcagtgcttcaaatgtatttttcgaagatgttcccgtcgaagcattctttctcctcatccaatttatgtacagtggggaacttaaggtggatatcgaggaaatcacaccagtgttggttgagttgctcctattgtcagaccagtttgggatcacggctcttcagtttgaatgctgtaaaagaattatggaattcctctcaaaggattcgtgtcctacaggaagaagctcatccaccagggctaatttctagtttttttatgggataatcggatatggcttctgcaaatttggtgaatttgctagctggttcagtgtagacttacccctgaaagtttcttgcaggacacagtatgttcagttctacgagcagtttcgtcaattccatcttgtaaactgcttgaagaaatgtgcaagaggaattttgcagaacactttgattattgcacaactgcttgcacagactttgtgttgttggatgaggcaacatttaaggatattcttcagcatgggcatatgactgtaacatcagaagagagggttctggatgccatattaacatggtgcatggaggcttgtgactgttttaactggacctctgtgcacgagctcttaagcacttcaagaccagagaaactctttggagggaggctcac

SEQ ID NO: 24285 - DNA, 225 bp, Oryza sativa
  Clone ID: PAT_MRT4530_29283C.1
atgatcctaatcggccggctaatcatggagcgatcagaaagcatggataggacatgcgagctagcagcggccagcaacagcaagaatctaaaaacatcggagcgcattcgcatcactgctgcaggtgcagatcaatcaaacaatgttgttgttacattgttggatgtcaactctgctgacagtaaggagcgaggaggagtgacgactatggattccaagcaatga

SEQ ID NO: 24286 - DNA, 1629 bp, Oryza sativa
  Clone ID: PAT_MRT4530_29284C.1
atggcgccgcccccgccgcggcgccccgtcgtgcagaggagcctgatctccctcctccttctcccggtggtcctcctcgcgctcccgacggcggcggcggcgggggcggggtgggcgccgttcagggcgagggacctgctcccgctgctgccgcgcgggctgacgtggccggccgtgggctccgtccacagcgccgtcgacctcctcccacggttcgtcgcccacgtcgcgccggaggcctcctccgcggtcgcctggcgcgccacgtgcttcgcggacaacgaggccgtcctcaccctcacccattcctcctccgccgccgccgccggccgcaacgccaccaccgccggcgctgctgcccttggcggcgccctcctccgcctcaagactgcttcagctcagagctggacatgcatggatctgtatgtgtttgcaacgccgtacaggataggatgggattactacattacagcacaggagcacacctttgagatcaaggcatgggaggaaccaggagaaatggaatatgtgaagcagcatggcattgccatatttctcatgccatctggaatgctggggacgttgttgtctctgattgatgtcatacctctgttctcaaacactatttgggggcaggatgccaacttggcctttcttcagaagcacatgggagcttcgtttgagaagcgtacccaaccttggtctgctaacatcagaaaagaggacgtacattctggtgactttttggctctttcgaagattcgagggcgatggggtggatttcagacattggagaaatgggtgactggtgcatttgctggtcacactgctgtttgcttgaaagatgagaacggcactctctgggttgcagaatcaggctatgaaaacaaaaagggtgaagaggtcattgctatagttccatgggatgaatggtggggaatggcacttaaagatgactcaaatcctcaggtagcatttctgccattgcaccctgatgttcgggccaggttcaatgaaactgctgcatgggaatttgcacgaagcatgtatggcaaaccctatggatatcataacatgatatttagttggattgatacgatgtcagacaattatccaccaccactggatgctaacctggtaatggctgttatgtcaatgtggaccagattacaaccactttatgcttctaacatgtggaatgaggcccttaataaacgacttgggactgagaaattggaccttcatgggatcatcaccgagaccggaaaacggggcatgtctttcaaccagttgctcactatacccgagcaggacgactgggaatacagcgatggcaaatcaaccacttgcgtcgccttcattctctcaatgtacaagaaggccggggtctttgctcctttcacggaatcgatccagattcgagacgcgtatatgctcaagatcttcgaggacaaccagacgaggctgccaagctggtgcaacagcggggcggacaggctcccgttctgccagatcctgggcgagtacaagatggagctgccggagtacaacacgatcgagccgtacgccaacatgaacgagaactgcccctcctcgccgcccacctacaccaggccgctgggatgctag

SEQ ID NO: 24287 - DNA, 339 bp, Oryza sativa
  Clone ID: PAT_MRT4530_29285C.1
atggaggtggagaaccccggccgccccttcgacgccgtcgcctgtcgaaggaacgccgtcgccgctgctgacatgagccgcgccgccgtgccctccgatagcccggccgagccccctagcgctggtggttgtgccgcccgtgttatggccggcgatgatgacgtcatcatgacggagaagtccgtgggggtcgctggggtgtccattgcctctggttttgagggggagattatgatccaggaacggtgcattgtgtggtgcatctctgatcagagtaaaactattcgaatagccgtgcccgcggttatgggtgagtttaacaatgtttttcgtgattag

SEQ ID NO: 24288 - DNA, 201 bp, Oryza sativa
  Clone ID: PAT_MRT4530_29286C.1
atggcggggcgcgacggcgatgtggggaggcgcgaggatggattagggagcggtgatggtagtttgccaaccttcggcaaggtgtggaagggcaagaagaagtggatgagctcgggcaccatcaacgccattgatgagcttggaaattgggcatggcaggggtggcagagggctatgagagtgagggcaagatcaatttga

SEQ ID NO: 24289 - DNA, 234 bp, Oryza sativa
  unsure (1)..(234): unsure at all n locations
  Clone ID: PAT_MRT4530_29287C.1
cccattggcattggtggtgtttgctactggctgagttancctntgacccccgcgactggccnctnagaaatngctnccttgtgtgtcttgtgtggtncctatataattagtgtttccttttgcttggaancatatatatgtggtgaataaatgntgaactctgatagtcttntgatgaaaaaaaaaaaaaaaaaaaaaaaaaaaaaaaaaaaaaaaaaaaaaaaaaaaaaaaaa

SEQ ID NO: 24290 - DNA, 276 bp, Oryza sativa
  Clone ID: PAT_MRT4530_29288C.1
atgggcaagcagatgccgaactgtagccgtggacttctgcttctgttgttggcccttctaggctgttttagcattcttggccacgtgtatggtaataatctggattacaccaggagtgccaccatgaatgaaggacgcaacaatgtcaatataaatggtttggtacccgtaccatgcaacattttctgcccatcgaaggggaaaagtataactgtcttattgatacataactggagatggccacaggagaatcacgagaataagcgcaagaaatag

SEQ ID NO: 24291 - DNA, 939 bp, Oryza sativa
  Clone ID: PAT_MRT4530_29289C.1
atggccatgattattcattctaggaaaagaaagagagtttctaggagggaagataccatccacatgtctattgaggaacaagtagctatgtttataaatacagtagggcacaatcttagaaatagattagttcgcactaattttgataggtccggagaaacagattgtattggagctattgatggcgcacatattagagcctctgttgagaagaatatggagccctattttcgtggtaggaagtctcatgccacgcaaaatgtaatggcagctatagattttgatcttcggttcacttatgtcttggctggttaggagggtacagcacatgatgttgtagttttaagagatgcattggaacgtgaaaatggccttcttgtaccccaaggaaaattctacctagttgatgctggatatggagccaaaccaggattcctccctccatttcgtgctgtccggtaccacttgaaagagtgggggaataatccggtgcaaaatgagaaggagttgttcaaccttaggcactcgtcccttcgtgtcacagttgaacgtgcatttggggtactaaagaggaggttcaaaattctagatgatgccaccccattcttcccttatccaactcaagtagatattgttgtagcttgttgcattattcataattgggtcataaatgatggaattgatcagtttattacagatccattagatttaataagtgagaccacaacagagccatttgggcaagcaaatgaccatgcattgatggaaatctcacaaaatgcatccttcagtagtgcaaggggatgcaactggtttggtcatatgggaagaattggactgggacaaaaattcgccattgtctgtgggggggaatgcacatccatcgtccatccgtctattctgctggaaatgcatgctaggtacctccatcctattttt

SEQ ID NO: 24292 - DNA, 3225 bp, Oryza sativa
  Clone ID: PAT_MRT4530_2928C.1
atggcggcgatgggacatctcggcgacccgtacgcgctgcgctccgtcgcggaccttcccccgccattccgctccgttttcgggttcaggtatttcaattcgttgcagagcgagtgcttccctgcatgcttcctctcggatgtaaacatggttatctctgcgcctactgggagtggcaaaaccgtgctgttcgagctctgcattctaaggcttctctcaaggttcctctcatcagagtggaggtttaatttgatcaaaggaaccctgaaaacaatctatattgctccaatgaaggcgttggtgcaggagaagttgcgtgactggaacatgaagctgggctcgttggggatcagttgcttggagatgactggtgacaatgaattctataacaccaaatccatacatgatgctgacttaattctcacaactcctgagaagtttgattctgtgagtcgtcatggaataagagatggtggactgggtttcttcagtgacattgctctggtccttattgatgaagttcatctcctcaacgatcctcgtggagctgccctagaagcaattgtcagtagaataaaaatgctttctcgacttggcacaatgaagattgctcctttggcaaatgttcgattcatagcagtttctgccactatccctaatattgaggatatagattacttacgttttggctttgcttggatctcagcggagtggcttgcagtaccgtctgaaggaataaaaagatttggagaagagatgaggccagtgaagttgacaaccaaggtttttggtatggttcttgtttctcatcatattgcaaatatttggccaaagcgttatgctccagcaagaaatgacttcctgtttgagaggagactccaaagtttcattttcgttggttatcacaacggtggtctttgcctaaaggataggagtgtcgttgagggacttttcctgaagggtgatattcaaattctttgcacgacgaatactttggcacatgggatcaacttacctgctcacacagtggtgataaagtcaacacaatttttcaacaaagagaagggtctgtatgtagaatatgagagatccatggttcttcagaatcctcagcattacggaattaagaaagaaattccacgtgaacttcttgaaaagcaaatgaaagatatatgtgttgagaagatccatgagctgggggagtatggtctaatttggacagatgaagatggtttccttctaaaaccattagaacctgggaggctgatgacaaaattctatctgaaatttgatactatgaagcttattgtcaaagcttctgcctgttgcactttggaagatctgttgcatatcatctgccactctgcagagattacttggatccaactacgacgaaatgagaagaagctccttaatgagataaatgctgacaaagagggaaggctttggttccatgttgttggtgcaaatgggaaaaggaagaagcgtattcaaacaagagaagaaaaaatatttattctggcaaatgattgtttaactggggaccctctagtccatgatctatctctcaaccaggaaatgaattcaatatgctcaaatggatgcagggttgccaaatgcatgagagaatattttatatacaaaaagaattacaagtctgccataagttctatgctccttgcgaaatgcttacaccaaaaactttgggagagtagtccatttttgctgaagcaattgcctggaattggaattgtcacagcaaaggcactgaagactgctggaattgattcttttgagagtttggcaactgctgatgctaggaagatagaatccgtaacaggacgaaattatccatttggagatagcataaaaagttatttgccatcattaggccccaaaattgatataaacatagaggatgctggaaacagacagggaaaatcaacaattattgtaacactgactcgcctatcacaggcagtaggatccagtaaacaaaattacgctgatatggttgtgggatcagaggaagataatgcgatcctctttcatgagaaaataaatccatactctgtcaaactgtatgtcccatgccccccaaatgccagggctactctgaaggttgacgtcatttttgaagaatatgttggtcttgatatccacaagaagcatgtggtcagcagggaagattttcatgtgaccaaagtgtttgggattaaaaaggcagaacccttgtacaatctgcctgcagagagctgtttggttagctctaaaacaactcggacaaatcaatctaagtatcataatggacagaacccactttctaaagaggtatgtgttatagaagatgattttagggccaaagctccagacaaagatgataatgatctggaaattctgggaacaagagagtacaacaacttagcttcactggaggccccaagctttactctactgcatgaagaagattatgaagatgttccagatgtattggcttctgaaccagtagaggcagaatgcaaaagtgccaccaacaacacaatttttgatcacatacgcaagaaatccagagatttccccaatctaatgttgtcgaaatccatggatagttcttatgaacctttgatactgaagaaaatgaagacatcgggcgatcagtttggactagatcagagcagtctgcatgcatatgaagtcacgcctatggtctttgatcgtactgaggctagagtctctccaaacaatacagatgagaggtgccgcaacatcctgaccagaactgcagaaactagatcctttcagtttacgggcaaaatggacagtatatctcagaagagcgagatcctgaacagaactcaaggcaaaaactctactcaacttgcgggtaaaaaagcatttgaaaagagcaagaccccagatgagaattcacttcactttgtaggtaaaagggacagctcgtctgagaaaagcaaggctctaagcaagactccagatgagaattctcttcagtttttaggtaaaatggacagctcatctgagaagagcaaattctgcttcagcagtcctcttgcagatttccagcctatgcaatgtacaaagcaagttgcagcctcagtccaacctctcacgattcaggattattgcaaggatattttggcgagtgcaaagagcagtgggactggcgcatcttttcttgacgttaagagtgtcttctcatttctctga

SEQ ID NO: 24293 - DNA, 222 bp, Oryza sativa
  Clone ID: PAT_MRT4530_29290C.1
atggcgtcaggacttagcgatgacaccgcggcaatgtgcaggattcgctacgctggtgagggctccggctccggctcggcagccgtcgctgtaaggtcgagcgggcaccacgtgttcgagatacgcgactactccatcctcaaggcgatcacccccaacaccaagtgcgtcaagtccggctcgtcaacgccgaggagcgtgtccggccgctcccgtcgctag

SEQ ID NO: 24294 - DNA, 552 bp, Oryza sativa
  Clone ID: PAT_MRT4530_29291C.1
tgccatgtcacgagaccaaacctagcggacactttggtttggatggcagcgttgaacacaaaggcgatgttcagccggacctggaagaccttttgcccatgtccttgatcgtcgagcttttcccagaatctttaagcgtaagctttaactgcgagtcctgctcttcgagtccacaagcgatcacaaagaaacacaccatttgaatgatggaccgagtggttggcatgttcacaatatcagttttcatgaaatcagccggcagacaaattgatacggctgagcctctgtttggattttgctcattctttattgcttggcaatacgagggcaagagggcggtaccatcagacacagtatcgacagagcgacttgattttcatccacagcccatgagtatccgcctacagactcttgattatcttgccgcttggttgaaaaagggttagcaactactgcagacattattttaacaagacccagggcgagtgtacgctgtacgctgtataatataattatcgtatagccagtccaaaaaaaaaaaaaaaaaaaaaa

SEQ ID NO: 24295 - DNA, 453 bp, Oryza sativa
  Clone ID: PAT_MRT4530_29292C.1
atgtcgctagtgcggagcggcaacgtgttggacccgatgtcggtggacttctgggcggacgccgacccgttcggcgccgtgcgctccctcgcggagcggtgccccgtgctcaccaacgtccgcgtcgactggaaggagacgccgacggcgcacgtcttcacggccgacctccccggcgtccggaaggatcaggccaaggtggaggtggaggacggcggcgtgctcgtcatcagcggcgagcgcgccagggaggaggacgtcgacgggaagaacgacgagcggtggcaccacgtggagcgcagcagcggcaagttccagaggcggttccgcctgccgcgcggcgcgcgggtggaccaggtgagcgcgtccatggacaatggggtgctcacggtcaccgtgcccaaggaggagaccaagaagccgcagctgaaggctatccccatctcgggctga

SEQ ID NO: 24296 - DNA, 1883 bp, Oryza sativa
  Clone ID: PAT_MRT4530_29293C.1
acgatatattcagctaggtaatccctctctgttaatatttatcatgtcattaattttgcacgcatcgttacatcacatgtctctacacgcaccatattaccagccgggccactgacaggtgggccccactgtcagccacacgcgcgcctcttcttcttcttcctctagctatggcgccaaaacgaacaaaggaaaaaaaaagaatcgaatctatggccgcagcggccggaggtggacggggacgccgtgcttggggcggagggtgagcacgttctccggcgcgtggcggtagttgtcggagatggcgaagcggaaggccgagaggagcatggcgaggacgaccttggcctcgacgagcgcgtacgcctggccgacgcagttgcgcgggccggcggcgaacggcaggaacctggcggcgccggcggccgacgggcggcgcgcgcccggcgcgaacctctccgggcggaactcgtgcgcgtcggggccccagatggactcgtcgtggtggatggccagcaccgggatccacaccgacagcccccgcggcagccggaggccgccgagctggatgtcctcgaacgccatccgcggcagcagcgtcgccggcgggtacagccgcagcgtctcctggatgatcatctgcagcacggtgagcttggagaggtggtcggcggacggcgggtggtcgccgcagacggcggcgacctcggtgcgggccttctcctgccacgccgggttggtggcgagcagcatgatcgcccacgtgagcagcagcgccgacgtctcgtggccggcgaagaagaaggtcttgcactcgtcgatcaccagctgcgcgtcgtagctgaactcgccgcctccgccgccgccattcttctccttctcctccatctccgacagaagcatagccagcaaacccctcccgtacgtcgccaccgccgccctcccctcgtcggcgatctccctgctccgccgtatcgactccatcagcaccgcctccagctcgccgttgagccgcctgatctccctcctgtacttgctcgggaaatactggctgccggggatccagagatggcggctggagcgggaggtgaggcgctggaggtgctcgaggaggaggaagatgcgcttgccagtgtcgtagctggtgttgaactcggtgcgggagatgatgtcgccggtgaggcgggtcatgtgggcgccgatctccacctcctcgccgcgccgccccgccgccgcgtcgcggagctcgcggatcgcctgcttcgtgcactccaccatgcgcccgactctcccgcgtgccttgagcttgtcggccatgaacgccggcgcgacgacgtggcgctggtgcgcccacctggcgccgttggccatgagcagcccgccgccgatgaagtgcttcgtcccctgcctctgcagccacgacttgccggtggcgtgggcgtacttggacgacaagaactccttgatcagcgcggtgtcagtcaggcacagcctcggctcgctcccgtacaggtacacgaacagcttgccgtatgtcccggaccagagcacgtagtggggcatgaggcggccgacgatgtcgtggctgagggacggcatgtcgtcggcggtggccctcgccacgagcgccgacacctcccggaggttgccgacgagcgggcgcggcggcgggccgcgcacgccctgcgccgccatggcgcggcggatcctcattggcgtcagccagtagcaggacagggtcacccacgccgccctcagaagcagcgccacgagaggcgacgacgcggcgatcaccatgagcgacacgaggaccgccattgccgccgcaagaaattcagcgagcgggagagaaggaagagatcgacaagatttgtcgcctcgcc

SEQ ID NO: 24297 - DNA, 618 bp, Oryza sativa
  Clone ID: PAT_MRT4530_29294C.1
atggtgttctcagaccccacatatgggcaattctgcagcagcaagtggcaaagctccctggaagctggaagagaaggcaagcatttgatggaagttgtggaaagatcaaggagctttaacaacatcatatgcgcgctgccggcgtccgagcggccagctgggagggcagcggcgaggcctttccccggcgacgcgacgtttcagcgcgagggccgcggcacagcgcgcggtgagcaagggcgaaggctttggatctggcggcgccgcgaccagatccagcgccttgccgctggggacaaggccgggcacgagcggcgcgatgggacgcagaggaggctgagcggcgcgcgtgctggcagctggatacaggtcgcatgggcaggtggcgcgagtgttggcggtgcaacggcgcgtgtgctggtggccggcgtggactccgacgacgcgactgctcgtgacggtggtggactcgcggtgacacggccaggtggaggcacggggcggaataagggggtgctgccgtggcaggtggcggaggacaatgacgacggctgcatgacgcggcggccagcgaggccggcgcgtcgggaggcggcggaggccgtgtggtcagcatag

SEQ ID NO: 24298 - DNA, 537 bp, Oryza sativa
  Clone ID: PAT_MRT4530_29295C.1
atgatacctgataccttgcagccagccatgatacctgatacctcgcagccgcgggagggccaggtctgccgcacctactttggcctactccacgccggccaccagcacacgcgccgttgcaccgccaacactcgcgccacctgcccatgcgacctgtatccagctgccagcacgcgcgccgctcagcctcctctgcgtcccatcgcgccgctcgtgcccggccttgtccccagcggcaaggcgctggatctggtcgcggcgccgccagatccaaagccttcgcccttgctcaccgcgcgctgtgccgcggccctcgcgctgaaacgtcgcgtcgccggggaaaggcctcgccgctgccctcccagctggccgctcggacgccggcagcgcgctacggcggcagcgaggggaaggagaggaagggagggggcggcaacgggggctagggttcaccccccgtgccgcccgtgcgacagggcgacatggggccccaaccataccaaatcacttcccatgctaagatttctgtcaaacaaa

SEQ ID NO: 24299 - DNA, 1710 bp, Oryza sativa
  Clone ID: PAT_MRT4530_29296C.1
ccggccggggtgccgcccgcctaaaaccaccgcgtccgtccccggcgtcaaaaccatgtgcccccccgccccattcctacgtgctgccgcgcgccacatattaatcagccgcacaccgttgcccgcctaccactactaccactgatcacacttgctactactaccacacatggcgaggagagcgcgggaagaggaagcggatcaggtggagaggaagctggtgctggggcggtacgagctcgggaggctgctggggcagggcacgttcgccaaggtgtactacggccgtgacctccggtccggtgagagcgtggcgatcaaggtgatcgacaaggcgcggctccgtcgcacggaagggatggtggagcagctgcggcgtgagatctccatcatgcggatggtgcgccaccccaacgtggtggggatccgcgaggtgctcgccagccgcgcccgcgtgttcgtcgtcatggagtacgcccgcggcggggagctgttcgccaaggtggcgcgcgggcggctcaccgaggagcacgcgaggaggtacttccagcagctcgtcgccgccgtcgggttctgccacggccgcggcgtcgcgcaccgggacctcaagcccgagaacctgctgctcgacgaggaggggcggctcaaggtcaccgacttcggcctcgccgcgctgcccgagcagctgcgacaggacggcctcctccacacgcagtgcggcaccccggcgtacgtcgcgcccgaggtgctccggaagcgcggctatgacggcgcccgcgccgacctctggtcctgcggcgtcgtgctctacgtgctcctctgcggcttcctcccgttccagcacgagaactacgccaagatgtaccagaagatcttcaaggcggagtaccaggtgccgccgtgggtgtccggcgacgcgcgccgcctcatcgtccgcctgctcgtcgtcgacccggccaagcgcatctccatcccggagatcatgcgcacgccatggttcaagaagggcttcgtgccgcccgtccccacctcccctgtctcccccaagaaatgggaagaagacgatgtcctcctcgacggcggcgactccggcgccatgtcgccccggacgtgcaacgcgttccagctcatatcctccatgtcctccgggttcgacctgtcggggatgttcgagagcgagcagaaggccgccacggtgttcacgtcgcgcgcgccggcggccaccgtcatccagaagctggaggccgtggggcgatcgctgggttacagcgccacgagagggaaagggtggaagctgaggttggaggcgacggcggacggagcaaacgggcggctcgcggtcaccgtcgaggcgctcgaggtggccgccgacgtcgcggtggtcgagttcgcgcacgacgccggcgacgagctcgagttcaacaagttctgcgccgtcgacgtgcggccggggctcgccgacattgtctgggcgtggcagggcgaccggccggcggcgcccgacgttgccgccgccaccgtcgagtgctcgccggcgtgatcagagccgtccgttcagcgcgacgtgaaatctgtaggatgtattagctttagcttctttgctcgcggttatgtacaggccaaatcgagagatgtgtaaatacaaaagttttgttacttgatcaatctaatttgggttaatgattagtataaaagaaaaaaaaaaaaaaa

SEQ ID NO: 24300 - DNA, 773 bp, Oryza sativa
  unsure (1)..(773): unsure at all n locations
  Clone ID: PAT_MRT4530_29297C.1
tcgtcgcttttttttttcctccttgcccctcgcgttctcgggccgcgcccctcccctttntcgttcgcgggcggtccccgggcgcngcccgccgcgttctcggcccgggcctcgccccttcccgcctcgccgctcccncccgcctcccccgcccgcggttctccctnnnncccccncctcgccgcnnggccngcccgcccccccccccccttccccgctccccgcgccggctcccggccccctgccccccgctccctcccctccccgccgcgggcccggcgcgctcgccnccggcccccnccgcnccccccttcgcccccgctctccgggcctctcccgtcccccggccgccgctcgttcccccgtccccgccgcgcgtgggtccgggccgccccgttctggttcccggtcgcgcgccncggcccggcgccggcgttgcgcancgncggtncagcgcgaggcccggtggcggcgtggcggcttggcgctgcgcggcgccggtgccgtgccgcggcggcgttgtggcgtctcgtcgtgtcgtgccgccgcggcgtcatgtcgtgacgacgtcggcgtcggcgtcgaggcggccggcggcaaccgagagggagagagagagatcgagatcggagagagagctgatgagagggaggcggcgtcggctctcaccccagagatgcggcggcggaggaggaggcggaggcggcggtgacgacgacgagcgcgagacgacggcgagatacggtggcggcgtcggcgcggggatgccctag

SEQ ID NO: 24301 - DNA, 496 bp, Oryza sativa
  Clone ID: PAT_MRT4530_29298C.1
aaaaaaaaaatcgacaccaaaagggaactattgaaaaagtagtaaaaagtataaggaaattgggttcctacatgcaaaattagctgcaaatgtaacgctttgacattattggaagaaaattaaatttctagtatgctaatctagggtagtacattatacacgtcttgaaaattgtctggaaaaatatatactggaagagagaagctgctggattgggattggccggcgaggagagcccattacggcccatttcagaggcccgagacaaccgtgtaaagcccatgggccgcgaaggccagcccaaggagcaagaagccgccgtccaccgggcgccgccccgcgcttgccgccgttccgacgaggcgggggtggaacatcgccgggggcccgatggagagcagggcacactccgtgctccccacggtcgccgggaactccccgaacgccggctcggttctcgccctcgccgtttccgcgccccccctcgccacgcggt

SEQ ID NO: 24302 - DNA, 266 bp, Oryza sativa
  unsure (1)..(266): unsure at all n locations
  Clone ID: PAT_MRT4530_29299C.1
tcctcctcccttcgtccaccatccacaaccccctcggatccccttccgcctccccctccgctcctcccgccgccagcccgtcgcagctgcagcccgtcaggcgtccctgacgagtggggcgactgctcgccctccgcgcccgagccgccctcccagcccgaccccccaatcgacgacgacgagtggggccgggacgacccctcgtcctccggcaccgggtggggcgagccgggtgtgtccgaaccccaatccanctccgccgccga

SEQ ID NO: 24303 - DNA, 312 bp, Oryza sativa
  Clone ID: PAT_MRT4530_2929C.1
gccgcgccgccgaatcgtcgacccacgctcggaccgggccgcctgtgatgcggctggcgctgccgatgcgggaaggcggccctccctgtctgagaaagaagcatcagtaggcagctacctgtgaattttcaaggcccagctcatataaccttgtttgaatggggacccaggcggtgacacattactgaacacgatagatgaatacatgtaaagtactggtggagcatacattggcctaagacagcgttaccgtctgagatcacttgtgggaaggacttcacttatgggagattagctttagtttatgttttg

SEQ ID NO: 24304 - DNA, 469 bp, Oryza sativa
  unsure (1)..(469): unsure at all n locations
  Clone ID: PAT_MRT4530_292C.1
aacgcagagaaaggcgtctncgtactcgcntctttccgcgcctccngnctttncctcctcctctcccctctntcccttctccgccgccgtcgcagcatcaacccaatccgccgccatgagggagtgcatctngntccacatcggccaggccggtatccaggtcgggaacgcgtgctgggagctctactgcctcgagcatggcatccaggctgatggtcagatgcccagtgacaggactgttggtggaggtnatgatgctttcaacaccttcttcagtgagactggtgctgggaagcatgttccccgtgctgtatttgttngatcttaagcctactgtgaattgaatgagggtgaggactgggttgctaccgccagcttctttccaccctgaggcaagctcatcaatgggcaaaggagggattcaagctaaacaactttgcccgtgggcaatacaaccattggcaagggg

SEQ ID NO: 24305 - DNA, 2428 bp, Oryza sativa
  Clone ID: PAT_MRT4530_29300C.1
ttttttttttttttttttttttcatccccctgttccttttctcccggcgcatctgttattacggaatacatagacgcaacatacacccacatattacaatcaaagaaagcaatatgaagattcacgtagggccaagtccagtttttacaagtcaattgctgaaccatttgggagcggacgcatgcaagggcaactgaacacaaccggtcacggccacacaaaaagttgtgctagtgtagggaaatatatcctatacgcaataccggataatacgggaaccgaagcttcccgacctgaaatggcgttgccctccgggccaaagagaggaacattatggcttaagcctctgctatggctcttcgattgtttgcctccctacaatctgtacaagggaatggatatacattgcgtaccagagatcaatcattatacccaaccagcaggcaacagcatttagctgtttattctcatctcaagcaacaacacgcctgcttagacaccgcataaggaggtgtgccaacattaatcaataatccaagcctaaaactgcagcaaggccttgcagtttcactcctatcaaaacatgaacagcttatctcttggatgaagtcaccttccatgcatttccttctttttcccgtaagctcagcaaaacttaagcaataggaaatcagctctgtgcacactccaaaggatgtaaacttccttcaccaaactcatgcattcgaaatcgttccaaaaattcgaaaggtagcaaaatttcacggttccgggagagcttcctctgattgttttctatgacacttgatacatcaatttcgggtccagcaatcatagatgtagcgttcgcatccggtgtccataactttattgtgttatctataccacttgttgcaacagcacagtcatatggatgagattgtatacagttcacaacggttccatcccctgcaagcattttaatcaaccttccagttcgtttctcccatatgaaccatctaccatcatcacttccgctagcaataaactccccttgttcaccgagaaagctagcttgctttatatctgtccccacattgcagtgtgcaacatatctttgcttcatgtcaacggcaacttctggctgataggcagaatcaccattctgagtggactcagctgatccattttcaccagaatgttcgtcagtttgactatctcttctgtgaaatcttaaacttaaactaccccggacaaaacctggatcactatcacggctttcatcacctgatgctgatgtttcaaagtccaactccatttcatcatcataatctgaatcttctcgaccctcctgtgatgacgagccactggcatctgatctaaacagtagatcacttaatgagcgtaaccgcccatgtcgtgcatcagtgtaggtattccctacttgatcctttttattcttctcaagttcagctgcaaaaagctgctcctttatattttccacttgcttcactgactgagaataaggtggaacaatagtatttaatgcatccacatattcagatgcctctttcagccttcctaactgtaatagtgcttctgccatatacagatgcgcctgaaatgatctggaatctatacaccttgcactgttgcaatcccttatagccatgtatacatcatttttccacctcctctttagatacaatcctgcccgagtacacaagcaatcatgcttcatgttatcatcaatattatggtccactgccagaagtattgtagagcatgcttcaaccccaagcatcaagttagtgcccatctcaagagattttgttgcaacttgcataagtttcttgaacgtatctaccctacacacatttcttgaagctctgtttacaggaaacttctgttgttttgaaattaactttgctggctctttgttaaaagggggtagacataattgctcctgtacattgtctgctgtgtatctcacagaactcgtattttctaggtcaacatcaaatagatatacatgttcaccactgtagctcaacagaacctccttaccatttgggctgaacgccccatgagttagatgcaaatttgacttcctagtatcagcaaggtgcattggacagaacattttaatacatggaggtggttccttttttgtttggcatgtgctcaatggtggaacattctcctatcatacagtcgtgcaaatgcatcacttccaccaacaagatggacgaacagtgctgatatcacaagacttcagtgccaatgctgtctgggacctgcagcccggggatctgcacagagaatataacagtttatgaatgataagggaaagaaaataataagggcaaatatcatgcatgttaaggcacccggactggtttctctataattggcctacctcttagtataaaaaaaaaaaaaagcggcc

SEQ ID NO: 24306 - DNA, 914 bp, Oryza sativa
  unsure (1)..(914): unsure at all n locations
  Clone ID: PAT_MRT4530_29301C.1
ccggccgggacaccacccagcaagaagaccccgagcaattctacccgctcggagctcctcccctttcatcgtctccaatcaccatcatctgcacgtctcaccggccctacgcaacagcaagtgggttacctctcgatcgggatgagccgcagcaacaagaagagctctaggggcatcgacctgaagctgaacctctcgctgccggcgagaggggactcgtcgtccaggagggcgatggccgccgacgaggagtcgtcgccgagctcgtgcctgtcgtcggagaacgagcacggcctgcagtggtccaacagcccggaggcgacgtccatggtgctcgccgcctgccctcgctgcttcatctacgtcatgctcccgcaggatgatccgcggtgcccgcagtgcaagagccccgtgatccttgacttcctgcagcaggacaacggcaacaacaacgccaacagcaatagcagcaggaagaccaggagagggtgaagttaaacaaaagggggggcaattctccgtttggcagaagatcaacatcaatcaagaaaaagaaaagcgtctatatgaagtcctaggtccagtaattctcttttgttttgcctattcccccagtgtaaccatgatatattccttactaaaattgtgagactagcatgaaaatccatgtgctggtggcataattttgatacatcatggatacactggggactatatccatccccctctcctggcttccttctttagtggttctaaatgaagaagttttgcttagacataggaccagacttctcatctttgttttgtttttgtttcctttccgagatgaaaagaaaacatttaccctgaaaatgttgagatgattattgttntgaatcacatgatggctttctatcaaaaaaaaaaaaaaaaaa

SEQ ID NO: 24307 - DNA, 582 bp, Oryza sativa
  Clone ID: PAT_MRT4530_29302C.1
gtcagccggtgtcgtccactcgccattatgcctgcatgtgcagctttgttttggttaattgaaaccgagttttgacaacgaatgttaattgattattggtagctagttgtgtgtgttgtcttctaactgaagaaaatggaaatctccatttggaaataatctcctcctcttctctttcccgacccactacatgcaaaccatatataaacttgaaacggagcaattggttgataggtatgcgtgttctacacttctatgaatatttttagataaaaaaaaaaaaaaaaaaaaaaaaaaaaaaaaaaaaaaaaaaaaaaaaaaaaaaaaaaaaaaaaaaaaaaaaaaaaaaaaaaaaaaaaaaaaaaaaaaaaaaaaaaaaaaaaaaaaaagggggggccgttttaaaggacccaattttacttccccgggcttgcaaggtaatagtttttttatagggcccccaaaattaaattccggggccggggttttaccacgtggggatgggaaaaccccgggggttccccaatttaatcgctttgaaaaaatccccttttccccagttggggaaaaagcaaaaaggcc

SEQ ID NO: 24308 - DNA, 346 bp, Oryza sativa
  Clone ID: PAT_MRT4530_29303C.1
tatgtgaaaacacgaggcctgggagatctgcttaactccagtgcagttccaaaactcgcattcgggtaagctagcatgctagttgatttgatcctgcaatcaacaagaaacaaagacaaagaaaccgcggttaaatccataaacgatagccgatcggctagaactctatccatgcgtggcaatcatcatgaagcacatcaacctaaaccgacaacgtatgctgtgtcatattgtcggattcggctcaatcggctaaccccgtctgactcgaactctgccgatcttagccatagccaattcggactccagccgattctcactctgtttccgggacgatttccatctc

SEQ ID NO: 24309 - DNA, 1710 bp, Oryza sativa
  Clone ID: PAT_MRT4530_29304C.1
ttactcatcttcttcgaagtccataagaaaatcagtcaagttctcagaatctgcaatagcttcttttagcgacagttgatctttcttcgacttttccttcccttcagcatcctcagcatcatcaccatcatcttcatcatcctctagtgactcaggctgcgcaacaactttgtcagcatcctcctcatcgtcatcactatcttcgttgtaagaatgctccccaatatcaacagcagtagccatgggatctctgacttcaggaagatacgtaatgtcctgattgatgtcttccatctcttcatttaaacgggcatatagctcttcctttgttatcattataccatgctccatcaagtaaggtacaacttcaggtgtaggctcatgaaattctggacccctgtagtccgctacttcgtcaggatcatgaacgtagttaatggttgggtaaacaggatcaccaccccaaatctgtttgatctggtcttcccgcatcctcattgccaaaggatctcgttgtatgcgaacatcagtgcccatcatgatacggaattccccagcagtttggtgttgaaacattgttataagttgagtattctcatcttcgccagtctcctcaaagtgtttctgtacagcttctcgtgaagtgtctttgtttttatacgcttcaacccattccgaatagtatgctattggccctatttcttctagtctcctttgttctgcttctaacctttcctctttgaataaatgtcttcttgccttggcaagagcagcttctgttctggtagggtggtccccaaatattttgatctgcccagtttctgccattgcttttgcaaagaccgtgtcaacatctggacgcctcctctgccatcttgaccacatttcattttcctcagacttcctcctccagttccaccacagctcttcactagattttggttcccctacagacattgccttctgcgggtcaacgaacgggtgtggccgtcccatcatcttgtccatctcatattcactcaaattttcttccttgggcatctcataaacgacgtactcatccaatgaatcctttgtctcctccagtgtctcatctgatgaggcctcaatggccacaaccgactctccctcatctccactggtctccgtgcctctccctgccgtcgctgatgctacctgctccttgtaccctttccttctactcccgggcttcttaccaaacgacggtgtcccagctgattccccgaccggtgcaggtgcacgggcagcgcgtacgcgggatgcagtgccctccggccagtactcctgcccaggtatgcttgcccgagcacccgacgccggctcgagctggcccgacgtggagtcgaagtaactggagtacggtggcgcctcgatcttagatggatcaaaatggagcgagtcgtccttgacgctcctgatcctgcctcttcgcgttctgctcgacacaccagaaaacagcacccttctccggtgaggcaatccagcaaacaccttcaaggactggagggggcgaggaacagtctgggcggtggcctgcggcgccatgcctgggaggagccaagtgcgggagcacgacgccatggctccgcctccgatgctgcggttggaacccgaggtggacgagagagagctaggggagggaagcggatgggttgagctccatggacgcgcaccgaagttcaggtagcc

SEQ ID NO: 24310 - DNA, 231 bp, Oryza sativa
  Clone ID: PAT_MRT4530_29305C.1
gacagaacatgaggaaaatacttaccgctgataaggctgatgccagattgtaaggggcattggcctctgttgacaaagggctcaatcctaacaactcagcctccatcgtctagaaggagatgatcgctccgccatcctctcgcgcgggtggaagacgatcatcaccaagaagccttaacatataacatgtggcatgtcacgtgatatacatgcatcctgctcgacgagtac

SEQ ID NO: 24311 - DNA, 355 bp, Oryza sativa
  Clone ID: PAT_MRT4530_29306C.1
aaaccagacatgactcaccctgaacttttaataccggacgaattaccccctcgacccaatccagagcggttttatccaacgtggcatacgcgtggcaacccagtcaggattttctttttttaaaactgtcaggtgcccacatgtcatatactctctctctcccccctctattcctctctcactctctctccctctctcggcgagcacggcagcccgcggtggctcgagcgtcgtcgtcgggcggcaggcggtggcggtggtggtgatggtggagtgggagcggcggggaggggagggggagacagggagagaggcgggggagggggaggggcgagcttgcaggggcgcagtcgag

SEQ ID NO: 24312 - DNA, 423 bp, Oryza sativa
  Clone ID: PAT_MRT4530_29307C.1
atttgttgtcatcttcttgtttatcatttccttacattttattggtgcaaccgttataggtcctgctgatgttgctgcctttattgccccaatgaacaccgaaagagctatctatggactatctagtttcacagttgatccatatttagttacgcttgcccaaaatttcacagaaacgtgtgtattacaaaacctggataccaatggttatcgtactattctacaaactgcatatgctgggctaaaaggacaaacctatactggttctgtagaacagagtattggggctacttacggttatgcgttaatgactgactatcttgttcctttaatgtggttggctcaaaaagttaattggacttgtattaataatacctgtgtagaacttgggaaatgtattgcctatactcagtctatatggca

SEQ ID NO: 24313 - DNA, 451 bp, Oryza sativa
  Clone ID: PAT_MRT4530_29308C.1
ctccgtttttatgagcagtctgctggaacctacgagggtttttataaaaacgaaactgatttatgagaaaaaaaaagagaggaagggaaaaaaaaaaaaaaaaaaaaaaaaataaaaaaaaaaaaaaaaaaaaaaaaataaaaaaataataaaataaaaaaaaaaataaaaaaataaaaataataaaaaattaaaatatatgggggggccctttttaaaggtccaaattttactcccccgtttttgcaaggttaaattttttttttggggcccccaaaataaaattcccggccccccttttaaaaccgcgggactgggaaaaccccgggtgtacccaaattaaattgcttggtagaaatcccctttttcccaaggtgggtaataaacaaaagggcccacacagatcccctttccaaaaaagtgcccccccttaatggcaatgggccccccc

SEQ ID NO: 24314 - DNA, 384 bp, Oryza sativa
  unsure (1)..(384): unsure at all n locations
  Clone ID: PAT_MRT4530_29309C.1
caaaacattacattattcatgagtcgttttgatcactatctcgcgccatgcaacacatgaacggtgtgatcctactagctatgaggcaagccagctaagcctagtactgcccggaggcgaagatgctgcactgctggcgctcaacccggcacattgacggcagctgcgccgcgtactgcctcgcactggtcagcctcacgccggtcatacacggctgctgctgctgatcgccgaactanacctcacgggaggacctctcgccgtattacccgtggtccgacgacgacccctcaccgacatattactccgacgaccacgacgaccagtcttgctccagggacatcggcatgctctcctcttagttcctcaccatcacgccggatg

SEQ ID NO: 24315 - DNA, 261 bp, Oryza sativa
  Clone ID: PAT_MRT4530_2930C.1
atagattgacgtgctgcttcatgggctgctttggaaccggggaatgatgtgctggatggaaattggtgatgcccccatgatgggatatgcccgcatctgggaagggtctggtgaatgtggttgggaacctggtatgttgtgcatgcactatgaaatggacgctgttgaccaagtgtggcactggttggcttggagtggtggttgtggtggggattgcaactgttgcaagcagtgcatgttgaaccaatgcaaacctgcccc

SEQ ID NO: 24316 - DNA, 672 bp, Oryza sativa
  Clone ID: PAT_MRT4530_29310C.1
atggcgctaatggcgtcacgcaaggaggaattcagtgctgctttgctgcttttctctgctcgatcttccaccagcacagtggccggcgagcacgagactcctccacaagatcgagggcatggccgccactacgacagaaaccaacataggtcccgctctgcgcccgctttctccaccaccgtcactggatttggaggagaaggggggaggcggatgcagaagaagggccacctccaccaccatcgccactgctgtcggctggcagatctggaggaggagaagggggaagacgaatgcagagagagggccacctccaccaccaccactgttgccgccaccacccttggccaccgccaatgtccttggccaccaccaccacgtggaggactcctcgtcccacccgccgctgctatccttgcccttggccaccgccgtggacaccttgccagaagagaagaaggagaagagaaggacggaaagggacagcgctatgctactctctctaattgtgttcgtcctcctgggggagcttcgaagggtgtgttgtcgtacgactcgtacgtggtgcctctggcggccattcgtggatcggctgccggggtcgtcggtgacgttcgagtgcgtggagacggcgcaggcatggcgatttttctgctttgagatcgagctcat

SEQ ID NO: 24317 - DNA, 1311 bp, Oryza sativa
  Clone ID: PAT_MRT4530_29311C.1
atgacgagtgggaaggagatcgacaagctcaccaaggaggactggaccaaggaggagtggcgagactttgaaaaccaaatggcggcgtgtgagaagacgatgctcgcaagcttcctcaagaccgaccaaggcgtcttcaaaagagacgtgacgtcccgctaccttgttaggagctctattgggccgcatgcagtgttgggaaggcagcagtgcaaggtggaggaagatttgggcaaaataccaaaccaacataaggtgtttaaggacgatgaaaggatatcagagcccgtttccatcaaatccaccatgaacaaggagggaatatccatggacgaatctttagatcagaatcttgggaagcttgagttgatggaggccaagtgcatgcaagaggagaagttcaatcaaatactacagaagttggaggagatagaggcttgtaggagcaaggctaccgaggtgacgattgctgccatcaggacaaccaccgccatcctcaaggcttcatcatctccaacacccatggcaccacctcctccaacaccgaccaagtgtttgacaaaatgccccaacaacaacttcacttgggtgatggcgaattcaagtcacattggtgaggtgcttgctccaacggctgcctgggagctaggagacaacaaggacaagggccacgccccctgcatcgtcaccaacgactcacccaaggtcacgcccgccaagtgctcgaattgttctagccctgacatcatgctagacctcaccgtggctgtgggggtttcatgtgccactacttctatggcctccatggagttgttggttggcgaggatgaaaccagtgtcatctacattgacaaccctcattgttccatagcgacgcatgccaagtgttcgactttgggcctcgatgtcaatggtagcgccaaccaacctgtggtcgtgttccctaccattacagctatgaatgggcatagcatcattccaactctgcctctgaccattatgaatacgtcagtcatccttgttgtcaaatcaagttgtgctagcgacaattctatcagacttatgactctatataatggattcagttgtgttattgcagagacaaaaatgatatacgtagctactgttgtgaggttcagtttgtgctatatgcagatgggtgctatgaaaccttcaagtgttatacaatggttaaatttcccctactgcacatatgacggattcaagcggaagcttcgaggcttgttcacaaatggagccttgtgcatacattcaagtcagtatgatcctccagatgggctttgtgaataa

SEQ ID NO: 24318 - DNA, 1044 bp, Oryza sativa
  Clone ID: PAT_MRT4530_29312C.1
atggatcaaataccaattcaaattctcaatggcacatcactttatgtgtccctcgacttgtcaaacaacttacttacaggatatatttctttcaacaaattctctggtgaaattccatcttcacttggtcaatgtgtttctctactgtctcttgacttgaaacataacatgcttaatggaagcatacctcagttgttaggtcaactaaagtccattgttctgcttgatctttctcaaaatatgtttgtcgggcaaattcctgagtttcttgtgaacttctcttttttgaaccaacttgatctgtcgaacaactactttgaaggacctattccaactggtggcatctttcagagtagcagtgcagtgatcttagatggcaacacaagactatgctcaagttcatcttactctatatttggattcccaatttgcccaactacaacacttgccaaaagaaagaataatgcacacttactaataatagtgattcctcctgttactatcgtcgtattgtcattcttcttttttatggtgacacttctgaagggaaagcaagcgcatacgacttcatgctacaaagagacaatgaagaaagtatcatatgttgacatccttaaggccaccaattggttctcccctgtcaacaagataagctcgagtcatactggttcgatatacattggaagctttcttactgagtgtgaggtgctaagaaacacccgccatcgcaaccttgttaaagcaatcaccgtatgctccacggtcgacctagagaacaatgaattcaaagctatagttttggagttcatggccaatggaagcttggacatgtgggttcatccaaagctacatcaaaatagtcccaagagagagtatggaatgggatacaaaatctcgaccggatgtgatgtgtacagttttggagtgttactgcttgaaatgctcactggaatgagaccgacagatgcaatgttcatcgacggcatcagccttcacaagtttgttagcatggaaaccttcacctctacatgcatttttctctag

SEQ ID NO: 24319 - DNA, 792 bp, Oryza sativa
  Clone ID: PAT_MRT4530_29313C.1
cccacgcgtccgcccatgctttccgccgccgacgcgccgatctcctccttccagttccaggctaagccatggcgagcaagaaccccaaggtgttcttcgacatcctcatcggcaaggccagggccggccgcgtcgtcatggagctcttcgccgacaccgtccccaagacggccgagaactttcgctgcctctgcaccggcgagaagggcctcggcgcctccggcaagccgctgcattacaagggttctgccttccaccgtatcatacccaacttcatgtgccagggcggcgacttcacccgcggcaacggcaccggcggcgagtccatctacggcgacaggtttgccgacgagaacttcaagctgcgccacaccggcccaggcgtgctctccatggccaacgcagggccaaacaccaacggctcccaattcttcatctgcaccacgcgtaccacctggctcgacggcaagcacgtcgttttcggcaaggtcgtcgacggatacaccgtcgtcgagaagatggagcaagtcggctccggctctggcggcacggccgagcgcgtcctcatcgaggactgcggccagctcgccgacgaccacgccaactgattatattagattacttacttactagagtatattttcttccttttacaaggaattttgtgacattgttccgttcttcttcttgtatcaataacaatccaatgttagaaaacatttatttataactatgctcttagccctcaatgttatatagctattgccttgctctgaaaaaaaaaaaaaaaaa

SEQ ID NO: 24320 - DNA, 244 bp, Oryza sativa
  Clone ID: PAT_MRT4530_29314C.1
gccaaagtaacagaaagtaccgatatagtgacatatgctgatgtggctaggagtagacgacgccaaataaaacctggaagatattgtggagttcctaaggaacccagaaagatatatgcgcactaggtgcgcgacctatactaagtgtggggttggtgggccttacacgaactgaaaagacgcttcttacaaaagctaacacaggggaagatgaactcccattcataacttactcaaaaagaga

SEQ ID NO: 24321 - DNA, 1755 bp, Oryza sativa
  Clone ID: PAT_MRT4530_29315C.1
atgacgggggtctctcaactagttctctccaaaaacctcgggaacgccagaactcctttcgctgctgataacgttacgtttagagcgtatgaggactacagttcatggaacagaaagttcaagccgatcttacaattgaagcaatcggctgtggcaaacgcggaagagaagggttcaaaggttgaggaacatggggcgctttcggaggttgagcaagaaatcaaccatcggctgaagaaagcaaagccgaagcaggagtggcgtgttaagaatcaagctcccacagccgatgaggtgaaaagattggctaaggggaagagtgttgtgactgcatcggttaacatggttttcacgttacctgcggaattcggagctaaacaagccgatgttgatgaagttgaggaagcttcagctaggttggttttgtcaccagagcaaacagtttttgagaagccggaagggacagagaatcggcatcttaagccattgtacattaacggttatgtcaatgggaagccgatgtccaagatgatggttgatggtggggctgctgtgaatttgatgccatatgctacattttggaagctaggcagaaatgctgaagatctcatcaagatgaacatggttctcaaggattttggtagcaatccattagaaataaaaggagttttgaatgtggaactgacagtcagcagcaaaaccgtccctacaacattttttgtcatcgatgggaagggttcctacagcttgctgcttggaagggattggattcatgctaattgttgtattccttcgaccatgcatcaatgcttgattcaatggcaaggcaaaaagattgagattgtgccatccgacagccaattgaagatggagagcccaagttattattttgagggcgtcgtggagggttcaaacgtttacaccaaggacacagtagatgatctcgataacaagcaaggacaggatttcatgtcggccgatgatttggaagaaattgatattggaccagggtacaatcagaactttatgtccgaagaagatatccataagactgctttcaggtgtcctggtgcaatcggcttgtttgagtgggttgtgatgacttttggcttgaaaagtgccggagctacatatcaaagggccatgaactacatttaccatgatttaatcggctggttggttgaagtctatattgatgatgtggttgttaagtccaaggaaattgcggatcatatagccgatttaaggaaggtttttgagagaactaagaagtacggcctgaagatgaatccgacaaagcggttctcaaaggggttgcaattactcaaggaagttgaagccgatgctgttgagattatgggtgattccttgctggtgattagccaattggcgggagaatacgagtgcaaaaatgatacattaatggtttacaatgagaagtgccgagagttgatgaacgaatttcggctggtgactttgaagcatgtatctcgagaacagaatgttgaagctaatgatttggcccaaggggcatcgggatataagccgatgatgaaggatgtcaaagtagaagttgccacattaacagccgatgattggaggacggcggtcagatcggcggcggcgacaggcgcggcaggcgacatcgatggtcagaccgggcctgatggaccttgggtgcctgcggggcccgcatacctgatggaccgtgggccggtggggcccggatacggtgaaggggcggtgaagggctaa

SEQ ID NO: 24322 - DNA, 4284 bp, Oryza sativa
  Clone ID: PAT_MRT4530_29316C.1
atgcccagtgggaccgagttgcaacaacgttctctcacggaggtccctcccaagactaatagcccaaagcctagtgggtttgaagttcatgagggaaacattgttcccgtcactacagacaaattaacaccggaacaaaagaaggagctcgatctgatgatgcagcaaacacaacaccagttcttgaattctttcatggagacccgtaagggaacagttgttcagaagtataaggttcttctaaggatcgatggagaattacaacaagttccggctgctacagctgaatcaggtagtaaaggcattctagagggctcgggagataaaggtgacagttttcagggggtacaagttgaagatcttggaccagatggcaatgtagtacaaccacagtttaacaacttccaagatcggattgactacgccgtgcaacatactttgattaatcaatctggagtgctagtcaataccttgtcaaacatgtatttttcgccccatctgtattttagtcctggttccgccagtactactaaatggagcaggagagagcaaccacaacatgctggacaaaatgtcaatgatgactcaggaacaggttgctatgatgatgatgatgactccgaagtagcagcagccgaatgggttaggagcaaaaaggttgtgccatgcccatgggtgaagagttctggaaaaaaagaaaggtttgattttgatatcaccaaagctgacaagatcttcgatttgttacttcgggagaagcaaattcaacttcctgctggtcatattataccatcggctgaggaactaggcaaaaggaggtattgcaaatggcataactctggttctcattctactaatgactgcaaagtttttagacagcaaatccaggtggccattgaaggtggaaagattaaatttgatgactcaaagaagccgatgaaggtcgatggaaatatgacaagcagcaacaagggaggtattatgaagaagatgatggaggttttgatcctcattaggactgtgagtttttcagattttgctggaaagaaggggaagagtgttgtgaccgcattggttaacatggttttcatgttgcctgcggaattcagagctaaacaagctgatgttgatgaagttgaggaagcttcggctaggttggttttgtcaccagagcaagcggtttttgagaagctagaagggacagagaatcggcatcttaagccattgtacattaacggctatgtcaatgggaagccgatgtccaagatgatggttgatggtggggctgccgtgaatttgatgccatatgctatattcagaaagctgggtagaaatactgaagatctcatcaagacaaacatggttctcaaagattttggtggcaattcatcggaaacaaaaggagttttaaatgtggagctgacagtcggcgacaagattgaaattgtgccagccgacaggtcagataacgttgccagtgccgatttagctctttgggagatggacagtattgattgcttgtctggaaaagtttgggatggagattttctaaaagtgttcgattatgatatacagccgattgaagatggagagccaaattattattttgagggcgtcgtggagggttcaaacatttacaccaacaacacagtagatgatctcgatgacaagcagggacaggggttcatgtcggccgatgatttggaggaagttgatataggtccgagtgatagaccaaggccgacatttatcagtaagaatttatctccagaatttagaaccaagttgatagagcttttaaaagaatatagagattgctttccttgggagtattatgagatgccaggactcagccgatcgattgttgaacatcggctacctatcaaaccgggggttagaccataccagcagccgccgagaagatgcaaagccgatatgatcgaacccgttaaggctgaggttaaacatttgtatgatgctggttttattcgtccttgccgatatgctgagtgggtttccaacatagttccaattatcaagaaaaatggcaaagttagggtgtgcattgattttcgagacttaaacaaggctacaccaaaggatgagtacccaatgccagttgccgatcaattggttgatgctgcttcagggcataagatattgagttttgtggatggtaatgctggttctaatcagatctttatgacagaagaagacattcataagaccgcttttagatgtcttggtgcaatcagcttgtttgagtgggttgtgatgactttcagcttgaaaagcgctggagctacatatcaacgggctatgaactacatatatcatgatctaatcggctggctggttgaagtctatattgatgatgtagttgttaagtcaaaggaaatagaggaccacatagccaatttgaggaaggtttttgagagaactaggaagtatggcctgaagatgaatccgacaaagtgtgcttttggcgtatcggctagccaatttttaggatttcttgttcatgaaagggggattgagataactcagaggagtgttaatgcgatcagaaagattcaacctccggaggacaagacagaattgcaggagatgatcggcaagataaattttgttagagggttatatctattggccggtgagaagtcaatcggcttggtcttgattcagaagctcgagggaaaagaaagagttgtgttctatttgagtcgtcggcttttggatgcagagacaaggttaaggcattatctattatccaatgaatgcactgtaatatgcaaagccgatgtggtcaagtacatgttatcagctccgattttgaaaggaaagaatggaaagtggatatttactttgacagaatttgatcttcggtatgagtcaccgaaggcgattaaggggcaagctatagccgattttattgttgatcatcgtgatgactcaatcggctcgtttgagattgtgccctggactttgttttttgatgggtcagtatgcactcatggttgtggtatcggcctggttataatttctcctcgggggacaagttttgagtttgcatatactatcaagccctatgcaactaataatcaggctgagtatgaagcggttctcaaagggttgcaattacttaaggaagttgaagccgatgttgttgggattatgggtgattcattgccgaatccaactcaattggcttctcggaagttgcgctataaggctttgaagtataccttgttggatgatgagctatattatcggaaaattgatggggtgttgcttaaatgtttaagtgttgatcaagctaaggttgcaataggcgagtttggagcaattcaaagagcacccgcatcggctatgaatcctatcatcaagtcgaggtcatttagaggttggggaattgatatgatcggtatgattaatccaccatcgacaaaaggacataagtttatattggtgacaaccgattattttaccaagtgggtagaagcgattcctttgaagaaagttgattctgtgcatgctattcgatttgttcaagagcatattatttatcgctttggtattcctcaaaccattacaaccgatcaaggctcgatctttgtgttcgatgagtttgttcagtttgccgatagcatgggtatcaaattgttgaattcttcaccatattatgcacaagctaatgggcaagccgaggcgtctaacaagagtttgatcaaatttattaagagaaagatttctgattatcctcggcaatggcatactagattggtcgaagcattgtggtcctatcagatggcttgtcatggttcgattcaagttcctccttataaacttgtttatggacatgaggcagttttaccatgggaagttcaaattggctcaaggaggatagagttacaaaatgagttaacagccgatgaatattacaatctcatggtcgatgagagggaagacttggttcaatcgagattgagagcccttgcaaaagtcaccaaagataaggagagaattactcggcattacaacgaaaaggtggtaccaaagtccttttcggaaggtgaccttgtgtggaaattgattttgccgacagggactcaagataacaaattttgcaagtggtcgccgaattgggaaggaccgtttcaaatctataagtttgtatccaaaggggcttatatgttgcaaggacttgatggtgaagtttatggacgagcactcaatggcaaatacttgaagaaatattacccaagtgtttggattaatagatga

SEQ ID NO: 24323 - DNA, 318 bp, Oryza sativa
  Clone ID: PAT_MRT4530_29317C.1
gccacgcgttcggccacgcgttcggccacgcgttcggaaattcccttcttccattttttctcttctcgcttcttggcggaagcggcggcggcttcttcttcttttggcatgggcggcggtggttcccccgggggccccgggcttttcttcgacatcgggaagaagggttgagaacttcttggatagggattaccacacggaccaaaaggttacgcttaccacctacgccgggaacggagctggaatcactggtggtggcacgaaaaaaaatgaattcattttttttggaattcaaaagccggggaagaacaacaatgg

SEQ ID NO: 24324 - DNA, 951 bp, Oryza sativa
  Clone ID: PAT_MRT4530_29318C.1
atggcttctgagtgggactcaccatgccagttttgtggcaagaacttcaagagaagaggtgatctgctaaatcatgagttgacttgcaagtacatttcggatgtgcatccgcaaacagaatcttcaggagatgctcaggctcgcaaggatattttgggatttcatataccaaggcaaaagcgaacagttcccgcattcccagcttctgattatgctcagggtggcatcaatggtgcaacaaacgatgaaccagctgctagtaataatccagatcaggtgctgaagatgtgctctgacaagggttcatctcctgtggaatgttatggaggtgatgagaggagggtcggtgcgtgcgccattgcgggggtggaggaggatgatctcagcccaaatgttggttgtcgaggggtcaccgattgtgttgatgagtctaatgtgattcaaaagcaaaaaagacagcctgatcttagcgttgccgatctcagggaccttgttgagatgaaacagcaaaacatgaaggctgataccaatattcatgaccaaggacatccttctgtgatgcagatgcaaaaaaatgagcttagtcttgatctactgcctcacaagaacagttcagatcacgaggtaccaacccttagtgtcagctctatggatgatcccgatggcctggtttccactgatacaaactcagataaggagacggagactgtcaatgttggtattgatatcaatattcctgagcagagagaatcttcagtgacgcggatgcaaaacgagaagcttggtctcaatctgctgcctcgcaatgacagttcaggtcatgaggtaccaatcctcagtgttagctctaccgatgatctcaactccctgattcccactgatacaagctcagataaggatacaaactcaaatgtagcagacaggttaggccactgtcctgcacaagagtag

SEQ ID NO: 24325 - DNA, 1944 bp, Oryza sativa
  Clone ID: PAT_MRT4530_29319C.1
atggagagcccaaattattattttgagggcgtcgtggagggttcaaacgtctacaccaaggacacagtagatgatctcgatgacaagcaaggacaaggtttcatgtcggctgatgatttggaagaaattgatataggtccaggtgatagaccaagaccgacatttatcagtaagaatttatctctagaatttagaaccaagttgatagagcttttaaaagaatatagagattgctttgcttgggagtattatgagatgccaggactcagccgatcgattgtcgaacatcggcttcctatcaaaaccggggttagaccataccagcaaccaccgaggaggtgcaaagccgatatgcttgaggctgtcaaggctgaggttgcacgtttatatgatgctgattttattcgtccatgccgatatgctgagtgggtttccaatataattccagttatcaagaaaaatggcaaagtcagggtgtgcattgactttcgtgatctaaacaaagctaccctgaaggacgagtacccaatgccagtagccgatcagttggttgatgctgcttcggggcataagatattaaattttatggatggcaatgcaggatataatcaaatctttatggtagaagaggatattcataagacagctttcaggtgccctggtgcaatcggtttgttcgagtgggttgtaatgacttttggtctgaagagcgctggagctacatatcagagggccatgaattacatattccatgatttgatcggctggttggttgaagtttatgttgatgatgtggttgttaaatcaaaggaaatagagaatcacatagccaatttgaggaaggtttttgagagaactagaaaatatggcctgaagatgaatccgacaaaatgtgcttttggcgtatcggctcgccagtttttgggttttcttgttcatgagagggggatcgaggtgactcaaaggagcattaatgcaatcaagaagattcaacctccagaggacaagaagaagttgcaggagttgatcggcaaggctgaatatgaagcggttctcaaaggattgcagttgctcaaggaagttgaagctgatgctgttgaaattatgggtgattctttgttggtgatcagtcaattggcaagacagtatgaatgcaaaaatgatacgttgatggtttacaatgaaaagtgccgagaattgatggatggatttcggctagtaactttgaaacatgtgtctcgagagcaaaatattgaagctaatgatttggctcagggagcatcggggtacaagccgatgacgaaggatatcaaggtggaaatcgctactatatcagccgatgattggagatatgatatttttcaatatttgcagaatccatctcaatcagcttctcggaagttgctctataaagctttgaaatacaccttgttggatgatgagttatgttatcggatgattgatggggtgttgcttaaatgtttgagtgctgatcaagccaaggttgcgataggcgaggtacatgaaggaatttgtggaactcatcaatcggctcataagatgaagtggttgcttcggcaggcaggatatttttggccgacaatgttggaagattgcttcagatattacaaaggatgtcaagattgtcagaagtttggagcaattcagcgagcaccggcgtcggctatgaattctattatcaagccatggccattcagaggttggggaattgatatgatcggtatgattaatccaccttcaagcaagggacataagtttatattggtggcaaccgattactttaccaagtgggtagaaacgatttctttgaagaaagttgattcaggggatgctatacaattcgttcaagagcatattatttaccagtttggtattcctcagaccattacaaccgatcagggctcgatcttcatgtaccgatga

SEQ ID NO: 24326 - DNA, 423 bp, Oryza sativa
  unsure (1)..(423): unsure at all n locations
  Clone ID: PAT_MRT4530_2931C.1
cattgctcacacaagcattttgtggttacaaggcacntaatagccatatgcacaggaatacattttgcttaatctgaccagtatccctgaatgccatgcaatggctagaactaattcaagcgataccaccctagttcaaccctgatagagagaggaagggaggacatggaacaaaaacattataattgacatgatattatccatccttcatggtgactgccacgtgaggcatttaaatgaaagggatggagtatcatgctgggccatctatcgaactgtcttcccattatactggccctactatgttaggcccttggaggcttcttttagcttatgacccatgatcttctttaggacacaggctcacatggtgactccgatgctgatgagctgcttgatcaacatgatgggcttgtaagactc

SEQ ID NO: 24327 - DNA, 264 bp, Oryza sativa
  Clone ID: PAT_MRT4530_29320C.1
cattattcattatttgctgcgatcactatctcgttgcatgcaacacagcaacgtggtgatcctactagtctatgaggcaagccagctaagcctagtacgtggccggcggggaaaatgctgcactgttggggctaaacccgtcacatcgacagcagctgcgccgcgtactgccttgccctgtgcagcctaacgcgggtcatccccggctgctgctgccgttcgccgaaggagccctgctccgacgccccctcgccgtagtacccc

SEQ ID NO: 24328 - DNA, 1083 bp, Oryza sativa
  Clone ID: PAT_MRT4530_29321C.1
atggcttctgagtgggactcaccatgccagttttgtggcaagaacttcaagagaagaggtgatctgctaaatcatgagttgacttgcaagtacatttcggatgtgcatccgcaaacagaatcttcaggagatgctcaggctcgcaaggatattttgggatttcatataccaaggcaaaagcgaacagttcccgcattcccagcttctgattatgctcagggtggcatcaatggtgcaacaagtgaagtgaaagtggattgggatcccgaagaagagactgatgttttagaggctctcttgcttctcagggagcaacctgcctatcctggagaagagacattttctgatgatgaaccgggtgctggtaatgtagacgatgaaccagctgctagtaataatccagatcaggtgctgaagatgtgctctgacaagggttcatctcctgtggaatgttatggaggtgatgagaggagggtcggtgcgtgcgccattgcgggggtggaggaggatgatctcagcccaaatgttggttgtcgaggggtcaccgattgtgttgatgagtctgatgtgattcaaaagcaaaaaaggaagcctgatcttagcgttgccgatctcagggaccttgttgagatgaaacagcaaaacatgaaggctgataccaatattcatgaccaaggacatccttctgtgatgcagatgcaaaaaaatgagcttagtcttgatctactgcctcacaagaacagttcagatcacgaggtaccaacccttagtgtcagctctatggatgatcccgatggcctggtttccactgatacaaactcagataaggagacggagactgtcaatgttggtattgatatcaatattcctgagcagagagaatcttcagtgacgcggatgcaaaacgagaagcttggtctcaatctgctgcctcgcaatgacagttcaggtcatgaggtaccaatcctcagtgttagctctaccgatgatctcaactccctgattcccactgatacaagctcagataaggatacaaactcaaatgtagcagacaggttaggccactgtcctgcacaagagtag

SEQ ID NO: 24329 - DNA, 4068 bp, Oryza sativa
  Clone ID: PAT_MRT4530_29322C.1
atggttgaagatcttggtccagatggcagtggattacaaccacaattttacaacttccaagatcggattgactatgttgtgcaacatgctttgatcaatcaatcaggagtcttagtcaatactttaaccaacatggtgaagacagtggttgatggcacaattgctgagcatgaagttacaggaccagtgttgaggacacctgataatcagctaaggcagcatgttgcaactcaagtcgtccctgagcacttggttcataatgtgcagccagatcaattagtgatacctcaaattatccctgaacatttggagtttgaaagcttacctcaccttgcacagaaggtaactctgcacgagcaaaggtttgcagaggctaagaagaaattcaagaaaatcaatcatgtgtatccttacatgtatggttctgatgaagaggacgataccaaagtagcagcagccgagtgggtcagaagcaaaaaggttgtgccatgcccatgggctgataagaattttgacttgttacttcgggagaaacagattcaacttcctgctggtcatattataccatcggctgaggaactgggcaagaggagatattgcaaatggcataattctggttctcattttactaatgattgcaaaattttcagacaacaaatccagaggacatatggcaagcagcagcaggagaggtattttgaagaagatgatggtggttttgatcctcattgggactgtgaattttttagattttgctggaacgaagatcaagagatcaaccatcagctgaagaaaacaaagccgaggcaagagtggagtgttaagaaccaagctgccacaaccgatgaggtcaaagccgatgaagcaaaaaggttggctaaatggaagagtgtcgtgactgcattggtaaacatggtttttacattgcttgcggaatttggagctaaacaagccaatgttgatgaagtcgaggaagcttcggctaggttggttttgtcactagagcaagcagtttttgagaagccagaagggacagagaatcggcatctcaaaccattgtacattaacggctatgtcaatgggaagccgttgtctaagatgattgttgatggtggggctgctgtgaacttgatgccatatgctaccttcaggaagttaggcagaagttcggatgatctcatcaagacaaacatggtgctcaaagattttggtggcaatcaatcggaaacaaaaggagttttgaatgtggagctgacagtcggcagcaaaaccgtccctacaacattttttgtcatcgatgggaagggttcctatagcttgttgcttggaagggattggattcatgctaattgttgtattccttcgaccatgcaacaatgcttgattcaatggcaaggcgacaagattgagatcgtgccagccgacaggtcagttaacattgccagtgctgatttagctctttgggagatggacggtattgattgcttgtttggaaagacggagagtccaaattattgttttgagggcatcgtggagggtttaaacgtctacaccaaggatacagtagatgatctcgatgacaagcaaggacagggtttcatgttggctgatgatttggaagaaattgatataggtccagacgacagaccaaggccgacatttatcagtaagaatttatctccggaatttagaaccaagttgatagagcttttaaaggaatatagagattgcttcgcttgggagtattatgagatgccaggactcagtcgatcgattgttgaacatcggctccccatcaaaccgggggttagaccataccagcagccgcagaggagatgcaaagccgatatgcttgagcctgtcaaggctgagtgggtttccaacatagttccagttatcaagaaaaatggcaaagtcagagtgtacattgatttccgagacttagacaaggccactccaaaggatgagtacccaataccggttgccgatcaattggttgatgctgcctcaggacataagatattgagttttatggatggtaatgctggttacaatcagatttttatggcggaagaagacattcataagacggctttcagatgtcctggtgcaatcgacttgtttgagtggattgtaatgacttttggcttgaagagtgctggggctatatatcaaagggccatgaattatatattccttgatctgatcggctggttggttgaagtttatatagatgacgtggtggttaagtcaaaagaaatagagaaccatatagccgatttgaggaaggttgttgagaggactaggaaatatggcctgaagatgaatccgacaaaaagattagaaccttttacacctttattgagattgaaagccgatcaagaatttacttggggggcagagcagcagaaggctttggataatattaaagaatatcttagctctcctccagttttgatccctccacaaaaggggattccttttagattatatctgtcggatggtgagaagttaatcggctcggtcttgattcaggagcttgaagggaaagagagagttgtgttttatttgagccgtcggcttttggatgcagagacaaggttaaggcattatctattgcccaatgaatgcactgtgatatgtaatgccgatgtggttaagcatatgctatcggctccgattctgaaaggaagggttggaaagtggatatttgctttgacagaatttgatcttcggtatgaatcatcgaaggtgattaaggggcaagctatagccgattttattgttgatcatcgtgatgactcaatcggctcggttgaaattgtgccttggactttgttttttgatggatcagtgtgtactcatggttgtggtatcggcttggttataatttctcctaggggggcaagttttgagttttcttacactattaagccctatgcaaccaataatcaggctgagtatgaagcagttctcaaaaggttgcaattactcaaggaagttgaagccgatattatcgagattatgggcgattccttgttggtgatcagccaattggcaggagaatatgagtgcaagaatgatacattgatagtttacaacgagaagtgccgagagttgatgaaagggtttcggttggtgaccttgaagcatgtatctcgagaacaaaatgtcgaagctaatgacttggctcaatgggcatcgggttacaagccgatgatgaaggatatcaaaatagaagttgccacgataacagccgatgattggaggtatgatgtgcatcattatttgcagaatccatctcaatcggcttctcagaaattgcgctataaggctttaaagtataccttgttggatgatgagttatattatcggacaattgatggagtgttgcttaaatgtttgagtgctgatcgagccaaggttccaataggcaaggtacatgaagaaatttgtggaactcatcaatcggcacgtaagatgaagtggttgcttcgacgtgtaggatatttttggccgatagtgttggaagattgtttcaaatattacaaaggatgtcaagattgtcagaagtttggagcaattcagaaagcgccagcatcggctatgaatcctatcatcaagccatggccattcagaggttggggaattgatatgatcaggatgattaatccaccatcgagcaaaggacacaagtttatattggtggcaaccgattattttactaagtgggtagatgcgattcctttgaagaaagttgattcgggggatgctatacaatttgttcaagagcatattatttatcgatttggtattcctcagaccattacaaccgatcaaggctcgatctttgtgtccgatgagtttgttcagtttgccgatagcatgggtatcaaattgttgaatttttcaccatattatgcacaagctaatgggcaagccgaggcatctaacaagagtttgattaagttgattaagagaaagatttctgattatcctcggcaatggcacactaggttggccgaagcattgtggtcttatcggatggcctgtcatggatcgagttag

SEQ ID NO: 24330 - DNA, 749 bp, Oryza sativa
  Clone ID: PAT_MRT4530_29323C.1
attcagaggttggggaattgatatgattggtataatcaatccaccatcgagcaaaggacacaagtttattttggtggaaatcgattactttaccaaatgggtagagccgattcctttgaagaaagttgattctggggatgctatacaatttgttcaagagcatataatttgtcgttttggtattcctcagaccattacaaccgatcaaggctcgatctttgtgtccgatgagtttgttcagtttgcagatagcatgggtatcaaattgttgaattcttcgccgtattatgcacaagctaatgggctagccgaggcgtctaacaaaagtttgatcaaattaattaagaggaagatttctgattatcctcggcaatggcatactagattggccgaagcattgtggtcctatcggatggcttgtcatgtttatggacatgaggctgttttaccatgggaagttagaatcagctcgagaaggatggagttgcaagttgagttgacagccgatgagtattataatctcatggctgatgaaagggaggatttggttcaatcaggttgagagcccttgcaaaagtcaagggtgcccaagtctttttcgaaaggtgaacttgtgtggaaattgattttgccgatagggacttgagataacaaatttggcaagtggtcaccaaattgggaaggccgtttaaaatttataaggttgtatccaaaggggcttacatgttgcaaggacttgacggtgaagt

SEQ ID NO: 24331 - DNA, 772 bp, Oryza sativa
  unsure (1)..(772): unsure at all n locations
  Clone ID: PAT_MRT4530_29324C.1
ccaccaaaaagcagcagtcgaaagcgagaaaaaaagcttaagaaagaaagaaagctagcttcagtgagagtgagaatgtggggggagattgggggagagagagggagagaggggctcgtgtgtcttgagagagatatatgacaccaacaactcccagctgtgtgtgtgtgtgagagagagagagagagagagagagagagagagcatctggttcttgtaccaccaccaccactgccccctttgcattgtccctccctggccacttctttctccttctccattttgtgcctagcgtacaaggaggtgccctgcttgctgctgctgctgttcggaagctatggcattgcaagaagaagaggaggatgatgaagatgatgaagaaggggagaaagaagaagaagaagacggtgtcagggtgcgtggggagctctgatttctccttgtcctgaggtgtgctgtccacttgtggatgtagtaagatattggcacaataggctcaatcacttttttcttttcctctcttcttttctcacttctgcttatttttgctgcttgcttgcttcttcgtcttttttattttccttcttcccctcaattcatgatgacacgttcttccttccttgtgtaatttatcaccgttcttggcgttttgcctgatttagaatgcaactgaaaaaaaagaaaaagatcgcagaggaaaaaaaaaggcagcagcagtngggtgggtgaaagtattggaaatctctcctgctagtaaaaaaaaaaaaaaaaa

SEQ ID NO: 24332 - DNA, 483 bp, Oryza sativa
  Clone ID: PAT_MRT4530_29325C.1
atggctgagaaaccaccaccatcaccgtcttcgattggcaagtcggaggtcccttccaagactgatatcccaaagcctagtgggtttgaagttcatgagggaaacattgttcccgtcactatagacaaattaacaccggaacaaaagaaggagctcgatctgatgatgcagcaaatacaacaccagttcttgaattctttcatggagacccgttcttctaagaatggagaagtacaacaagttccggctggtacagttgaatcaagtagtaaaggcattccagagggctcgggagataaaggtgatggttttcagggggtacaagttgaagatcttagaccagatggcaatgaagtacaaccgcagtttaacaacttccaagatcggattgactatgccgtgcaacatgctttgattaatcaatctggagtgctagtgtcacaccccgaagttctcctaccaagcctaaaatttaatttataa

SEQ ID NO: 24333 - DNA, 164 bp, Oryza sativa
  Clone ID: PAT_MRT4530_29326C.1
cccacccgcactgttttttgtacatatggagaacacacggtctcgggggggtttataataaaaaagggcgccaattacaccacaattgttccaaattctgcctagaaggtcaatagctatgagcaagcatcaagtgaaaatatatggctttatcgggaacaaac

SEQ ID NO: 24334 - DNA, 5679 bp, Oryza sativa
  Clone ID: PAT_MRT4530_29327C.1
ttgcaggatcaaatcaactggcacgatcacgaacctaaaggcaagcttttggacctgcactggagttaagcagatctcccaggcctcgtgtttttacatcaacacgcttttggcacgcccggtgggacagagtttttagcaacattctctcatggctgagaaaccaccaccatcaccgtcttcggctggtaaaggatttcctcctaagactgataatcaaaagtttggtgcatctaaagttaatgagggaaatattgttcccatcaatttaggtaaactgacaccggaacaaaagacagagctcgaacagatgatgcagcaaacacaacaccagttcttaaactcgttcatggagacccgtaagggaacagttgttcagaagtacaaaatcaaattagtaactgatgttcctgggatagattcttctaaggatggagaagtgcaacaagccccggctggtacagctgaaacgggaaaccaaggcattccagagggctcaggagataaaggtgacggcacctagggggtacaagttgaggatcttggtccagatggcaattcgacacaattacagttcaataatttcaaagattggattgactatgctgtgcaacatgctttgatcaaccaatctggagtgttagtcaatactttatcaaatatggtgaagtcaatggttgatggttcgatagctgagtatcaagccacagtaccagtttatttagcaggaggtgttttcccaaactattggcctttgattacagataatcagccagctacttctaatgtaccaccagttcagccgactgcgccgatattagctcctgcatttgctgcaccagcatcggcaccagggcaattgatcaatcctcggttgttggtgagagagcagccgcaacacgctggtcagaatgttaatcggctgacccaagaataggtcactgctatgtttttaccaactcagcctaccgttgatccagcacagcaccaaccgattcagcagacgccatcgaggcaacaggttatccagccgattcaacaacgcctggtaatcagccaaggcagcatgtcatgactcaagttgtccctgagaatttggttcataatgtgcaaccagatcaatcaatgtaatgagagagcagtttgggcttaagccgaaggatgctggaaatttgtatcggcatccataccatgagtggtttgagagagttcaattgcctaatcgatacaaagttccggatttttcaaagttcttgggggcaggacagtgtttcaacctatgaacacgtcagccgattattagctcaatgtggcgaggcatcggctactgacgccctgagggttagattgtttcctttgtctttatctggatcggctttcacatgattttcttctttgccatacaattcgatcaacagttgggccgatttggagaagtaattccatagttacttttatagtggggttcatgagatgaaattgtctgatttgacaacaatcaagcaaaggcacgatgaacctgtgcaagattatattcagaggttcaagaagatgacgaacaggtgctacagcttgagtttgaccgatgttctgctagccgatttagccttttagggtctgatagcttcgatcagggagaagttctcatctcatgactttgatactttattacatcttgcacaaaaagtgactttacatgaacagaggtttgcggaagccaggaagaacttcaaaaagattaatcatgtctgtccttatatctatgggtccaacgatgatgatgatattgactccgaagtagcagcagccgagtgggttagaagtaagaaggttataccgtgccaatgggtgaaaaagttatggaaaagaagagaggtatgactttgacattactaaggctgataagatttttgacttgttgcttcgggaaaagcagattcaacttcctgctggtcacattataccatcggctgaggaattgggcaaaaggaggtactgtaaatggcacaattctggttctcattctactaatgattgcaaggtgtttagacagcaaatccaggttgccattgaagggggaaagattaaaaaaagccgatgaaggttgatggtaacccttttcctgttaatatggtgcacacgtctggaagggcagccgatggagggaggagtaggaatttccagatgaatccggctagaattattaacaagtaccagaagaaatatgacaagaagcagcaggagaattattatgaagaagatgatgggatgaggctgccatctattgaagattgtcctggatgcagtaatgttgcagaaagttcaagccaatcttataatagaagcaatcggctaaggcaaacaagggttcctgttcatgaaagattgggcccagtaaattaagatcagggggatgatgaaggcggaaaaaatcaatggtgcccttctggtatttttacaaagaatcaggaaaggaggaaaacgaagccgaggcaggagtggcgtgttaagaaccaagctgctacagccgatgaggtcaaagccgacgaagcaaaaaggttggctaaagggaaaagtgttgtcactgcgtcggttaacatggttttcacgttaccagctgagtttggagctaatcaagccgatgttgacgaaattgaagaagcttcggctagattggttttgttgccagaacaagcaagttttgagaagccagaagggacagacaatcggcacttaaaaccattgtatacaaatggctatgtcaacgggaagccgatgtccaagatgatggttgatggtggggctacggtgcatttgatgcaatatgctacattcaagaagctgggcagaaatgcaaaagatctcatcaaaacaaacatggttcttaaagactttggtggcaatccatcggagaataaaggagtgctgaatgtggagctgacaattggcagcaaaaccgtccctacaacattttttgtcatcgatgggaagggttcttatagcttgttgcttggaagggattggattcatgctaattgttgtattccttcgaccatgcaccaatgcatgattcaatggcaaggcgacaagattgaaattgtgccagccgacaggtcagtaaacgttgccagtgccgatttagctctttgggagatggactgtattgattgcttatctggaaacatggcaagattagggtgtgcattgattttcgagacctgaacaaggctaccccaaaagatgaatatccaaagccagtagccgatcaattggttgatgctgcttccaggcacaagatattgagttttatggatggtaatgcagggtacaatcagatctttatggccgaagaagatatccataaacagcttttaggtgtcttggcacaatcggcttgtttgaatgggttgtaatgacttttggcttgaaaagtgctggagctacatattagagggctatgaattatatatatcatgatctaatcgactggttggttgaggtttatattgacgatgtggttgttaagtcaaaggaaatagaggatcacatagccgatttgaggacggtttttgaaagaacaaggaaatatggtctagaaatgaacccagcaaagtgagcttttggtgtatcggctggccagtttttgggatttttggttcatgaaagagggattgaaataactcaaaggagtgctaatgcaataaaaaagattcaaccttcggagaacaagacagaattgcaggagatgatcggcaagataaattttgtcaaacgttttatctctattttgtctggaagattggagccttttacaccattgttgagattgaaagccgatcaaaagtttgtttggggggtagaacaacagaaggtcttggatggtattaaggaatatcttagtgctccaccagttttgattcctccacaaaagggaataccttttcggttatatccatcggctggtgagaagtcaatcggctcggtattgatccaggaggttgaaggaaaagagagagttgtgttttatctgagccgtcggctgttggatgccgagacaaggtattctcctgttgaaaagttgtgcttgtgcttatatttttcttgcaccaagttaaggcattatctgctatccaatgaatgcactgtgatatgtaaagccgatgtggtcaaatatatgttatcagccccgattctgaaggcaagggttggaaaatggatatttgctttgacggagtttgatcttcggtatgagtcaccgaaggcaattaaggggcaagctatagccgattgtattgttgatcatcgtgatgattcaatcggctcggttgaagttgtaccttggactttgttttttgatagatcagtatgcactcatggatatggtatcggcttggttataatttcccctcggggggcaaattttgagtttgcttatactattaaaccttatgcgtccaataatcaggctgagtatgaagcagttcttaaggggttgcaattgctcaaagaagttgaagccaatgctattaaaattatgggtgattcattgttggtgatcagtaaattggctggagaatatgagtgcaagaatgatacattaatggtttataatgagaagtgccaggagctgatgaaagaatttcggctagtaaccttgaagcatgtatctcgggagtagaatgttgatgctaatgatttggctcagggggcatcaggttacgagccgatgatgaaagatgttagagtagaggttgctgcaataacagccgatgattggaggtatgatgtgcatcattatttgcataatccgtctcaatcggcttctcggaagttgcgctataaggctttaaagtatactttgctggatgatgagctctattatcagacgattgatggggtgttgcttaaatgtttaagtgctgatcaagctaaagttgcaatcggtgaggtacatgaaggaatttgtggaactcatcaatctgctcataagatgaagtggttgcttcggcttgcagggtatttttggcagaaaatgttgaggattgtttcaaatactacaagggctgtcaagactgtcaaaagtttggagcaactcaaatagcgcccgcatcggctatgaatcctatcatcaagtcgtggccattcagaggttggggaattgatatgattggtataatcaatccaccatcgagcaaaggacacaagtttattttggtggaaatcgattactttaccaaatgggtagagccgattcctttgaagaaagttgattctggggatgctatacaatttgttcaagagcatataatttgtcgttttggtattcctcagaccattacaaccgatcaaggctcgatctttgtgtccgatgagtttgttcagtttgcagatagcatgggtatcaaattgttgaattcttcgccgtattatgcacaagctaatgggctagccgaggcgtctaacaaaagtttgatcaaattaattaagaggaagatttctgattatcctcggcaatggcatactagattggccgaagcattgtggtcctatcggatggcttgtcatgtttatggacatgaggctgttttaccatgggaagttagaatcagctcgagaaggatggagttgctcaatggcaaatacttgaaaaaatactacccaagtgtttgggttaataca

SEQ ID NO: 24335 - DNA, 390 bp, Oryza sativa
  Clone ID: PAT_MRT4530_29328C.1
atgccgcctcccgctgctgtcgccgccgggtcaccgtctcccttcctgctagatctggtgaaggggatcggagggccccgccatgtcgccgcctcccctcccgtcggatctagcgaaggggagggcaccatcgctaccttctcttccgctggctctggcggaggagaggacatcgccgtgctgccgccggatcaccgcctcccctcccaccgaatctggtggaggggagggccttgccatgctgccgccatggtggatggaggaggaggaggaggaggaggagaggagaaggaagaagtggagagaaagagagaaggaataagaagagaggaggaagtggattgcggctgggagacagagttcgagggaaagagtgggaggaagagataa

SEQ ID NO: 24336 - DNA, 1608 bp, Oryza sativa
  Clone ID: PAT_MRT4530_29329C.1
ttggctatacaagatggtaagatcaagtttgataactccaagaggctgatgaaaattgagcgtaatccttttcaagtaaacatggttcatacaactgggaagacagccgataagaaggattatcggtccaagcaactcaattctgcaaggattatcaacaaatatcagaagagacatgatcggcatgaagagaaattttatgaagatgatgatagctttgacccccactggagttgtgaatttttcagattttgctggaatgaagaacaagcagtttttgagaagccggaagggacagagaatcggcatcttatgccattatacattaataacggctatgtcaatgggaagccgatgtccaagatgatggttgatggtggagctgctgtgaatttgatgccatatgctacattcagcgacaagattgagatcgtgccagccgacagccaattaaagatggagaacccaagttgttattttgagggcgtcgtggagggttcaaacgtctacaccaaggacacagtagatgatctcgatgacaagcaaggacagggtttcatgtcggccgatgatttagaagaagttgatataagtccgggtgataggccaaggccaacatttatcattccaattatcaagaagaacggcaaagtcagtgtgtgcattgatttccgggacttgaacaaagctaccccaaaggatgagtatccaatgccagtagccgatcagttggttgatgctgcttcagggcacaagatattaaattttatggatggtaatgcaggctacaatcagatctttatggccgaagaagatattcataagacagctttcaggtgtcctggtgcaatcggcttgtttgagtgggttgtaatgactttcggcctgaaaagtgctggagctacatatcaacgggctatgaattatatataccatgatctaatcggctggttggttgaagtctatattgatgatgtggttgttaagtccatgaaaatagaggaccacatagccgatttgatgaaggtttttgagaggattaggaagtatggcctgaagatgaatccgacaaagtgtgcttttggcgtatcggttggccagtttttgggatttcttgttcatgagagggggattgaaataactcagaggagcattaatgcgattaagaagattcaacctccggaagacaagacagaattacaggagatgatcggcaagataaattttgttagaaggtttatctctaatttgtttggaagattagaaccttttacaccattgttgcggttgaaagccgatctaaaatttacttggggggcagagcagcagaaggctttggatagtattaaagaatatcttagctctcctccagttttgactatatctatcggccgggtatttttggccgacgatgttcgaggattgtttcaaatattacaagggatgtcaagattgtcaaaagtttggagcaattcaaagggcaccagcatcggctatgaaccctatcatcaagccatggcattcagaggttggggaattgatatgatcggtatgattaatccaccatcgagcaaaggacacaagtttatattggtggcaaccgattaa

SEQ ID NO: 24337 - DNA, 2697 bp, Oryza sativa
  Clone ID: PAT_MRT4530_2932C.1
atgggcgtccatgcatcgcctacacggctggcctattatgccgccgctgttgggcgtctacgacttcaccaccggcctgcctccgtcgccgccgactggtgtccccgcctatacggtcggttggtcacaccaccgttgatgggcatcgtcatcttcaccgccggcctgcctccgtcgccgccgagtggtgcctccgcctacacggctggcctattatgccgccgctgttgggcgtccacgacttcaccaccggcctgcctccgtcgccgccgactggtgtccccgcctatacggtcggttggtcacaccaccgttgatgggcatcgtcatcttcaccgccggcctgcctccgtcgccgccgactggtgcctccgcctacacggctggcctattatgccgccgctgttgggcgtcttcgctttcaccgtcgaccgccttcgtcgccgccgactggtgtcttcattgttattgatggacgactttgttcccacattggccacttctgccatcaccaaggggaatattacaaagctaatcagaacatcaccaccggctcgcctcgaccgccgccgactggtgtttccgcctgcacggctggcctattatgccgccgttgttgggcgtctacgtcgtcaccgaccggcttgccttcgccgctgccgactggtgtttccgcctgcacggctggcctttatgccgccgttgttgggcgtgtacgtcttcaccgaccggcttgccttcgccgctgctgactggtgtttccgcctgcacggctggcctttatgccgccgttgttgggcgtatacgtcttcaccgaccggccgcctcgtccgccaccgactggtgcttccgcctgcacggctggcctattatgccgccgttgttgggcgtctacgtcttcaccgaccggcttgccttcgccgctgccgactggtgtttccgcctgcacggttggcctttatgccgccgttgttgggcgtctacgtcttcaccgaccggcttgcctcgtccgccgccgactggtgtttccgcctgcacggctggcctattatgccgccgttgttgggcgtctacgtcgtcaccgaccggcttgccttcgccgctgccgactggtgtttccgcctgcacggctggcctttatgccgccgttattgggcgtctacgtcttcaccgaccggcttgccttcgccgctgctgactggtgtttccgcctgcacggctggcctttatgccgccgttgttgggcgtctatgtcttcaccgaccggccgcctcgtccgccgccgactggtgcttccgcctgcacggctggcctattatgccgccgttgttgggcgtctacgtcttcaccgaccggccgcctcgtccgccgccgactggtgcttccgcctgcacggctggcctattatgccgccgttgttgggcgtctacgtcttcaccgaccggcttaccttcgccgccgccgactggtgtttccgccggcacggctggcctttatgccgccgttgttgggcgtctacgacttcaccgccggcttgcctccgtcgccgccgagtggtgcctccgcctacacggctggcctattatgccaccgctgttgggcgtctacgacttcaccgccggcctgcctccgtcgccgccgactggtgtcctcgcctatacggttggttggtcacaccaccgttcatgggcgtctacgacttcaccgccggcctgcctccgtcgccgccgactggtgtcctcgcctatacggttggttggtcacaccaccgttcatgggcgtctacgacttcaccgccggcctgcctccgtcgccgccgactggtgtttctgcctacacggctggcctattatgccgccgctgttgggcgtctacgacttcaccgccggcttgcctccgtcgccgccgattggtgcctccgcctacacggctggcctattatgccgccgctgttgggcgtctacgacttcaccgccggcttgcctccgtcgccgccgagtggtgcctccgcctacacggctggcctattatgccaccgctgttgggcgtctacgacttcaccgccggcctgcctccgtcgccgccgactggtgtcctcgcctatacggttggttggtcacaccaccgttcatgggtgtctacgtcttcaccgaccggccgcctcgtccgccgccgactggtgtttccgcctgcacggctggcctattatgccgccgttgttgggcgtctacgtcttcaccgaccggccgcctcgtccgccgccgactggtgtttccgcctgcacggctggcctattatgccgccgttgttgggcgtttacgtcttcaccgaccggcttgccttcgccgcctccgactggtgtttccgcctgcacggctggcctattatgctgccgttggtgggcgtctacgtcttcaccgaccggccaccgcatccgccgctgactggtgtcaccgcctgcacggctggcctgttataacgccaactgatgctatcttcttcacggctgactacatcgctgtcactactaataggcatcagtatcttcaacacaagctgcctacgtttgccatggctgccgactggtttcttcacttccatggctgcatgattctgccagtgttgattggcctattatgccgctgttgttgggcatctacatcttcatcgccggtcgtctcgtctgctgctgactag

SEQ ID NO: 24338 - DNA, 756 bp, Oryza sativa
  Clone ID: PAT_MRT4530_29330C.1
atggtgttgatgtcctcatcagaattgatgaaagaattttggctggtgactttgaagcatgtatctcgagaacagaatgttgaagctaatgatttggcccaaggggcgtggggttacaagccgatgatgaaggatgtcaaaatagaaattgccacaatagcagccgatgattggaggatatttttggccgacaatgctagaggattgtttcaatttggagcaattcaaagggcaccagcatcggctatgaatcctatcatcaaaccatggccatttagaggttggggaattgatatgatcggtatgattaatccaccatcgagcaaaggacacaagtttatcttggtggcatccgattactttaccaagtgggtagaagcgattcctttgaagaaagttgattctggggatgccatacaatttgttcaagagcatataatttaccgatttggtattcctcaaaccattacaaccgatcaaggttcgatcttcgtgtctgatgagtttgttcagtttgccgaaagcatgggtatcaagttgttgaattcttcaccatattacgcacaagctaatgggcaagccgaggcatctaacaagagtttcatcaagttgattaagagaaagatttttgattatcctcggcaatggcatactcgattggccgaagcattgtggtcctatcggatggcttgtcatggttcgatccaggttgttttaccatgggaagttagagtagactcgagaagaacggagtaa

SEQ ID NO: 24339 - DNA, 894 bp, Oryza sativa
  Clone ID: PAT_MRT4530_29331C.1
atgcagaaggctagtgatcgtgccgatcataccagcgtgtgcaaccccacttatacttggcaggagatcccagatgacccaccattgcctggccatgatagtgatgaaggagaaaccactctgcaagctaggattcaacacttgttcagtgaatccaagaagttgtctatcaatgttgagcatataatcgcccaagtttcacaagcggtgaacatgaactgtggcgcagaggaaaactccctgctcaaagaatttgatgggaacaaccccgtgaccctgccgaaactttcagatgttgtttcagcccgtggtcttaaacatgtctggtctgagatcaaagcgtttcaagaattactcaagcaacgcccggtacagagagatattatacttaaagagataagcatcaacctggatctgtggagtaacttcttctcaaagccacctcctgaaataattaggctaatggaagggttacgcgtgcttaagggagcgctatcggaggaagcgccactgccaactactaatcttgttctcgcacaacaggaccagattaaccaacacgtcgatctgctccgcactgctcaagacaaggtggagtcatcgtgcgtcgctttggaggcactgacgagtcaatataatgtagagcaagcagtagaggagggcaacaagagagagtgctcacgacaagcacggaaagttagagcagagatagcagtgttgcaagcaagacttcaacaagtggaagatgcccactccagtgcacaacaccgacaagatgttgtaacagagaacttgaactcccatctcgagcgacatcgtcaagaaaatgagcgaaagtatggcaatgtcttggcagcagcctgtagccgggttggttgctcttcttcaatctga

SEQ ID NO: 24340 - DNA, 607 bp, Oryza sativa
  unsure (1)..(607): unsure at all n locations
  Clone ID: PAT_MRT4530_29332C.1
gttcatccttaggcnctctncccttatttctgacaccttctgcttaccgaggaccgcaatcgtcgcactgtgcgtccttgtctgtcgctacgcttgctttagagcctgagcgtgctcgggacctctacttccagacggttgttccangatcctgttcctgaggctgttctgagcagtggactgtgcttgctagctgcctagttattgccgttgccggttntgcttactgattgtgatctttctttcgacgtgatgtccgtgcatcctttgcatgtaccctnctggttcctatgcggactttcttctcccttttgtagtcnttgtccgatcgtagcccctactgttttggccctgagtctcatgccgagtcttttccctcctattgggccantcgatgtccgaggctgatatttggaatncctgtatcatcggttcgaggtctagtcatccgctggtggaactccatcatttcggttccccccttgtaattggagggtttacattttgcccccccctttggggacttttaaatcaattgggttcattaccatggttccctgtgtgattgttatcgttcaantatacnccacccccgcccctaggtgtt

SEQ ID NO: 24341 - DNA, 1006 bp, Oryza sativa
  Clone ID: PAT_MRT4530_29333C.1
ttcctgcaccccgaggattgtttcaaatattacaagggatgtcaagattgtcagaagtttggagcaattcaataagcaccggcatcggctatgaatcctatcatcaagccatggccatttagaggttgggggattgatatgatcggcatgattaatccaccatcgagcaaagggcataagtttatattggtggcaaccgattattttaccaagtgggtagaagcgattcctttgaagaaaattgattctggggatgctatacaatttgttcaagagcatataatctaatgatcgatttggtattcctcaaaccattacaaccgatcaaggctcgatctttgtgtccgatgagtttgttcaggttgccgatagcatgggtatcaaattgttgaattcttcaccttattatgcacaagctaacgggcaagccgaggcgtctaacaagagtttgaccaaattgattaagagaaagatttctaattatcctaggcagtggcacattcgattagccaaagcattgtggtcctatcggatggcttgtcatggttccatccaagtccctccttataaacttgtttatggacatgaggctgttttaccatgggaagttagaatcggctcaagaagatcggagttgcaagacgatttgacagccgatgagtactataatctcatggccgatgaaagggaagacttggttcaatcaagattaagagcccttgcaaaggttaccaagtataaggaacgggttgctcgacattataacaagaaagtagtgcctaagtctttttctgagggagaacttgtatggaagttgattttgccgaatggaactcaggagagcaaatttggcaagtggtcgctgaattgggaatgactgtttcaaatctataaagttgtgtctaaaggagcttacatgttgcaaggacttgatgacgaagtttatggacgagcgctaaatggcaaatacttgaagaaatattacccaagtgtttggattaatgca

SEQ ID NO: 24342 - DNA, 2430 bp, Oryza sativa
  unsure (1)..(2430): unsure at all n locations
  Clone ID: PAT_MRT4530_29334C.1
gaagcaagatgaaaacagtgcttttattaagagataaatatctacacacaaccgaagcggctcanagagctttgggaacccgaaagctaaaccttctgcaggctaaaaactctgccgatttgttacttatgtactttccagaggagctccatagccgtaggagggaaagacgcttcaggcagcagcagacgaagtagcagctgccactgtcttgttgagcagcacgcggagagcgtctgcagaggtcaccggagggctgcacttgaagtcctggcagacgtgcgccaccgctggcttctccggtgggctgctacgtgccatctgcgcgatgatggcgttgttgctctcccagaatcccatttcctcggtgttcctggggtctatttggatcacagttctatttggatcatatgtcgaaaatgcggcagcaaccatgtcacggaattcagtcgattctttgttccccaccagaaccacctgcttcctggacgggacagatagcatgtctgccgcacaacacatcaacggcagtgctataccaagttccctcagcctcgtctggaagacagccaggagatgctcaacattgcatttgtaaccatcggattttgctgcatcaaatatactggacaatctgatcaagttgatagcagctactgagttaccagaaggctccgcaccatcataatcttctttaacacgcagaagaacagaagggtcttctccaggagtattgaaatagccaccaccttgtttgtccaagaacaattcatcttgaaggtgagcagcccacataagccactctatcttaccaccatactcatagagatccagcaacccgtttattaggaaagcataatcatccaaaaaacctggtgcttttgctggcccatttcggtaactatgattcagcctgtttgagctgctatcatatagtttttcctttataaaacgtgctgccttttctgcaactccaagatattcctctggcttatcatccaaatgtggccttggcctttttgaccggacatcaaacaacttatgccgacaatcccccaggatttgagcatattcatcaacagacttgccacactttgatgccatcaaagaagcttgttttctttctattagcacatttttacccttgaactcatcgtgaggatcactcatccgcgaaaggtcgcaattgccagatgatttgacatagtaatgattcttgaatagctctgaattctccccaagtgtgtcttcaatctccttattagtccacacatagaaagctccctccctttttcttggagcaccatcatattctgcactatcagcatcttctgctgagtaaatttcaccttcttctccgatcatgtctctcctcaagtaatcaagtatatcacgtgcaactgaagaataatactcatctcccgtgatcagaaatgtatctagatatacattagctatctgtccttggtcgtacaacatcttctcaaaatgcgggacatgccagcactcatccacactatatctatgaaagccacctccaacgtgatcatgaactccaccccttgccatacattgcaatgtatgagttatcatcttcattatattttgggattcactcacctgtccagattccaaatgcttccgaaatttatataacattacacaattctcaacaggtcttggaaactttggagcagagccatatccaccgaattttggatcataactgcctgctaactgcatagatatgagctgagaatctgcaattgaagaccttatattatttttatccctatttttgaacctcgtcttttcaacacaattatccacagaaacaacagccagatcatttggcatatcttgagagctagctttagcagataatgcatctcgcagttgtttgatgaccacatttcctgtcttctcaagcgcatcgcgtttagtttcccaggcctccttaaccttccttaaaatagtcttgaatcctgttcttccgtacttatcatctggaggaaagtatgtaccacccatcaacggtttcaaattaggagacaaaaagacactcaaaggccaaccaccaccgccatacagtgctgatacatatgtcatgtacaccttgtcaacatctggtcgctcttcacggtccaccttgatgctaacaaacccatcatttagaatctttgcgatttcatcattctcaaaagactccacttccatcacatggcacttcatacttgatagaaagatgggaacgtcctttctgcgagccttctcgaaagcctcttctccccaaggataccaatcgaccgggttgtacgcgtgctgcagcaggtaggggctgtgctcggcggcgaggcggttcgggctccgccccacgccgtgccgctcccctgacgacgaggaggaggacgcgccgcccgacgacgacat

SEQ ID NO: 24343 - DNA, 1572 bp, Oryza sativa
  Clone ID: PAT_MRT4530_29335C.1
gattgaaattgtcacgcttggccattaagcatggcaggtttatccatacaagttaattacatcacattacagcaatctcacagcacatgaggttggtaagtcgtcgagaggtaaaagcagaaagaaatgaaggaaaatgagttacatggcaaaggaggcccaaggaaaaatggagctacatgagtagaccatagtctttgctgcgatggacctggaacatttcagctcttcgaattacaccatccatctcgttcttggtcctgtcgctacaaaggggcctgttttgaaggaccgtttggcgaaacttttcccagaacattcaaagccttcatccgttgcagctctttcccttcctccactaataagtgaattgcccttttctccagatcaattgcatgcatgcttcgatcagccgccgagagggacctaagcattcgcatataaccctcctgagttgaccgatcacagctctccaaatatgtctgtaaccgattaaatctcgcattccagtattgattgcttgacttatgggtatcatcttgaacggtagtaccaggagctacaggaggctcatttttcttgttcacaatatgttcatttgttttttcaggagatttaggagacactatgcctccagattcagcaacagaagatggcaattctggcttattggtctgatcatgttgcacagcaacagaagatggcaattctggcttattggtctgatcatgttgcacagcaacagaagatggcaattctggcttattggtctgatcatgttgcacagcaacagaagatggcaattctggcttattggtctgatcatgttgcacagcaacagaagatgacaaatctggcttattggactgatcatgttgcacagcaacagaagatgacaattctggtttattggtctgatcatgttgcacagcaacagaagatgacaaatctggcttattggactgatcatgttgcacagcaacagaagatgacacttctggtttattggtctgatcatgttgcacattttgctgtgtctcctgctcttttgttttgtctcttccattacccttcacctcctgagaagaactcactttactatggtcattttccacttttcttcgtacataaacattatgatacccaggacttgaaggagcatcagaccgtttggtgcccacggtctttccaggctctgtcgcagtacctttatcctttggcagcggtgaagtgccctgagacatatttacaatgtctgcacctttctttggcagctcacgcgatgttactttcttcactgtggatgctagttgcttgtcactagctggcatggctattggctcctgctacacttttctacattatataatcgaagttaatggaacctgagatcggcggtggaggcgcgggggtggtgcccacggtggggtgggcggaggaggaggcgacccggcggtgcggcgaggcgaggcagggaggcgggacgaggtagatgaggagggggagatggtggagaggcgcccctcgtgcgggacgccggcgacgagcggcggcgagaggcagagaagagaa

SEQ ID NO: 24344 - DNA, 250 bp, Oryza sativa
  Clone ID: PAT_MRT4530_29336C.1
atgggaagacagatcggggagatcttatcataggtggactttcacaggacacaagggaggggggcaccagtccctctaggggaagggagacaagcaaggccatgttgccatgaatgcctcaatgttaaggattgggtttagggatgcacaaaatttcgggggtttattgagccctttagttgcctctgctaccccgaccgtggaaaccacgcccggcaccttgggcaccaacttgaaggtactgcctaac

SEQ ID NO: 24345 - DNA, 475 bp, Oryza sativa
  Clone ID: PAT_MRT4530_29337C.1
aaacaatcttggaggcagggtactgatcaccactcgcaaaaaggatgttgctttcttagcagatcacaattgtgtagttgagcttgaagctcttccccatactgaagcatggcatctattctgtaagaaggcgttccgtagattggaagataaaatgtgcccagaaaatcttagaccttgggcagagaaaattgtgaccaagtgtcaaggattgccactggctatcgtagccatcggaagccttctatcataccgtgaattcgaggagcaggagtggaaactgttctacaaccaacttggctggcaattagctaacaatccagagctcaattggattgccaatattctaaacctgagcttaaatgatctcccaagttatctgagaagttgttttctatattgcagcctctttcctgaagactgcaggataaaagaaaaatgcttgttgagttatggattgcggaaggtcttgtag

SEQ ID NO: 24346 - DNA, 436 bp, Oryza sativa
  Clone ID: PAT_MRT4530_29338C.1
gtccgattggggatgggttgatgggagcacctatatgtagtcgattcggaaaagtttttggaatgaatgttgctcggacagcactgtgtttatcaattaattttgccctgaacaatagtcaattaaaggttgaattggcaaaactattacagaatgaagattatgagatgtcagctcttattgagaagtacgattctgaaaaaacgagtgcatcgaagaagagaaagggaaggggtgttagcagttcgcaaatgtcaaggtcaccagtgaagagaaaggcgggtggcagttcttcgtcaagaagggagaagggtgttgccagttcgcaaatgtcaagtttaccaagcaaaaaaaagggcggtggcaattcttcgtcaagagcgatataaaagaggctttggtttgatggagatgggcttaagccggttgggctgat

SEQ ID NO: 24347 - DNA, 1254 bp, Oryza sativa
  Clone ID: PAT_MRT4530_29339C.1
atggcgaagactatgggggcgaaggcggcgaagggtgaagagtcgtgttgggaccccgcaagtccaaatgcgtcctgggcgaaggctaaatggcgtgtattggcttcgtgtggtgatgatgacagtggaagtggagaggatgagaatgaaggaagtgatgatatgcacattgatcccttcatccaatttgttcataagtggatttcttggagagacatcaatgagactccagagtttgagagcttacaggatctcttcaagactattggcattgaccggattgtgaccctaaagcaagactacaatgaagatttgatccggcagttttatgctacagtgtgggtggctggagactatagtgagatgaagtggatgtccgacaccctccagtgttctatctctaggaggcaattccggcggctcctcaatattcgcttggactttggagatgacttgcatgaggagcacacccataattcgctctccatagactatctctctcagttttatgaagatggagcacggtacactcatgggaaggttgtcggcttgaggactatccccagtgtggtcaacaggattatgagagccactatcctccctcgccttggaaacaatgatgacattaggggagtggcttggcacgtcatggatgcaatcattcagggtcgtcagttcgacattgtgtctcttatgatgcaagagattgccatctccaaggggactttctctcagggaatctattatgccccttacatcatgaggttgattcaagataagcttggggctgccgagccaaatttgaagaagcacaagcagtacaagccccgccttcagcttggagctccccgtgctcctagggcggcgccctcctctcatcctggagctagctcaagctcagcacctcctcctccccatgggtacgatccaaatgctttcttccatccacagtatgcttattttggaatgcaacccatcgaatacttcaacccggtacttggggctattaataccctaagtaaaagcattcaacacttgtctaccgggcatgaagctttgcatgaggatgttcgtggcttgcgcaccgatgttggagacttgaatgcttccatggggagattgcacactcgagtgggtacattggattctcgagtccaaatgttggagagctcccaagcatttgtgtatcatcgtcgtcgtgatgctcatcatccttccacttcggcgcgtcctccttctcctccacaagaatga

SEQ ID NO: 24348 - DNA, 2700 bp, Oryza sativa
  Clone ID: PAT_MRT4530_2933C.1
gtcgcgaggcgagagagagcacatgcgtgcgcccgtgccggtggcgtcgtcgccgactggtgtttccgtctgcatggctggcctattaagccgccgctgttgggcgtctacgacttcaccaccggcctgcctccgtcgccgccgactggtgtccccgcctatacggtcggttggtcacaccaccgttgatgggcatcgtcatcttcaccgccggcctgcctccgtcgccgccgagtggtgcctccgcctacacggctggcctattatgccgccgctgttgggcgtctacgacttcaccgccggcctgcctccgtcgccgccgagtggtgcctccgcctacacggctggtctattatgccgccgctgttgggcgtctacgacttcaccgccggcctgcctccgtcgccgccgattggtgcctccgcctacacggctggcctattatgccgccgctgttgggcgtctacgacttcaccgccggcctgcctccgtcgccgccgagtggtgtctccgcctacacggctggcctattatgccgccgctgttgggcgtctacgacttcaccgccggcctgcctccgtcgccgccgagtggtgcctccgcctacacggctggcctattatgccgccgctgttgggcgtctacgtcttcaccgaccggccgcctcgaccgccgccgactggtgtctctgcctacacggctggtctattatgctgccgctgttgggcgtctacgacttcaccgccagctggccttcgccgccgccgactggtgtctctgcctacacggctggtctattatgccgccgctgttgggcgtctacgacttcaccgccagcctgcctccgtcgccgccgagtggtgcctccgcctacacggctggtctattatgctgccgctgttgggcgtctacgacttcaccgccggcctgcctccgtcgccgccgactggtgtcttcattgttattgatggacgactttgttcccacattggccacttctgccatcaccaaggggaatattacaaagctaagatccagatccagatatgcataaaagggattcatggctttaagcttatctcttacgctccaggaatggatcagtcagaacatcaccaaccggtcgcctcgtctgccgccgactggtgcttccgcctgcacggctgacttattatgccgccgttgttgggcgtctacgtcttcaccgaccggcttgccttcgccgccgccgattggtgtttccgcctgcacggctggcctttaatgccgccgttgttgggcgtctacgtcttcaccgactggcttgccttcgccgccgccgactggtgtttccgcctgcacggctggcctttatgccgccgttgttgggcgtctacgtctttaccgaccggcttgccttcgccgctgccgactggtgtttccgcctgcacggctggcctttaatgccgccgttgttgggcgtctacgtcttcaccgactggcttgccttcgccgccgccgactggtgtttccgcctgcacggctggcctttatgccgccgttgttgggcgtctacgtctttaccgaccggcttgccttcgccgctgccgactggtgtttccgcctgcacggctggcctattatgctgccgttgttgggcgtctacgtcttcaccgaccggccgcctcgtccgccgccgactggtgcttccgcctgcacggctggcctttatgccgccgttgttgggcgtctacgtcttcaccgaccggccgcctcgaccgccgccgactggtgtttccgcctgcacggctggcctattatgctgccgttgttgggcgtctacgtcttcaccgaccggccgcctcgtccgccgccgactggtgcttccgcctgcacggctggcctttatgccgccgttgttgggcgtctacgtcttcaccgaccggccgcctcgaccgccgccgactggtgtttccgcctgcacggctggcctttatgccgccgttgttgggcgtctacgtcttcatcgaccggccgcctcgaccgccgccgactggtgtttccgcctgcacggctggcctttatgctgccgttgttgggcgtctacgctttcaccgaccggccgccgcatccgccgctgactggtgtcaccgcctgcacggctggcctgttataacgccaactgatgctatcttcttcacggctggctacatcaccgtcactactaataggcatcgtgttgattggccttaccatcttcatcgccggtcgtctcgtctgctgctgactagtgccctcgcctctacatctggtttatacagctaccactactgatggacatcatcgtcttccgccgccgacttgtgttatgccgccgccgactggtgcttttatcttcacaactgcgcgttttcattaccggttcacttcatcacggcaacacaactttgtcatcatggtggagcgacttcatctttattatcttcggcaccggcaaactctattggtgttacttcgcaagttttgctacttcaccaaccacgacgtctttgtaaacctcgacatctcggcatgcgatgccgtgttattttactacaacaagtggctcttcaatattcaggatttctacttggacatcttcaacacatatcttcaatcaagcaatgactattcgacaacaagaagctacagtctcgactctatgttcagttgtttcccaac

SEQ ID NO: 24349 - DNA, 410 bp, Oryza sativa
  Clone ID: PAT_MRT4530_29340C.1
ttggagctccccgtgctcataggacggcgccctcctctcatcctagagctagctcatgctctgcacctccgcctcttcatgggtatgatccaaatgctttctttcatcctcagtatgcctattttgggatgcaacccaacgagtacttcaacccggtacttggggctattaataccctaagtgaaagcattcaacgcttgtctaccgggcatgacgctttgcatgaggatgttcgtggcttgcgcacggacgttggagacttgaatgcttccgtggggagattgcacactcgagtgggtacattggactctcgagtccaaatgttggagagctcccaagcattcgtgtatcatcgtcatcgtgatgcttctcatccttccacttcggcgcgtcctcctttttctccacaa

SEQ ID NO: 24350 - DNA, 238 bp, Oryza sativa
  Clone ID: PAT_MRT4530_29341C.1
atgacctcatcctcccagtcccagtcccagtccccacgatcgagtatcggaaaaagaaaaatcagttcgcccacaactccccatgcccccacggcgcacgagtcgctccccgcttccgctcttctcggctctcgcttcctccgtggccgcgccgtccgcccccaaccggaccgcttcaccttccctctcctgctcacctccctgtcctcccctcggcgacctgagagcttcgatggcg

SEQ ID NO: 24351 - DNA, 161 bp, Oryza sativa
  Clone ID: PAT_MRT4530_29342C.1
tttttggtttttgttcccatttgtgttctatttattttttttctaaaaagaaaacccaggggcgaacaccacgaccaacggggacagaatgcgagtaacaaaggcccaacatgcgcaatctgtaccacgggggaggcgtacacaataggaaaaggtgcggg

SEQ ID NO: 24352 - DNA, 417 bp, Oryza sativa
  unsure (1)..(417): unsure at all n locations
  Clone ID: PAT_MRT4530_29343C.1
caaaaccccgcaaaaaacgcgcaatcccggcggccatgacgcgctcgcccgccgcctgctgcacgcgagctcacccgccgccgccggagagncctgggggtgctggcctgccgcctcgcctcccgcgcggtggtccgcttcggtgtgccagaggcgggccgcttcctccgntcgctcctcaccaacgacctcctcctctcgtcgtcgtcgcagcagaggtacgcgnccacggccaacgcgcccgcgcgggcgctgncgccgggtaacgcggcgctgctgacgncgcagggaggttcctctacgacctcttcctctaccggccgccccaacgtcgnagttgctcgaccgaatggctncgggccgttgaccgnggagaggcccaaggggaaacaggagggattagggggaaggacgagc

SEQ ID NO: 24353 - DNA, 225 bp, Oryza sativa
  Clone ID: PAT_MRT4530_29344C.1
atggcgctggtggccccgactagcgagcagagacatcggcctcgtcgagcagcgggagaagcgacagcctccgcaccggcgacaagcagtggcctctgcctcgtcaagcggcgggagaggcaacggcgtcggcataggtggcgacgatcccgctgtgcagctgccttggcctcgggcaagcaacggcggcatgtcttcaacatgccgtggattttgttgacttag

SEQ ID NO: 24354 - DNA, 1140 bp, Oryza sativa
  Clone ID: PAT_MRT4530_29345C.1
gtctttctctccatttttcctctcttcctcctcatcatcttcaacgtcgaagatgctgatgtagccatcttccatagcaatgtatgcccgttgactagggcaatccttctgcacatggccaaatccatggcagcggtggcactgaatgctgggcgtgcatcccgtcaaagcgacggacgaggcactcttgaaactccggacgcaactggtcgcttgcttgctggtgggggtgtccggaaagagatgggcttgggcagccccaaagatggcttcgcccgcggcatgggaatagacactgtggtgtacatgtgctcctctgcctccgcctcctcctcccgcaaggacgccgccgttgtcggcctcggcaggcgcagcgtcctcgccgcgtcgttccggagcgcgagcaccagcaccccgctcatccccgtcggcgtcgacaaggcgccgaacattgaccccaacctctacttcgtcgccatcaccggcatcaaggtcgccagcggcgagatcgtcagcgacaaggccgccgcgatcatgaccaccgtttccaccctttacacgttcctcaacccggtgctcttcgaccacctcaagaagcagctgccgccgctagcagacaagggctcatccgtactgtgctacacgaaggacaccgagctcccggcgatcacgctggtgttcgccggcaaggacgccgccatgaagctggcgccggagcactactcgtacaagaggagcgatggcgccgtgtgcctctccatcctgcgctcgccgctgcacggcggggtgttcgtcatcggcagaaggggcgggcccaggattttcaacttggtgaggtatcgacttcgtcacctcgtcgtcgacggcagcggcaggtcggtggccggtggcggcgacgcggcgcggggccctgcgcccctgcgactgcgggctagcaggctgccgtggtcggtgcctcggtggagcgtaggcaggcaggcaggcgccaggcggcaactcgtcaccgcggcgccgcaccggcgggcggcggcggctggagcatggaggcgggcgccgcggggggatgccggatgcgccgagcgcccgagccgccaaggcgccgacggcgccgtgcgcgcctgcgccgcggccgaagggtag

SEQ ID NO: 24355 - DNA, 397 bp, Oryza sativa
  Clone ID: PAT_MRT4530_29346C.1
ggcccggactgaccggctggacccacgcacgcggcttcttttatcacacttcccatcctagacttaacggacccatctagagtccccgcatcacagattccactccacgcaaaccctacgcctccttcgctcgctgaacactgggctcggttacccatccatggctggcatgaagttcttcgtcgtcctcaactggaaacgcaatgggacaggggaggacgcgacgaacatcgtccgacgctcaacgagatcctggtgccctccgaggacactggcaggagaacccgagcccgtccttacgttcctgccggagagacagggttgatccggccggacttctgacccggcccgcagaactgctggctgcgcaccgacttgtgcctacactggggagatc

SEQ ID NO: 24356 - DNA, 306 bp, Oryza sativa
  Clone ID: PAT_MRT4530_29347C.1
atgcccaagaccactgccgccggcctcctctccaagtccgcgtcctccatgcccaagaccgccgccaccggcctccgctccaagtccgccgccgccggcttcctctccgccaagtcctcaagatcgatgccaagtcctctccaagtccgccggcttcctctacaccaagtctgcacaccgccacctacaagatccagaggccacgtcgaccccgagcccagccgtcgtcgtcaacaccgacgttgcctcttcttctccctggaatgcatgtcttccctcttctcctttgaaatgccatgtgtgtag

SEQ ID NO: 24357 - DNA, 849 bp, Oryza sativa
  Clone ID: PAT_MRT4530_29348C.1
atggttttcacgttacatacggaatttggagctaaacaagccgatgttgatgaagttgaggaagcttcggctaggttaattttgtcaccagagcaagtagtttttgagaagccagaagggatagagaatcggcatcttaagccattgtacattaacggctatgtcaatgggaagccgatgtccaagatgatggttgatggtggggctgctgtgaatttgatgccttatgctacattcagcaagctgggcagaaatgctgaagatctcaacaagacaaatatggttctcaaggattttggtggcaatccatcagaaacaaaaggagatttgaatgtggagctgacagtcggcagcaaaaccgtccctacaacattttttgtcatcgatgggaagagttcttacagcttgttgcttgaaagggattggattcatgctaattgttgtattccttcaaccatgcatcaatgcttgattcaatggcaaggcgacaagattgagattgtgctagccgacagccaattgaagatggagagcccaagttattatttcgagggcgtcgtggagggttcaaacgtctacaccaaggacacagtagatgatctcgatgacaagcaaggacagggtttcatgtcagtcgatgatttggaagaagttgatataggtccaggtgataggccaaggccgacattcattagtaaaaacttatctcctgaattcagaaccaagttgatagagctgttaaaagaatatagagattgctttgcttgggagtattatgagatgccaagattcagccgatcgattgttgaacatcggctacctatcaaaccaggggttagaccatactag

SEQ ID NO: 24358 - DNA, 866 bp, Oryza sativa
  Clone ID: PAT_MRT4530_29349C.1
agcaaacagtttttgtgaagccgaaagggacagagaatcggcatcttaagccattgtacattaacggttatgtcaatgggaagccgatgtccaagatgatggttgatggtggggctgctgtgaatttgatgccatatgctacattttggaagctaggcagaaatgctgaagatctcatcaagatgaacatggttctcaaggattttggtagcaatccattagaaataaaaggagttttgaatgtggaactgacagtcagcagcaaaaccgtccctacaacattttttgtcatcgatgggaagggttcctacagcttgctgcttggaagggattggattcatgctaattgttgtattccttcgaccatgcatcaatgcttgattcaatggcaaggcaaaaagattgagattgtgccatccgacagccaattgaagatggagagcccaagttattattttgagggcgtcgtggagggttcaaacgtttacaccaaggacacagtagatgatctcgataacaagcaaggacaggatttcatgtcggccgatgatttggaagaaattgatattggaccaggtgatagaccaaggccgacattcatcagtaagaacttatctccagaatttagaaccaagttgatagagctcttaaaagaatacaaagattgctttgcttgggagtattacgagatgctaggactcagccgatcaattgttgaacatcggctacttatcaaaccgggtgttagactgtaccagcagccaccgagaagatgcaaagccgatatgctcgaacctgttaaggctgagattaaacgattgtatgatgctggttttattcgtccttgtcgatatgtcgagtggggg

SEQ ID NO: 24359 - DNA, 3306 bp, Oryza sativa
  Clone ID: PAT_MRT4530_2934C.1
atggcatcgtcctcaagcacggcagccaccaatccgttgcaaggtcatccaatctctgagaagcttgggaagacaaatcatgccctctggaaggtgcagatcagcgccgccataagaggagcatggctacaagggcatctcaccggcgcaacaaaggagccggcgcctgaaatcagcgtcacagctgatggcgcaaccgtgaagaagcccaacccggcgtacgacgactgggaagccgctgaccagcaagttttgggatttcttctctcatctctgacgagggaagtactcatgcaggttgcaacttgcgacactgcagcagaagcatggagtgcaatcgaagggatgtactccacacacactcgagcgcgttcgattaacactcgattcgctctcaccaacacaaagaagggcaacatgacaactccggagtacttcgccaagatgaagtcccttggagatgagatggcaatcgctggagtccgtcccattgatgaagaggagttgatccagtatataattactgggcttggagaaggatacagcgaggtggtttcggctgtgtgtgctagggtggaaccgatcactgtgagtgatctgtactcccaagtgctcaacttcgaagtgcgccaggccatctaccgtggcgcacatgaaggcacggtgaatctcgccaaccgaggaggctccaacaccggaggaagcagcagtcatggtcgcggtaaccctagtggtggccgtggtcgtggcaattcaggaggaggacgcggccgtggtcgcgcatctggcggatttggtggtgtcgacaagaggcccacatgccaagtctgtttcaagcgtggtcactcggcggcagattgttggtataggtatgatgaggattatgttcctgatgctaaacatgttgcagctgcagccgtaaactcctatggtgttgacacaaactggtacattgacaccggagccactgatcatgtcacgggagaattggagaaactcaccgtgaaggagaagtacaatggaggtgaacagatccacaccgcaagcggtgcagtaaatttacttggatctatcttttacaacataagtctcaagtacttgaaaagtttaaagagttccaagttatgcactatgcacaagggatttaaatgtcttgaggtatcaaccggccgtgtctatatctctcgtgatgtggtttttgatgaatctgtttttcctttcactgagctacatgcaaatgccggcgctcgtcttcgttctgagatccaactcctcactccagatttattctttcctgtacgatctatggggcatgaacaattgatgcatcatgagactaatccattgcctaataatatttatgatgtttctgatgcttctaatgagcaagcagacgacacagaaaatccggctggtccaggtggcgatcctgacatgccgcatgaggagttcgggtcggactctgacgccggccaatcccctgatgccactgcatccgggcgcctggcggatcggcctcccgacgccacgcgacgctccctggttggcggctccggttctgcatccagggggacagcacaacagctacagcaccggcagtcggcgcggcagtcagaaccagccgaggcgcctgacacgggtgaaagtaatccaacagcagctgactcgacatcgacagaagttgatgcgacacaagttggtccgcgaaccaggcttcagagtggagttcgcaaagagaaggtatatactgatggtactattaaatataagcattcctggtttactgcttctggtgaacctactaatgatttagaagctataaaggacaaaaactggaaaatggcaatggaatctgagtatgatgcattagttaagaataaaacctggcatctagttcctcctcagagagggaaagctgatggtacactagatagatataaagctcgtttagtagcaaaggggtttaaacaaaggtatggtattgattatgaagatacgtttagccctgttgttaaagctgctactatcagaataatactgtctttagctgtatccaagggatggagtcttagacagttagatgttcaaaatgctttcctacatggatatttagaagaagaagtatacatgttacagccaccaggttttgaggatcctgctaacccacactttgtttgtaagcttgacaaagccttatatggactaaagcaagcgcccagagcctggttctcaaggttaagtaagaagttggttgatcttggttttcagggttctaaagcagatacctcattattcttttcaaacaaaggtggcataattatatttgttctggtgtatgttgatgatatcattgtagccagttcttcagagagggcaactacagctttgcttcaggatctaaagggggaatttgcactcaaggatcttggtgaccttcattattttcttggaatagaggtaaataaggttcagaatggtattgtgttgagtcaggaaaaatatgcaactgatttacttaagaaggttggtatgtcagactgcaaacctgcatgtacacctatgtcagtaagtgagaaactctctcttcatgaaggttctttattaggtcctgatgatgcaactcaatatagaagtattgttggtgctttgcaatatttaactctcactaggcctgatattgctttctctgttaacaaagtctgtcaatttttacatgctcctcacactgtacactggatagcagtaaaaagaattcttagatacttaaagcaatgtgctcagcttggaattgagtttcataaatcaggatctactcttgttagtgggttttctgatgcagactgggctggtagcctggatgacagaaggtcaacaggaggctttgcaatatttttggggtcaaatctggtttcctggagtgccagaaagcaagctacagtttccagatctagtacagagtctgagtataaagctattgcaaatgctactgcagaaatcatgtgggtacaaaccttacttgcagaattaggaattaaaagtcctagggccgcaaaaatatggtgtgacaatcttggagctaaatatatgtcagcaaatccagtgtttcatgccagaacaaaacatatagaagttgactatcactttgttagagaaagggtaagtcagaaacttctagagattgattttgtttcaactaacgatcaagttgcagatggtttcactaagccattgtcggtaagacttctggagaatttcaagagcaatcttaaccttgtacggtcaggattgagagagggtgttagttag

SEQ ID NO: 24360 - DNA, 969 bp, Oryza sativa
  Clone ID: PAT_MRT4530_29350C.1
caagggatgtcaagattgtcaaaagtttgaagcatttcaaagggcaccagcatcggctatgaaccctatcatcaagccatggccattcagaggttggggaattgatatgatcggtatgattaatccaccatcgagcaaaggacacaagtttatattggtggcaaccgattaatttaataagtgggtagaggcgattcctttgaagaaagttgattctggggatgctatccaatttgttcaagagcatattatttatcgctttggtattcctcaaactattacaaccgatcaaggctcgatctttgtgtccgatgagttcgttcggtttgccgatagcatgggtattaagttattgaattattcgccatattatgcacaagccaatgggcaggccgatgcatctaacaagagtttgatcaaattgatcaagagaaagattttcgattatcctcggcaatggcatactagattggccgaagcattgtggtcctatcggatggcttgacatagttcgatccaagttcctccttataagcttgtttatggacatgaggctgttgtaccatgggtagctagtatcggctcaagaagaacggagttgcagaatgagttgtcagccgatgagtattataatatcatgaccgatgaaagggaagatttggttcaatcaagattgagagcccttgcaaaagttactaaagataaggaacgtgtttctcaacatgataacaagaaagtggtagccaagtctttttcgaaaggtgaacttgtgtggaattgattttgctgatagggactcgagacaacaaattcggcacgtggtcaccaaattgggaagggtcgtttcaaatccataaagttgtgtccaaaggagcttacatgttgcaaggacttgatggggaagtttatggacgagcgttaaatggcaaatatttgaagaaatattacccaagcgtttgggttaatgca

SEQ ID NO: 24361 - DNA, 972 bp, Oryza sativa
  Clone ID: PAT_MRT4530_29351C.1
tatacatggtggcggcggcatccaaggctgatatggcggtggatttggcgaccgcgcaggcagtaaacagagagagaaaagagtgggggtagaggatgggggatcgaggaatttgggtttagtaattatttatcgagcaaatgacacaagtttatattggtggcaaccgattactttatcaagtgggtagaggcgattcctttgaagaaagttgattcgggggatgctatacaatttgtccaggagcatattatttatcgatttggtattcctcagatcattacaaccgatcaaggctcgatcttagtgtccgatgagtttgttcaagttgccaatagcatgggtattaaattgttgaattcttcaccatattatgcacaagctaatgggcaagccgaggcgtctaacaagagtttgatcaaattgattcagaggaagatttctgattatcataggcagtggcatactagattggccgaagcattgtggtcctattggatggcttgtcacggttcgatccaagttcctccttataaacttgtttatggacatgaggcggttttaccatgggaagttcgaatcagctcgaggaagacagacttacaaaatgagttggcagccgatgaatattacaatctcatggccgatgagagggcgaacttggttcaatcaagattgagagcccttgcaaaagttaccaaagataacgatagaattgctcgacattacaacaaaaaagtggtggccaagtctttttcggaaggtgaacttacgtggaaattgattttgctgataggaactcgagataacaagttcggcaagtggtcaccgaattgggaagggccgtttcaaattcataaggttgtgtccaaatgggcttatatgttgcaaggacttaatggagaagtctatggacgagcgctcaatggcaaatacttgaagaaatattacccaagtgtttgggtgaatgca

SEQ ID NO: 24362 - DNA, 122 bp, Oryza sativa
  Clone ID: PAT_MRT4530_29352C.1
attattaaagctaatttcaccattgaacggtgggggtctttcaatgaagtacagaatcactgtagaaggtcgctgttgacgagagaatcatgagctatcacaactaaaaaagatatttacaa

SEQ ID NO: 24363 - DNA, 2005 bp, Oryza sativa
  Clone ID: PAT_MRT4530_29353C.1
atgtcatggcacagggccggtgtcctgctgctaggggctcagtcctgcctacctgtcccgggagttccggccgtaggtgggattgggtcggtactcttgtctatggctaggatgggttggaaactatgtcacgtcttccgtctgtataccgtggtgtttcgggtcccgacattggttgaaatctatattgatgatgtggtcgttaagtcaaaggaaatagatgaccacatagccgatttgaggaaggtttttgagagaactaggaagtatggcctgaagatgaatccgacaaaatgtgcttttggcgtatcggctggtcagtttttggtattccttgttcatgaaagggggattgaaataactcagaggagtgtgaacgcaatcaagaagattcaacctccggaggacaagaaagagttgcaggagttgatcggcaagatatatattgttagaaggtttatacctaatttgtctggaaggttagaaccttttacacctttgttgagattgaaagccgatcaaaaatttacttggagggcagagcagcagaaggctttggataatattaaagaatatcttagttctcctccagttttaatccctccacaaaagggaataccttttagattatatttatcggccggtgagaagtcaatcggctcggtcttgattcaggagcttgaggggaaggaaagagttgtgttttatttgagccgtcggcttttggaggcagagacaaggttaaggcattatctattgtccaatgaatgcactgtaatatgcaaagccgatgtggtcaagtacatgttatcagctccgattctgaaaggaaggattggaaagtggatatttgctttgatggaatttgatcttcggtatgagtcaccgaaggcggttaaggcacaagctatagccgattttattgttgatcatcgtgatgactcaatcggctctgtcgaaattgtgccttggactttgttttttgatggatcagtgtgcactcattggtgtggtatcggcttggttataatttctcctcgggaggcaagttttgagtttgcctatactatcaagccctatgcaactaataatcaggctgagtatgaagcggttctcaagggcttgcaattgctcaaggaggttgaagccaatgctgctgaaattatgggtgattccttgctgttgaaattatgggtgattcaattagtaggagaatatgagtgcaaaaatgatatattaatggtttacagtgagaagtgccgagagttgatggatggatttcggctggtaactttgaagcatgtatctcgagaacaaattgtcgaagctaatgatttggctcaaggggcatcggaatataagccgatgatgaaggatgtcaaagtagaagttgccacaataacagccgatgattggagatatgatgtttttcgatatttgcagaatccgtctgaatcggcttcgcgaaagttacgttataaagctttaaaatataccttgttggatgatgaattgtattgttggacgattgatggggtattacttaaatgtttgagtgccgatcaagctaaggttgcgataggagaggctgttttaccatgggaagttagaattggctcaaggagaacggagttgcaaaatgagttgacagccgatgagtattataatctcatggccgatgaaagggaagacttggttcaatcgagattgagagcccttgcaaaagttaataaggataaggaacgtgttgctcgacattacaacaagaaagtggtgtccaagtcttttttcggaaggtgaacttgtgtggaaattgattttgccgatagagactggagataacaagtttggcaagtggtcaccaaattgggagggactgtttcaaatccataaggttgtatctaaaggggcttacatcctacaaggacttgatggggaagtttatggccaagcgctaaatggcaagtacttgaagaaataatactcaagtgtttgggttaatgca

SEQ ID NO: 24364 - DNA, 360 bp, Oryza sativa
  Clone ID: PAT_MRT4530_29354C.1
attcatatggggtagaatgagcattacaaattgtgaagagcgctgccgaccatgcaaaacacaatacgagactaccgctgagaccaatctatatggcatccacgaattggatacaaaaagatactagtggattctgcccgaacttctttgcctcttttgaaggaacagagatatggcaccgacctattcacttgaggggagggaagcacacagagaggacgttctttggatgcttaccctcagcttgctctttgcactaggcactcagaggcggtgcagatgaagatctgcatgcatatatcgcactggatgttaatggccttcgttggtggcctgaagctgggtccctgcgaaaaatca

SEQ ID NO: 24365 - DNA, 914 bp, Oryza sativa
  Clone ID: PAT_MRT4530_29355C.1
tcggtttgctcctaccgtggaaggcaccagaggggtgctctatgttagctcaggtgcgagcgttcaaaaactcgtcgtggcctcctccattgctactgtttgccttaacccgagctggcctcaagatatgccgaaagatgagacttcctggtcagacaagaagctctgcattgaaaatgaggattggtactctgttgccaaaatcgaagctgaagagatggccctggaatacggaaagaaaaatgggcttcatgtacttacgatttgtcctggaattgtttttggcccaatgttgcagacagtggaaatcaacacaagcagcaaagtgctcctctatatgattaagggaggagacacgccccacgtatggacaacaaattctgcccatggtagatgtccgtgatttgctgatgctttacttctagcataccacaaggcaggcccatctgacggtacttatgcactctagaacagatggacctgaaacactttattggatctgatgaagaacatgtaccctaactacacattatgcagacacagatggttgatgtggattacacaggtcgaagtgacatcagagaaactgaagaatctgggctggaacccaaggaaacgggaggagacacttgcggacagcatcgagttctttgagaaggcaggccttctagatgggcgaccttgccggcttccctatttcgctgtccaggaatgaactgaagatggccttggtcccattctcagctaattaatcttccccatttactagtatggatgcaccttgtaaaaaaagttaatgcatgttttttttatgtatcttgtactgatacttaggaggccggtatcatgtatacttacaaaagttgatcatagctacagttaataccgatttttcttttaaaaaaaaaaaaaaa

SEQ ID NO: 24366 - DNA, 409 bp, Oryza sativa
  Clone ID: PAT_MRT4530_29356C.1
ccggggaaacccccccaattccccgattggtttattttacttgaaaaaaggcgggggtccttaaattacaaaaattttttcctttattcccccctaagcccccaaaacaaccatttttttaattaatcaaaaacacccggttttatttcagcatttttcagcacacacacaaaccacacttatttgggtggttttttttggggactatattaagggaggggactccccggggggaagtgttcggttgtttcgaaacttcacttgcccaacttgcagtcggggcaagaacatttggtgcccaatttgaagccgccgttttccttgccgggggggaccttctagaaggggtttttttgggtttcaactttgacgaccccataggtgggacctttttttacgcactggtttt

SEQ ID NO: 24367 - DNA, 368 bp, Oryza sativa
  unsure (1)..(368): unsure at all n locations
  Clone ID: PAT_MRT4530_29357C.1
aaatgcgggggagagagtgncagacagcaagtgaaagcagctacaaatgtgttaattactactcagcagtngtgatgatagatgagctnnattatgggtggggtgtgctgtgtgtgtggatcaatttactgtatgagtgctgcacatgctacattgcttcaatgcaaatgaggcgatcaagtagtaaatgggattaattaagcgtacttcccctgctcccattaaaaaacaaatcgaggatggtgatgctcccctgcaccatcataaagtcccatcactcaaaattgatacgggttctgatgtccagaacggcctacannntgntttgntaaaaaaaaaaaaaaaaaaaaaaaaaaaaaaaaaaaaaa

SEQ ID NO: 24368 - DNA, 474 bp, Oryza sativa
  Clone ID: PAT_MRT4530_29358C.1
gtcattcacaaaaattgttaaacttttggataggattttttaaattcttgaaaagatcctttttcaatttttcctcctttaacaacgttttcatctgaccctttgccaactaggatcgcagggatattctcaatagctatatgatttgtcaatccatctaaccactttgcttgatcgtttccgccgaaaatgaagattttctttctggtttgtgatggaaccattggctgaaccatcatccatatcgttgaaaatagtccgggagcgccaacgagaagaagaacacgaactctttccacgtacacctcatccatgatttttgcgagaggtcgaaaaattgagatcgcattatatgctcttgaataccaacctggaacaccaccatctctcaaatcagtcaattctacgattccaagatctaaaacgtttttttctatagcaatcttgaaaacccgttctagtaaatctaaaacc

SEQ ID NO: 24369 - DNA, 186 bp, Oryza sativa
  Clone ID: PAT_MRT4530_29359C.1
agaccatactgaggctgtcatcaccgccgacacaaccactctccagccttctgctccaacgcaccgagaaaccatcaaccggcactcactaccctttacggagctccttacctcaccttgctggagagagttgggagcggcgaggaggggatcctctagagtcgacctgcaggcatgcaagcttga

SEQ ID NO: 24370 - DNA, 1315 bp, Oryza sativa
  Clone ID: PAT_MRT4530_2935C.1
atgggcatcgtcatctacaccgccggcctgcctccgtcgccgccgactggtgtccccgcctatacggaatggatcagtcagaacatcaccaccggctcgccgtcgtcgccgccgactggagtcttcgcctatacggttgattggtcacaccaccgttgttgggcgtctacgtctttaccgaccggccgcttcgtccaccgccgactggtgtcttcgcctatacggttggttggtcacaccaccgttgttgggcgtctacgtcttcaccgaccggcttgccttcgtcgccgccgactggtgtctccgcctgcacggctggcctattatgccaccattgttgggcgtctacgtcttcaccgaccggccgcctcgtccgccgccgactggtgtttccgcctgcacggctggcctattatgccgccgttgttgggcgtctacgtcttcaccgaccggcttgccttcgtcgccgccgactggtgtctccgcctgcacggctggcctattatgccaccgttgttgggcgtctacgtcttcaccgaccggccgcctcgtccgccgccgactggtgtttccgcctgcacggctggcctattatgccaccgttgttgggcgtctacgtcttcaccgaccggccgcctcgtcgccgccgactggtgtttccgcctgcacggctggcctattatgccaccgttgttgggcgtctacgtcttcaccgaccggccgcctcgtccgccgccgactggtgtttccgcctgcacggctggcctattatgccgccgttgttgggcgtctacgtcttcaccgaccggcttgcctcgtccgccgctgactggtgtttccgcctgcacggctggcctttatgccgccgttgttgggcgtctacgtcttcaccgaccggcctgccttcgccgctgccgactggtgtttccgcctgcacggctggcctttatgctgccgttgttgggcgtctacgtcttcaccgaccggccgcctcgtcggccgccgactgccgactggtgtctccgcctgcacggctggcctattatgccaccgttgttgggcgtctacgtcttcaccgaccggccgcctcgtccgccgccgactgacgagttgggcaacaacatcaactctcctccaattatttgtcttcacggttggcctactacgcaactgccgatagaggatctcatcgttatcatcggctgctacatcgctattgactggatcaccgacatcgtcatcttcatcaacatcttgtcaagcctcatcaacatagcctactctgctgccgttgatgggaaacttcgtcatcata

SEQ ID NO: 24371 - DNA, 1029 bp, Oryza sativa
  Clone ID: PAT_MRT4530_29360C.1
atggggatggattactacaacgtgctgaaggtgaaccggaacgcgacggaggaggatctcaagaagtcgtaccggcggatggcgatgaagtggcaccccgacaagaaccccggcgacaagaagaaggaggccgaggccaagttcaagaagatctccgaggcctacgaggttttgagtgatccacagaagagggcaatatatgataaatatggagaggagggtctgaaggcctctgtggatgcaggggcttcatcatccatgaatggcaaccgccggttcaatcctcggaacgctgaagatgtattcgccgagttctttggcagcagcaagccctttgagggaatggggcgcgcaaagtcaatgaggttccagacagaaggtgctggcacttttggtggatttggtggtgggaatgagaacaagttcagatcatacaatgattcagccggcaccagttcaagccagccccggaagccaccagccgtggagacaaaattgccttgcacactggaagagctatatgctggttcgacgcgaaagatgaagatatccaggaacgttgtcaggcctactggccaaataggaactgaatcagagattctaactatcgatataaagcccggatggaagaaaggaaccaagattacgttcccggacaaggggaatgagcagccaaaccagctccctgctgaccttgtatttgtaatagatgaaaagccccatgatctgtacacaagagaaggtaatgatctccttgtgcaccagaagattgaattggtggatgcgttagcaggaaccaccgttaatctgaagactctcgatggccgggacctggtgatcaagctcactgatgtggtcacacctgggtacgagctcgcgatcgcaaaggaagggatgcctattgtcaaggagaatgggaggagaggcaatctaaggatcaagttcgacatcgttttccccaagaggttatcgtcagatcagcggcagaacattaggaaggttcttggagggcaaactcagcagcagtga

SEQ ID NO: 24372 - DNA, 335 bp, Oryza sativa
  Clone ID: PAT_MRT4530_29361C.1
ggcggcacggcccggcacggcccaggcccggccgtgcctggcccgaggttagtcgggccggcacggcccgacctacactccgggccgtgctgtgccagcccacgggccgcacacacggcccaggcacggcccaacatgactcgggctatgccgggccggcccgaaggcacgacggcccatcgccggcccaccgtgccgagggtgcagcccaggcacggcccggctgtcgggccgggccggcacgggcacgaccccgagtcgggccgtgccgtgcttgggccgggccaaaatggcgtgccttgggccgggcctcgggccatatggccatctatatt

SEQ ID NO: 24373 - DNA, 1014 bp, Oryza sativa
  Clone ID: PAT_MRT4530_29362C.1
atggcgctgcgcagcaaggcccgagcagcgcggcggctctcgagccccgcgagcgcgccggtatccctgtgggatttcgccgacggcttgcccactttctcggagtacttggtgcacctgaccatcggcacgccgccgcagcccgtgcagctgacgctcgacaccggcagcgtcgcagcgacctcatctggacaaagtgcctgccgtgccgtgcatgcttcgaccaggctctcccttacttcgaccggcttgatcgaagtggacaagttcacgttcggtgccggcgcgtccgtgcccggcgtggcgttcggctgcggcctctttaacaacggggttttcaagtccaacgagaccggcatcgccgggttcggccgcggcccactgtccctgccgtcgcagctcaaagtgggcaacttctcccactgcttcaccgccgtaaacggattgaaacagagcactgtcctgctcgacctgccggccgatctctacaagaatggccgcggcgccgtccagtccacacctctaatccagaactctgccaatccaactttttactacctctcgctgaagggcatcaccgtcgggtcgacgaggctgccggtgccggagtccgcgttcgcgctgacgaacgggacaggcgggacgatcatcgactccggcacgtccatcacgtcgctgccgccacaggtttaccaggtcgtccgcgacgagttcgccgcgcagataaagcttcccgtggtgcccggtaacgcgacgggtccctacacctgcttctcggcgccgtcgcaggcgaagccggacgtgccgaagctggtgctgcacttcgagggcgcgacgatggacctgccccgggagaactacgtgttcgaggtccccgacgacgcgggtaacagcatcatctgccttgccattaacaaaggcgacgagacgaccataataggcaacttccagcagcagaacatgcacgtactctacgatctgcagaacatgcaccgtggtccacgggccacctaa

SEQ ID NO: 24374 - DNA, 1501 bp, Oryza sativa
  Clone ID: PAT_MRT4530_29363C.1
atgtcatcatcatctctttcctctcttatctcccttcctcctctctctctctttcccagttttcttatacgggccggcggaagggagtatttatgtaaatacaacctgcctgcctgcctaccacgtcccggccggcggatgcagctcacgcacgccgacgccgggcgcggcctggccgcgcgggagctgatgcagcgcatggcgctgcgcagcaaggcccgcgcagcgcggcggctctcgagctcagcgagcgcgccggtatcccccgggacctacgacaacggcgtccctacgacggagtacctggtgcacttggccatcggcacgccgccgcagcccgtgcagctgacgctcgacaccggcagcgacctcatctggacgcagtgccagccgtgccccgcatgcttcgaccaggctctcccttacttcgacccgtcgacatcctccacgctctcgctgacttcctgcgactccacgctgtgccagggcctgccggttgcgtcgtgcggcagcccaaagttctggccgaaccagacatgcgtatacacgtactcctacggcgacaagtcggtgacgacaggcttcctcgaagtggacaagttcacgttcgtcggcgccggcgcgtccgtgcccggcgtggcgttcggctgcggcctctttaacaacggggttttcaagtccaacgagaccggcatcgccgggttcggccgcggcccactgtccctgccgtcgcagctcaaagtgggcaacttctcccactgcttcaccgccgtaaacggattgaaaccgagcactgtcctgctcgacctgccggccgatctctacaagagtggccgcggcgccgtccagtccacccctctaatccagtacgctaaaaatgaagcaaatccaactttttactacctctcgctgaagggcatcaccgtcgggtcgacgaggctgccggtgccggagtccgagttcgctctaaagaacgggaccggcggaacgatcatcgactccggcacggccatgacgtcgctgccgacgcgtgtttaccggctcgtccgtgacgcgttcgccgcgcaggtgaagcttcccgtggtgtccggcaacacgacggatccctacttctgtttgtcggcgccgctgcgggcgaaaccgtacgtgccgaagctggtgctgcacttcgagggcgcgacgatggacctgccccgggagaactacgtgttcgaggtcgaggacgcgggcagcagtatcctctgccttgccattattgaaggcggagaggtgaccaccataggcaatttccagcagcagaacatgcacgtactctatgatctgcagaatagcaagctgtccttcgtccctgctcagtgcgacaaactttagtctcgcattgctctgaccataatttgttatagctgaatagtttggatttgagcaactctatgccgtacagacatccatgtaaaaaaaaaagcaaatctcttcctattaccataagactctctggtgatgc

SEQ ID NO: 24375 - DNA, 674 bp, Oryza sativa
  Clone ID: PAT_MRT4530_29364C.1
gcacgaggccacagttccactctctgattctcaattttcaatttcttaatagagaagaagcgatcggattaagcgatgagtgatgacgagctgattccggggctaccggaggaagtggcccgggaatgcctgctgcgcgtgggattcgaccagctgccggcggcgaggagcacgtcgcggcggtggaaggcggaggtcgagtcgccgttctaccaccgcctccgcagggcccgcggcatggcgcgcccgctcctcgccctcgcccaggccgagccgccgctcgccgccgccggcccggctaacaagtacgccggcctgtccacctcctaccgcctcgtcctccacgaccccgtcgccggcggctgggccgcgctgccgccgctccccggcgccggtgggctgccgctcttctgccagctcgcctcggtggcggcgtgcggcggggagaggaggcggctggtggtggatacggcgggtgggatcccgaagacgtgggcgccgacggacgcggtgcacgtgtacgacttcctgtccgggtcgtggcggcgcggcgcggcgatgcctggaccgaggcggtcgttcttcgcgtgcgccgcggtggggaggtgggtgtacgtcgccggcgggcacgacgaggagaagaacgcgctgcggtcggcggtcgcgtacgacgc

SEQ ID NO: 24376 - DNA, 271 bp, Oryza sativa
  Clone ID: PAT_MRT4530_29365C.1
ggaaaaactctaaaatcacccctctaattaaggttcttttattggggttcaattttttcccggggaaccgcaggggtaaatttaaaaataaatggccctttttatttttggccccaacgggggccacgaatgggccaaaaaaaaaaggggggggggggctgaaaaacccaacccaaaaggccctaagctaaaaccccccccttaggggggcaacgccaaccccgggggaaccgggggggggggggtaccccccctggtgagcccggacggg

SEQ ID NO: 24377 - DNA, 2046 bp, Oryza sativa
  Clone ID: PAT_MRT4530_29366C.1
atgtcgctgacgacgacgacgagccggctgccgatctgcagggcgcagggcggcggcgtcgccaaggagaagcggacgacgccgccacctgccaagatcacgccgccttcgtcgtcgtcgtcggaggccgccggactaagcaggaggaggctgctgcaatcggccggcctcgggctcggcctcggcctaacggcggcgaggccggcgcgagccgaggcgacggcgccggaggaggtgacgtcgaacaggatgtcctactcccggttcctggagtacctcgacgccggcgccgtcaagaaggtggacttcttcgagaacggcacggtggccgtcgccgaggtggacgacgcggcggcgctgtcgagggtgcaccgcgtcaaggtgcagctcccgggcctccccgccgagctcgtccggaagctccgggacaagggcgtcgacttcgcggcgcacccggtggagcccagcgccggggtgatgctgctcgacctcctcgtcaacttcggcttccctctcctcttcgtcgcctcgctcctgtggcggtcgccgaccatgaacaaccccggcggcgggcctagcctcccgttcgggctcggcaagtccaaggccaagttccagatggagcccaaaaccggcgtcacgttcgacgacgtcgccggcgtggacgaggccaagcaggacttccaggagatcgtccagttcttgaagttcccggagaagttcacggcggtcggtgcgaggacccccaagggcgtgctgctggtcggcccgccggggacggggaagacgctgctggccaaggcgatcgccggcgaggccggcgtgcccttcttctcgctgtccggctccgagttcatcgagatgttcgtcggcgtcggcgcgtcgcgggtgcgcgacctgttcgacagggccaaggcgagcgcgccgtgcctcgtcttcatcgacgagatcgacgccgtggggcggcagcgcggcgcggggatcggcggcgggaacgacgagagggagcagacgctgaaccagctgctcaccgagatggacgggttcggcggcggcgacggcggcgtcgtcgtgatcgccgccaccaaccggccggagatcctcgacgcggcgctgctccggccggggcgcttcgaccggcgggtgtccgtcggcctccccgacgtgcgcggacgggaggagatcctcctcgtgcacggcgccaacaagcggctcgaccccggcgtgtcgctcgccgtggtcgccatgcgcacgccggggttcagcggcgccgacctcgccaacctcatgaacgaggccgccatcctcgccggccgccgcggcaaggaccgcatcaccgtcagcgagatcgacgactccatcgaccgcatcgtcgccggcctcgagggcaccagcatgaccgacggcaagagcaagatgctcgtcgcctaccatgagatcggccacgccgtgtgcgcgactttgacggcggggcacgacgaggtgcagaaggtgacgctgatcccgcgggggcaggcgcgcgggctgacgtggttcctccccggcgaggaggacccggcgctggtgtcgaggcagcagatcttcgcggggatcgtgggcgggctgggcggccgcgccgccgaggaggtcgtcttcggcgagccggaggtgacgaccggcgcggcgggggacctgcagcaggtgacgcgggtggcgcggcggatggtgacggcgttcgggatgtcggagatcgggccgtgggcgctggcggagccggcggcgcagggcggcgacgtggtgctgcggatgctggcccggagctccatgtcggagaggctcgccgccgacatcgacgccgcggtgaggaccatcgtcgacgaggcgtacgaggtggccaaggcgcacgtgaggaggaaccgcgccgccatcgaccagctggtggacgtgctcatggagaaggagacgctcggcggcgacgagttcagggcgatcttgtcggagcacgtcgacatcggcaaggagcggcgggaaacggcggcgaggacacagcagctggccactgcttga

SEQ ID NO: 24378 - DNA, 278 bp, Oryza sativa
  Clone ID: PAT_MRT4530_29367C.1
taccacccaccgacacacccactcgcctgctgtcgcgcgtcttttgtcgctgccactggatccgggcggaggacggccgtcgctgccgctcgtctgcctgtcgacgcgccaatccacccgccatcgtgctcctctcgcctttgccgccgctcgccatcgcgcctgctgtcacccgccccatcgcccccgcccaaggtcaagggcggtggatccgtcatcaccaaccctccgtagtgctgtcactgtcacccgcccaaccaccgcccgtccgtcgttag

SEQ ID NO: 24379 - DNA, 449 bp, Oryza sativa
  unsure (1)..(449): unsure at all n locations
  Clone ID: PAT_MRT4530_29368C.1
gtaagacctgctggcagttatattatggatcagcttgaattacgtcgagttgctttatatcctgaaactaatgtttctaaaggagatacagtgattctagnnngtaatttcaccatatctgctggactaagagcagcggaagcttttcttgtnnaacaccagatggaaatcataactgaatttggagctgtagtccttccaatggtgaaacacccatttgttgttggtttccttgttgcggagctcccagaactagttggatgtacaaagaactccgagacttctgatattcnnatnccatcacactcattcttagacaagtcatcagatataactccatatactaaaggggaaacttgggattttcaaacttctggagaccaagctaatagntatgcctatntagttactgaatggaaaaatnagncccttatgatttctcgaacttt

SEQ ID NO: 24380 - DNA, 237 bp, Oryza sativa
  Clone ID: PAT_MRT4530_29369C.1
atgttacggacgtacgtggtacggtcgatgggcgggtggttcggctcgttgtacgtggctacgagcagctacatatgcaaacaagatgcaccaacccctgctgatctactgctcagcatgagcactgcaaaactacgagagcagcaacaaagcgagacgacagatctgaagaactgtcacagtgaccgattccaactcgtggaatgtgatggaaacttcagccagtgctcgatgatc

SEQ ID NO: 24381 - DNA, 169 bp, Oryza sativa
  Clone ID: PAT_MRT4530_2936C.1
gctatggctacttccatattttttttaatgcaatgagcctatcctataccctctcttttctgtttatatttcaatataccgaaacccatataagactagataaatattaagaggacatcttcacgcctaagataataaattctatctgtggggcagctaaagattgtgt

SEQ ID NO: 24382 - DNA, 583 bp, Oryza sativa
  Clone ID: PAT_MRT4530_29370C.1
agaggagataatactgtgttttttgactgagctgaagcttgatttgcagttggccacgactcctaactcaagcccctatgacgcggatcttatgtcaaaaggtgtgcacctgaaaaagactaggttcctacatggtagctaggtagtgctatctcatgtgttggattgctgccaaaaaggcgtccaacttgacattgccagctggagacaggaacttgatgcagatgggcgccctggcacccatgagtgttttgatggacaggaagatcgagccgacgccgacgtcgtagatgatccccgacgccagcgccggggagagcatccgcccgaggaacgggtacatcttctcccacaggtacgccagcaaactgccgatgcacatgccgacgggcacgcgcggatggtgtgaacaacgtgatggccatgccggtggtgctcgggatgtagtgccggatgcgccacttctttcgggtcgccacctacacggaacacgctgagcgccagtgcaagctcgaaaaacaccttgaagaggagcacgctgagcctgggtatgtcttgctagccgtccacgacgctgagcatg

SEQ ID NO: 24383 - DNA, 1089 bp, Oryza sativa
  Clone ID: PAT_MRT4530_29371C.1
atggacgcgctcgtctcggcggcgctggaggaggtgagcgcccgcctctcggccggcatcccggtgaccgatctctgggcggcgctccgtggcgcgctcgaggcggccggcctcccaattgggccggctgtcaagcgcgccgtctgggcccgcctcatcgtgctccccgtcatcagcgtcgtgctgggggaggcggaggcggaggcggaggggccggtcgtcgacgatcccaaggtcggcgtggaggacgccgagcggctgggcatgcggctggttgcgagcgccgcgctcagggacaacttccttggcatgtatgatctcaggcactccaaatcggagatgagtgccgtccagaagaaggctttacaacgtgtcggggcaagcaggacttctggtgtaacacaaaatgacctgtgcaaaagttttggcatggaagggaacaacttccattatattgtgcaaagccttcagtcccagaagttaattgttagacgatcaactattataaagtttaaaggcaatggagctgagaaggaagatgcttcacagaataaacgagtaaccaataccaactcattgtatctcactagatatgccaaagactgtatgaattcacaccagagaattgagattataaagcccggactattggtgagcaatgaagagaccaacatagatgatctacaagatgggacttttggtgtaaactccgataatgatgtatctatccatgattatcttccagcaatgaaagccatttgtgacaaactcgaagaagctagtggaagggtactgcataggcttagagacgcacaccttgttgaagaatttgatgccaaagttgatgataagattgttccctgtttacgtcttttgaagaaatttgatccaaatgagtttctgccaaaaattcaaacctcaaactacaaacttggcaagaaagggcaggcaactgaccaaattatggaactctctttagaaaactgtatatatgatatgatcagtgctcaagggccaaagggtataacccttgttgagaacaccattcagcttcattgtagttcctggttcctggttgatagtatctag

SEQ ID NO: 24384 - DNA, 119 bp, Oryza sativa
  Clone ID: PAT_MRT4530_29372C.1
acacgaggtagaattaattaaggccagcaggtctgaactttgtccatggttctaaacctgtaaacgctacaacactatgactacagatgccacgagggcactagcagaatagcagaagc

SEQ ID NO: 24385 - DNA, 764 bp, Oryza sativa
  Clone ID: PAT_MRT4530_29373C.1
ggtcctcaagccaagtttggaagagcatccctgggttgccaacctcggaacctcggctactgcgggcatctgcttcaatcgcattccattgcattccattccatccgatcctttgctttcttcgccggaatagtccacggatcgaattccaaacccgcgaggaattcgatcatatatctagctagctacccctcgaaccgatcaacctcgcgatcccgaagaaaatccaaacatccgagacgccatggatgcagctcttctctcggcttcgacgacagcgccatgtcgtcatcttcgtcttcttcttctcccatcggcgggcgccgccgcgtgccgggacacggagcagcaagagcgcggcggcggcgggggtgagggggcgagtgcgcgtgaattccctgttcggcgacggcggcggcggagatgacgggttccgggcggtgaggaggctggtgaagctcaactccgccgtgcagaacaggagcgtcagggagttgctcgagctcgccggcgacgagtgcctctacttcttcggtagaatctcctccattgacgtttcacaagtgagcaagaacatgtttctgctcctccacgcaatgatgcttaggcaccacgtatcgttcgtgctcaagccgactgaaaacgaaggcttcgacctaggcgtcaaatggtctctagaatggaagggcaagaagctgccttgggacctagactgcaacatcaccaccaatcacgtctacaggggcatgctgctcattaagtaa

SEQ ID NO: 24386 - DNA, 417 bp, Oryza sativa
  Clone ID: PAT_MRT4530_29374C.1
atggcggcggagagggagggagccgtggtggcgaagggccacgaggaggggatgaagatggcggcgtcgctgctggaggagttcggcctcccgctggggctgctgccgctgggcgacgtggtggaggtcggcttcgcgcgggccacgggctacatgtggatcgcgcagcggaggaaggtggagcaccacttcaggatggtgggcaagcacgtcagctacgacgccgacatcaccggctacgtcaagcccaggtgcatcaagaagctcaagggcgtcaaggccaaggagctcatgctctggccccccgtcaacgagatcgccgtcgacgaaccctccaccaccggcaagatccacttcaagagcctcgccggcgtcaccaagaccttccctgttgaagccttcgccgccggccagtag

SEQ ID NO: 24387 - DNA, 425 bp, Oryza sativa
  Clone ID: PAT_MRT4530_29375C.1
ggggaaaacaaaccctcaacttggggggaagatttgttttaaaagcagacaatttttagcccggtaaaaataaattcaaagggtcaaattttgcttaaatctccctggctcccccttaaaaaaaatttttttttccttgcaggcccttaaaccaagcttaaattaaaaccaaggggcccaaatgtggaccccaccttttggatataaaaatgctttatttagggcgatttgacatacccctgccctttgttaaggccctcaaacttttaaccatagtccttgacaacaacccaggagcagcccacaacctttcttggcttgcccttaaagttaattttgcaaagccctgcccactccccaaaagttttaacacttggcccggtaacaaggggaactttgtgctcaccacacagagccttaaccaa

SEQ ID NO: 24388 - DNA, 1494 bp, Oryza sativa
  Clone ID: PAT_MRT4530_29376C.1
atggcagcgcttctgtggaaagacatccatatccagactgaagatgttgatgccttcatcaaggaccgcggtagtatgggggtgatcccatttaaaactctgataaacttatgtgggaccaatatgcaatttactcttaatgtgacgctagaggaatcaatcaaggagaggcgagacaagcttgtgaccaaggttcattgcatgatccaaggatacacatctagcaagattcatctgtcacatgggatgaagatcgtcgacgctatagagcgcctcggtgtcggttaccatttccatgaggagataggcatgttcatgcgagtcctaaacgacactcctgctagggagaatgacatggccgaagctgctcttcggttcaggctgctgaggcaacaccactacaatgctcctagtgatgtttttgggtgtttcttggacaagaatggagacttcaaggaaaccctgcgacatgacgttgatgctcttcttagcctgtatgaggcagctcatcttggcaagtgcgatgaggacttgctcaaaagtgccgtcgtcttcactaccggctgcctctcagccatggcagaaaatgaccaattgccccagcctttattagagaaagtagagcacgcactgacctcgccgacgcaaaggaggatgaagaggctggaggccaagctctacatctccatctatgagaacgatgaggatagcaaccacgacatactggagcttgctaagttggactttcacatcttgcagcagatgcaccgagatgaggccaggagattctcactgtggtacaaggaacttaacgttcggagcacactgggtccatacatacgagagcgcccagtggagtgctacttctggtcacttggtgttttctatgaaccacagtatgccaaggcacggatgatgtttgcaagacttatcaagatattttccttgtttgatgatacatttgattcatatggcaccttggaagagcttcacctgttcaacaatgctgtccaaagctgggatgaaggaggagcaaaacagattggtgattacttcgggtatgtgatgtcccttctttccaagacactcaacgaatttgtggttgatggtgcttcaccattgggaattgactgtaccaagaagacgatcaaggaggcaagcagatgcatgttgcaagagatcatatggagagaagagggacagtgggagaaagacggaggtggagtcccaactgcggtagaatgctacatgaaagagtatggtgtgacagtccaagaagccaagaaagcactatggtgccttgtagaggagcagtggagaagcatcaatcaagagttcctgcgcaacacgacggtcccagtccccctgttgacacgtgtgataaaccttgcacggctcatggaaaccctttacaagacgaccaatggctacacacactgctcgggagttactgacctcatttccaatgtcctggacacatgcgtatctcattaa

SEQ ID NO: 24389 - DNA, 334 bp, Oryza sativa
  Clone ID: PAT_MRT4530_29377C.1
tcgcggtggacttgaggtcatcgtagtcgcggtggactcagggttgtcgtcgtcgcactcaagcaccgtcgacgccaagtccacctctcctgagcaccaccggtgcttgatccgcctcttccgagcaccacggatgtcggatctatctttccacacctcctccgccctcctgaacactgccgccagagccaccgtcgcctacacgagccgcctcaccaccgccacccctcccctttgccgttgccggagccgccactgcttgtgcgagccgctgccgatcgatggacccaccgccaatggggaggaaggaggagaggggtgctacggtgggtga

SEQ ID NO: 24390 - DNA, 912 bp, Oryza sativa
  Clone ID: PAT_MRT4530_29378C.1
atggatcccgtcctcaactccccaagcttcacccctacccctaccctcccctcctacctcgacatccaaggacgaaggtttcgcttcggtgccattgggggccaaaacgttgtcatggtcatgacagggcttagcatgctgaatgctgggctgacgacccagctgctgctgagcctgttcagggtgaagggcatcgtgcactggggcatcgccggcaacgccgacgagggcctccagatcggcgacgtcaccatcccggagcactgggcgcacctctccctctggaactggcagcgctacggcgacggcccggagaacgagctgccgctcgaggccgccggcgactacacccgcgacctcggcttcctcaacttctccgactacaccgccgccggcccctcccccaacgagctcaacagcatctggttccagcccgaggagatcttccccgtctccggcaagccggagcagcgccaacacgccttctgggtccccgtcagctcccgctacttctccctcgctgagaagctagaggggatggagctgccggcgtgcgtgaacgcgacgacgtgcctgccgcgggcgccgagggtgacgagggtgaggagggggtgcagcgccaacgtgttcctcgacaacgccgcctaccgtcagttcctgcgggccaagttcgggtgcacgccggtggagatggagagcgccgccgtggcgctcgtggcgcaccagcacgccgtcccgttcctcaccatccgctccctctccgacctcgctggcggcggctcctcgctcggcaacgaggccggcgagttcctcgccatcgccgcccagaacgccgtcgacgtcatgctcaacttcgtcccgctcctcgccgacggcggcgccgcgcacgacgccgtggcggcggacatgtga

SEQ ID NO: 24391 - DNA, 180 bp, Oryza sativa
  Clone ID: PAT_MRT4530_29379C.1
atgaggtggagcgacgagggcggaccaagcctatatgaaggctacgtcaccaacactggcgcatggaccgacgaggccgtggactgctgccgaggtgaagtggaagacaaatgcgtcacattccacgaaggcatgaaggcgttccatggtttccatcccaaggtaattgttgccctttga

SEQ ID NO: 24392 - DNA, 1752 bp, Oryza sativa
  Clone ID: PAT_MRT4530_2937C.1
atgggcgtctacgacttcaccgccggcctgcctccatcgccgccgactgatgcctccgcctacacggctggcctattatgccaccgctgttgggcgtctacgacttcaccgccggcctgcctccgtcgccgccgattggtgcctccgcctacacggctggcctattatgccgccgctgttgggcgtctacgacttcaccgccggcctgcctccgtcgccgccgactggtgtcctcgcctatacggttggttggtcacaccaccgttcatgggcgtctacgacttcatcgccggcctgcctccgtcgccgcggactggtgcctccgcctacacggctggcctattatgccgccgttgttggatgaatggatcagtcagaacatcaccgaccggcttgccttcgccgccgccgactggtgtttccgcctgcacggctggcctttatgccgccgttgttgggcgtctacgtcttcaccgaccggccgcctcgtccgccgccgactggtgcttccgcctgcacggctggcctattatgccgccgttgttgggcgtctacgtcttcaccgaccggcttgccttcgccaccgccgactggtgtttccgcctgcacggctggcctttatgccgccgttgttgggcgtctacgtcttcaccgactggcttgcctttgccgctgccgactggtgtttccgcctgcacggctggcctttatgccgccattgttgggcgtctacgtcttcaccgaccggcttgccttcgccgccgccgactggtgtttccgcctgcacggctggcctttatgccgccgttgttgggcgtctacgtcttcaccgaccggccgcctcgtccgccgccgactggtgcttccgcctgcacggctggcctattatgccgccgttgttgggcgtctacgtcttcaccgaccggcttgccttcgccgccgccgactggtgtttccgcctgcacggctggcctttatgccgccgttgttgggcgtctacgtcttcaccgaccggccgcctcgtccgccgccgactggtgcttccgcctgcacggctggcctattatgccgccgttgttgggcgtctacgtcgtcaccgaccggccacctcgaccgccgccgactgacgagttgggcaacaacatcaactctcctccaattatttgtcttcacggttggcctactacgcaactgccgatagaggatctcatcgttatcatcggctgctacatcgctattgactggatcaccgacatcgtcatcttcatcaacatcttgtcaagcctcatcaacatagccaactctgctgccgttgatgggaaacttcgtcatcatagcattgacccgtggcctgggtctgcccctgtccaaaagtatgcatatgcacatgaaagcatcgaggcgtcggagaagaagcagtcgaacccgatgcgggagatcaaggtgcagaagctcgtcctcaacatctccgtcggcgagagcggcgaccgcctaacccgcgcctccaaggtgctggagcagctcagcgggcagaccccggtgttctccaaggcgaggtacaccgtgcggtcgttcggaatcaggcgtaacgagaagatcgcgtgctacgtgacggtgagaggggagaaggcgatgcagctgctggagagcgggctcaaggtcaaggagtacgagctgctcaggaggaacttcagtgacaccggatgcttcggcttcggtatccaggagcacattgatcttggcatcaagtaa

SEQ ID NO: 24393 - DNA, 250 bp, Oryza sativa
  Clone ID: PAT_MRT4530_29380C.1
aaatatatatagtctgtgtttttatattttttatttacatatgctttacttaataacaatagtttttgtattatctacttttacattatgtttgagagagatcaggttttacaaaaacaaatgcagaattatttctggaaatcaaaacaaaataaattgactttggaacattgaacaaggtgagaattagagggtgatcaccgatgtacaaggaatcatggttatatatgaccatgacggtttagttgtc

SEQ ID NO: 24394 - DNA, 178 bp, Oryza sativa
  Clone ID: PAT_MRT4530_29381C.1
ttgcgcgcgtggttccacatcattaccggggccatctctttaaatgtacaggctacgagtgaggagcatgataaatgtgggagggcggagatagtgagtttcacattatcactaacatatgttatctgaattgatgaatcctattgatacacgtccttttcgaaactattggctagaa

SEQ ID NO: 24395 - DNA, 441 bp, Oryza sativa
  Clone ID: PAT_MRT4530_29382C.1
atggccgtgctcgccctcctctccaccggcctctccctctccctctcccgcgcggacctcgttgccgtcgtcatcgccaagccgcggctgctctgcgcgaaggctgacaccatcgccgccagcgctcggatattcacccgcaacaataggctggattatcaactgttcttccggacgagaggtgcctttagacgactgggctggaacgggctgatgactgagccacaaactaagccttacccactagacatgtggaagtacggtagtgctttgcaacagaggcccgagcttaatccttatagtggccggggtgctacttcccacaactggcatgcacccaaaccccaccgaaaacaggttttaggggttttgaaagaggaagagaggtgtatatccaattccaccataaaccaacaattccatagtgtccaaatgatatga

SEQ ID NO: 24396 - DNA, 2703 bp, Oryza sativa
  Clone ID: PAT_MRT4530_29383C.1
atggcccaagacgctggtgacgccgtccttccggcattgcgcatcacggcggagaggcaccttagcctcatccgcaagatcatgccggaggatgccgccgtgagggtgggggagtcgcggctgcggccgcggttcttccatgaggttttggatttctacgaaattcacgccttccacctcgcgcccaacgtcgtgatgactctggccatcttagcgcacttgtgcgagatgttcatcggggtgcggccgacgatgcggcagttcctgtccttcttcgtcccatggctgctgcaaggcgcggtggtggggggatgctgcttccagccccggccgggcacggcggggcaatacattgagagtcacctatgcaagaagtgggaggattggaagaaggattggttctacaccgcgctgccggaccatccacgacttcggctccccgccggccctcccgaacgatccgccacgtggttggtagtttcggaactaggcgaggagtacgacgcagtgcgggatcgcctcaggggcctgcgaagccagggcctaacgggggcgatggtgttcggtgactacttccgtcgtcgcatcgcgcctctccaggagcggtctcgcggcgcgtgggagtacactagcttccgcgaccgggagagtatcctggctgtgatgtcggccgtcggcgccggcaggggtcggtcccgtcggggcggcgccggtggcggcgccgtcggcgcgggtagcagcagcgcgtccgcaggcggcagccgaaccggcaactccggcggggacggcgacttcagggcacctggtccgagccgtgggcccgggggagattcggccggtgatccgaaagggaaacggaagatgttcgaatctcggccaccctctcccccgcgcggagggggcgctgagcgagtggcggacagaccgccggcgggccacaagcgccccgccgcgtccgaggctggaaggaagaagaagcggctccggaagatagggcaaacggagccgtgccgggggagtttcatcgagcccccgaagtggaccttcaaacgccccccctcgcagggccgatcccgagggtgcgacctacgaggagcgccactcgggggcggaggccgaagcgatcgcggcccggaggccgaggtggaacgcgctccgggggccgaggcagggcgtgacccggaggccgaggccgggggcgggcccgaacccgaggtcgaggtcgaggccgagtctgcccgagggcccgaggcgggggtgctcgccgccgccgactccatcgtctgggaggggctcaatgcccaagttcaagccctggcggacgagcgggcggccctagaggcggagtgggcgcagctcgcggcggaccgcgcacgggttgacgaggggcgccgcgccgtggacgacatggtggaggtggggcacaaaatgcgccaagcccaaccggcggagatccaggcgcgtgaagagacgctggactcggtcatgcgggagacggaggaggagcggcaggcggcgctcatcgcctcgagcgtcttggatgaggcgctgggcgacatccgtttgcagtacgagacccacgccgaggatctggcgaagagagtcgaagacacccgcggagtcctcgacgctgctgccgcccaagagcggcgggcgtcggaggtcgacgcctcgctgcgggctcagtcggcggcgctcgaggccgagcgcaaggtcttagacgagcgtgcccgctccgcgcaagagttcgaggccacgatccatcgacgaattgaggtccttgaccgtaaccagcgcgagcaggacgagcgcagctggaaacaggcgcagcaagcccgggagcttgaggagcacgctcgggcactggaggagcatacccgggcactagaagagcgggcgcgcatgctagaccagtgcgagaccactttggccgcccacgagagaacggcggccgaggcagagtcctcccttcgcctccgtgaggaggccgcagccgagcgcaaccggaccacccttgccgtagaggcttcggtggcccatcgcgcggaggagctgcggcttcgagaggaggcatgccaggaacgggacgccacgcttgccgtacgcgaggccgaggagaaccgccgtggggtggcggcgcgctggctgggtgagcaactcgcgaagcgcgaggaggccgttaccgggcacgaggcccggcatctagaaagtgcccgcgctgagcgcgaggcaatggcaacgaggtcttccgagctggaggcccaggagaaggagctagaggtaggcgggcaactcgctggcgcggagttggtgagccagctcaccgcggctcaaagcactctcgccgacctggggcgcctggtgcaggaccaagtcggggagatcacagcccttcgcctcaccaacgagattggacctggccaactctccgacgccgtcgaccggctggggcgcgcggggcgccgaataggcatctccgtgcgccaggacaggaaactcccgcccacacagccggcagtcgtgctccggctggatgggatggcggcggatttggagaggctagaggaggaggtcggcgaaaccgtgaagtcgtcgtcagctttggcgcaggctatggtggagctggtcctcgcaagtcatcaagctcgtgacaacgacttcctcccgtggcgcgcgctcgaggacttccccccggggacctag

SEQ ID NO: 24397 - DNA, 2296 bp, Oryza sativa
  Clone ID: PAT_MRT4530_29384C.1
ctcgagccgagcacgaagcgcacgagccgctcttacagtcatcccgtggccgcgccgcgcccctccaaaaatccaatcgcgagaggcgagcgccgccgccgccgggatcgccctccagattgcgttgcatgctctgatggcgtctgatatgaggtcactcaacagccaaaagggacagagttgtggagtttcagaccaagcttgccacagcaaaagcaaaagcggcaatgatggaaaaccatcacatgctaaagcaaatggagtttcctcgttgagcgggagtcataatgatgagaaaattttgaaagagaactctggagcatgcaatttaaattccgaccatgccaatcctttatcagtagatgggaccaaagtttctacagcaaggtcggaacttattgacagttcaggccatgatggttgtctgcatgtcaagaatgaaagctgtatggcttgtgatgatctgcttcaagagtctgacaaagaacagcctgggggtacactggaggatctattttcctttaatgatgaagaggatgatgacagtgactgggaaccctctgctcgccttgctttgagcaggtggttttgcttgaactgtacagtgccaaacatggaggggtttacacattgtcagaattgcgatgagcttaagggatctgtggtagttggatatgatgctttcaaagctcatcttgcacaggcagctttgttatctgctgacgcagcgctgccatcagtatctacagctgtcggttttgatgaaagaatgttgctccatagtgagatagagattaaaccaaatccacatccagaaaggcctgaccgccttcgtgcaatcgctgccagtcttgctgctgcaggtatcttcccttcaaaatgtgtcatggtacctcctcgagaaatcactaaggaagaactcctaagggtccatacttcagatcacattgacagtgttgagcagacaaagaacatgctttacagttacttcacttcagatacctatgcaaatggacactcagcatgtgctgccaaacttgcagcagggatatgtgctgatcttgctaacttgatagtatctgggcgtgttcgcaatggatttgcaatggtgagacctcctggccatcatgcaggggtgaaacaagccatgggtttttgtcttcacaataatgcagcagtggctgcattagctgcacaaagagctggtgccaagaaagtcttaatagttgactgggatgtccaccatggcaatggaacacaggagatatttgatggggacaattctgtcttgtacatatcattacatcggcatgaggatggaagcttctaccctggaactggggcagcaaatgaggtgggagttatggatggccaaggattctcagtcaatataccttggagccgtggtggtgttggagacaatgactacatatttgcttttaagcatgtggtgcttccgatagctgcagaatttgctccagacatcaccatcatatctgcaggatttgatgcagcgaggggtgaccctctgggttgttgtgatgtcacacctgctggatattctaggatggcgtccatgctaactgcttgttcacagggaaaattgttggttatacttgagggaggatacaatcttcggtctatatcctcatcagctactgaagttgttaaggtcctacttggggatagtcctgtttatgatacagatgcaactgaaccatcagaggagggcatacagactgtcttacaagtcctgagtatccagcagcaattttggccagttttagttccatcctttgcatcagttctggcactgcagcggtcggttttttccagatataccactgaagtaaacaagatgaaaaggaagcatgcaggaggggcaggacccttctggtggaaatgggggagtaaaaggctactgtacgaagtgctatttgagggccgctgtctgaggaaaaccaaggatacaggcaaagaaaaattgaatgatgaagcagagccctaaatgtgttgctgctgaagcctgactgctgatctcatcaacatccatagtgtagtgggctgactggggttccctgaatgtagcttgcatataccgagccaaattttgactggagaattaagatggtagttcgtgtttttaggtgaaatttgtgaacaaccttgttgacatgtattggatgttcagttgtattagaaatagagtcaagtttaccatcctgtcgtctgtcgaatgatcaccacgtgcagttcaccgcttcaaaaaaaacctgcagcccggggatccactagt

SEQ ID NO: 24398 - DNA, 3302 bp, Oryza sativa
  Clone ID: PAT_MRT4530_29385C.1
actactaatatagtgaacggcaatgcctcaaaatgacattagtctgacataagctgtacagaatgaactaaaagaccaatcagaaatactagcactagtgagactagatcaactcagttcactgaaagtacaagattatttgtcatattattgtatctttaggtcaggccgtcagggtctatactgtccagacaagtgactacttccatcatagttggcctcttcaaaggatcacctttgacacacttgcaagcagtttcgaggacctttagcatttgctcttcgcaccctgtgcctcgaagtgttggatccaacacctcaatctgctttccctctgatctcatctcatgtacccatgggacaagttcctctgatgtagacaagattggaacagggcgcctccccgtgagaagctctagcaggaccactccgaaactatacatatcacctctcaatgtagcaacccatgattgcccatattcagggggaatgtaacccagagtgccaactagttcagttgtgacatgggttatgttgggaaggaccaaccttgacagcccaaaatctgcaatatacgatttgaattctttgtcaagtaatatattgctggacttgatatcacggtggacgatatgaggcttgcagacatcatggatgtaatgaaggccctgacttgctccctgtgcaatcttcagcctggttggccagtcgagaaatgagctggcatcatcatcccaattgtgaagccaatcgtctaaactaccattctccattaaggagtatatgaggagcctcagattgccctggatgcagtaaccccagaagggcacgagattggcatgctgtgccatggatagtgcatcaacctctgcactgaattccctttctgttagacacatttcactattgagcttcttgatagcgatcttggaaccatctggtaactcagctttgtagactagcccatagcctccacacccaatgatatgcgccttgtcgaagttatttgtagctttcacaatgtcagcaaatgtgaggttgatttcttctccctttcctcgtgtaatcattatcaatgaatgctctgaatcagagttgaatgaagctgcttctaaatcaccatcgttgtcactactatttttggttatgaagcgtttgctcctttctgagacaaagaaacaccctagcaacaaaagaatgcaaatccctccaaagaagacaccaaatgatattgcgagaacgatttttttattctgttcttttctggacactgaacttgcttctgctgaactgcagtggtgattgaacctagagtcacaaagctttgggtttccttcgaagcttgagtttgagaatgtatcaaattggcctccagttggaataggcccctctaggtcattgttggaaatattgaatgctgagaggaagttcagattgcttagtccaggagggatttcacctgtgagatggttattggacaaatgtagaacctggaggcttgtgaggttgcaaattgattgtgggatctgcccagataagttgttgaagctgaaatcaagcacaacaagcacttccaactgaccaatcattggggaaatcacacctatgaagttgttatggctcagattcaacaacgtagggaagccagtaagcgtgcggtattgaaatgatggcccgttataaacaggaagctcaaaagcccctgggtccaaatgggctatgtctgatgttgatcttagcattggcaaattcatcaaggtgatcggaatttcttctgtaagtctgttgtctgatacatctatatagaacaggtggtttaaggaatcaatccatcttggtattggtcctgtgagttgattgccatttaaaagtagcatctccagattcgtgagcctggataaccatagaggtattttcccagacaacaagcaactgtttatgtcaagaacttgaagattcccaaaaccatcaatactttcgtcctgtggcatgacctctcctctaaagttgtgcccaataagcagggtggtaatggtgctgcaacttttaaggatctgaagtgcttttgtgatgttagtaagcttgttgtcatcaagtgagaagaaggaaagatacttcagattgattattcccggtgacaactctccatggaaatggttgcctgataaccgtagggctgtcaaattgctgcatgaatagatgctttctggaattgtgccggtgaagttgttgaagtaaagatctaaagtttttagattgtgtagagcggagaaattgactttgccaagatctccactgaagttattgtgcttgagatcaatgattgagagatttgtgcagctgcccagagttccgggcaactcgccagacatcatgttgctgtccaaatgtaactcctccaatctcttcagttggctgatagaatctggaatcttgccaatgaactgattccctcccagatcaagagttactagatttctcagttttgctatctgtgtaccatcaatttccccatgcaaattattgttaggaaaagataggtactccaatgagacatcattgaagagttcacctgggagtgtcccactgagcttgttgtgaccagccttcagaactttgagcatggagcaattaccaagtcctgaggggatgctgccactgaattgattgtaacatagttcaagcacagataaatttgatgagctgtcacaaaaacgagtcggtatcttcccagtaaacttattactgctgacattgagggcgaccagatttttcatcacatcccatatggaagatggaaactgccctgtaaataaattacttgagatgttgagtacctgcagtggcctgataggggttgaagatggcaactcgttgagacctccattcagcctgttaaagctgacgtcaacgatgatgatagtgctggaagacaccaattcttgtggtaaggcaccagatagcatgttgtgggagagattgagacgcagcaatccagtgaggttgccaagagacggtgagatgttcccctgaaggttcctagaagccagagaaacatcagttaccgtcccatcttggctgcaggcgatcccgtcccatttgcagcaatctgtgccgtcctgccatgatgcagagaggcctccatcctgagagagctccctgatgaacttgaggagggagctcctgtcctgctctgtacatgaactggtgagagaggcgaggttgatgagcagcaccagcgcaagggcaagaacaggtatgggaaatttgttgctgtgtttcttgtaatgaagtagctgcat

SEQ ID NO: 24399 - DNA, 404 bp, Oryza sativa
  unsure (1)..(404): unsure at all n locations
  Clone ID: PAT_MRT4530_29386C.1
atggcggtctcagccgtcgccgcccgatctagggccatagcccgcgccgcctcctcctccctcctcgcccgcggcctcctccccacctcccgccgcgccacctgcatcaacaggttgcctttggtgtccgggggcctcctctccacgctgccgctccacagcgccgtcgcgtcggcgcggttacggtccgcgatcgcgcccgagtcacagagctggggtttagtcccccaaggtgaggttcttggtcactgcacgttctaattaccttttccgttgtaactgcctaaacaaattgtgaatgctttgaattttcataatgttcatttcgctatcagaactatgaatgagcttacgagaacttatttttctgtggtaagaatggtttggtgggtaaaaaaaaaaan

SEQ ID NO: 24400 - DNA, 441 bp, Oryza sativa
  Clone ID: PAT_MRT4530_29387C.1
atggtggccgcgacagccgagttcaggcgagtgttctccgcgttcgaccgcgacgccgacggcaagatctcggcggcggagctgcggctctgcatgaaggccgcgctcggcgaggacatgtccgccgaggaggccgaggcgctcgtctcgtcggcggacaccgacgacgacgggctgctcgacgaggaggagttcacgaagctggcggtgcagcttgagatgggagacgaggaggagaggtgcaggggactaatggaggcgttccggatgtacgagatggaaggggaggggcgcatcactccggcgagcttgaaacggatgctgagcaagctcggatcgcatcagggcatcgaggagtgccaaacaatgatctgcaggtttgacctcgatggagatggagtcatcagctttgaggagttcaagatcatgatggatgcatag

SEQ ID NO: 24401 - DNA, 741 bp, Oryza sativa
  unsure (1)..(741): unsure at all n locations
  Clone ID: PAT_MRT4530_29388C.1
gcttgatcttgttgttattgtgtttgttttttttaaaaaaaaaattaaagcccggctgactttttaccttttcaaaaagtctacccagatgtccctggttattacaatagtaaaagcccgcctggggacaaaaacctggaaacaaaattccttccgggaggcccaaaaccttgcctttagccaaaaaacctcccccccccccttgaaaaactttgatttgggtgcaaaccatttttcctcaaacaaaaacagtttctacaaaaacaaattttgcttttttcccaacgggaaacccggggggaggaaaaaaacccggtcccaaaacccccataacaaactcggaaacaaaaaaaaactaatgggccttacaacaatgccccagttttttgcccccaacaaagaacttgccccgggcccaatttttgggcccggggggcaaattcccttttgggggggggtttaaatttcgaaacatggcataactggttcccgggggaaaatgggttcccctcacaattcccccaacataccaaccggaaacctaaagggtaaaacccggggggccccatgggggagctccctccattaattgggtgggcccccctggcccgtttcccctggggaaacccttgtgcccccgtgtttatgaaatggcccacccccgggaaagcggggtgcgtttggggcgtttttcccttcctccccactaaatccngggccgggggntgggggggggggggg

SEQ ID NO: 24402 - DNA, 194 bp, Oryza sativa
  Clone ID: PAT_MRT4530_29389C.1
atggcagctacgggtgctggattccacagcggccgcttcattatcttcaaatatggtaacttcgggaatgctctagaggccgggatacagcagtgctgcggctacgttgtacactgcaacgagcacaggcacaaagcatgggacggatggatgtccgtgccatctcaagatctcaatccccgatctatcgtcga

SEQ ID NO: 24403 - DNA, 2322 bp, Oryza sativa
  Clone ID: PAT_MRT4530_2938C.1
atgggcatcgtcatctacaccgccggcctgcctccgtcgccgccgactgactggtgcctccgcctacacggctggcctattatgccgccgctgttgggcgtctacgacttcaccgccggcctgcctccgtcgccgccgactggtgtccccgcctatacggtcggttggtcacaccaccgttcatgggcgtccacgacttcaccgccggcctgcctccgtcgccgcagactggtgcctccgcctacacggctggcctattatgccgccgctgttgggcgtctacgacttcaccgccggcctgcctccgtcgccgccgactggtgtcctcgcctatacggttggttggtcacaccaccgttcatgggcgtctacgacttcaccgccggctcgcctccgttgccgccgagtggtgcctccgcctacacggctggtctattatgccgccgctgttgggcgtccacgacttcaccgccggcctgcctccgttgccgccgagtggtgcctccgcctacacggctggcctattatgccgccgctgttgggcgtctacgacttcaccgccggcctgcctccgtcgccgccgactggtgtcctggcctatacggttggttggtcacaccaccgttcatgggcgtctacgacttcaccgccggctcgcctccgttgccgccgagtggtgcctccgcctacacggctggtctattatgccgccgctgttgggcgtccacgacttcaccgccggcctgcctccgttgccgccgagtggtgcctccgcctacacggctggtctattatgccgctgctgttgggcgtccacgacttcaccgccggcctgcctccgttgccgccgagtggtgcctccgcctacacggctggtctattatgccgccgctgttgggcgtccacgacttcaccgccggcctgcctccgttgccgccgagtggtgcctccgcctacacggctggcctattatgccgccgctgttgggcgtctacgacttcaccgccggcctgcctccgtcgccgccgagtggtgcctccgcctacacggctggcctattatgccgccgctgttgggcgtctacgacttcaccgaccggccgcctcgtccgccgccgactggtgtctctgcctgcacggctggcctattatgccgccgctgttgggcgtctacgacttcatcgccggcctgcctccgtcgccgccgagtggtgcctccgcctacacggctggcctattatgctgccgttgttggatgcctacatcctcaccgttggctcaccttcgttgccgtcgactggaatggatcagtcagaacatcaccaccggctcgcctcgaccgccgccgactggtgtttccgcctgcacggctggcctttatgccgccgttgttgggcgtctacgtcttcaccgaccggcttgccttcgccgccgccgactggtgtttccgcttgcacggctggcctattatgccgccgttgttgggcgcctacgtcttcaccgaccggcttgccttcgtcgccgccgaccgatgtcctcgcctgcacggctggcctttatgccgccgttgttgggcgtctacgtcttcaccgaccggcttgccttcgccgccgccgactggtgtttccgcctgcacggctggcctattatgccgccgttgttgggcgtctacgtcttcaccgaccggcttgccttcgccgccgccgactggtgtccccgcctgcacggctggcctttatgccgccgttgttgggcgtctacgtcttcaccgaccggcttgccttcgccgccgccgactggtgtttccgcctgcacggctggcctattatgccgccgttgttgggcgtctacgtcttcaccgaccggcttgccttcgccgccgccgactggtgtccccgcctgcacggctggcctattatgccgccgctgttgggcgcctacgtcttcaccgccggcctgcctccgttgccgccgaccggtgtcctcgcctgcacggctggcctttatgccgccgttgttgggcgtctacgtcttcaccgaccggcttgccttcgccgccgccgactggtgtttccgcctgcacggctggcctattatgccgccgttgttgggcgtctacgtcttcaccgaccggcttgccttcgccgccgccgactggtgtttccgcctgcacggctggcctttatgccgccgttgttgggcgtctacgtcttcaccgaccggcttgccttcgccgccgccgactggcatcagtatcttcaacacaagctgcctacgtttgccatggctgccgactggtttcttcacttccatggctgcatga

SEQ ID NO: 24404 - DNA, 495 bp, Oryza sativa
  Clone ID: PAT_MRT4530_29390C.1
atggccgatgcgctgctcctccgacctcaccctcttgcctcgtccagcggcgacggtggcggcagggatagggcgacgtcgatggtgaccttgttggggaagcgtctgtcgagccgagccgggcaggagttcatggggaatgtcgccttgtcttacctagccgaaaagaccaagagcttactagctttagcacgaatccacgcgaggaagaactctgcaactgcaacgattctgggagcagtagatgggagcttgagaattgagatgcattctgaaatcaagcgtcttgctttgttgtgtaaaactgctttgcatgacccgtcggaacaaaacgaggcctactggaaacggtgcacggcggcggggaaggagcatctccaacaggttgtggcggtagtcggcggaggaggtgtcatggggaaggagcagatccaagacgttgcgcacggtcgccaaccgaagcagctgtatgcggtcgctaatagagagggctga

SEQ ID NO: 24405 - DNA, 433 bp, Oryza sativa
  Clone ID: PAT_MRT4530_29391C.1
gtcgactctagaggatcccccccgtaatccaccgtactatacggacgacgacgcggtgcccgccgtgtactcactcgcgcgcgatcgccccgcggacgacgcagccgccacacggacgacgcggcccctgcgcacgcacgcgcaccccacgggaaactacgcgccccgcgctgatttggggccggttttgactggggaggtggacacgtggtcgtccaacgtacgtggcgacccctgccattcggcggcgactagggcggcgattgcgggggtgactccggtgacggtgggcggtgacttcggcgacgggacggcggcacgctctgaggcagagagggcggcgcgttctcaggctgtctcaacccacgacgatgtcgaggagctcaggtacgtcgcagggcttgtcttcgtcttcttgggctggacgtggtga

SEQ ID NO: 24406 - DNA, 843 bp, Oryza sativa
  Clone ID: PAT_MRT4530_29392C.1
atgcctagcctcacctacgccgtccgattggcctcaggccgatctgtaccgtcggtcccgtggaccggcggtggaccactcatgtggtcccggtccacggtggaccggccacctcgagccgctgagatgtggggcccgcttaccggcgccgccccctcccttgatgacctcgaccctttcctaggcaccggtggtgagggtgggcatgatggagttgggtcagccggggtgtccagttgtccagctgccggattcaccgcggcgcaagaggggaccgcccactgcccgttgggggtgcgggcgccggcgccggcggatggagttgaggtcggaaccggccacggcggctccggcggcagggaagaagcagcggctccggcagcggggatgcggcgacagtctacgcggggaagaaacaccggctccggcgatggggaagaatcagcggcgccggcggcggggatgcggcgacaatccacgcggggaagaagcactggctccggcgacggggaagaatcagaggctctggcggcggcagtccacgcggggaagatctccagagaggatgcagcggcgcggcgggagatccgaaagtatcagaagaacacagagctgctgataaggaagctgccgttccagaggctcgtcagggagatcgcacagctcttcaagcacgacatgaggttccagagccacgcggtgctggcactgcaggaggcggcggaggcgtacctggtgggtctgttcgaggacaccaacctctgcgccatccactccaagcgcgtcaccatcatgtccaaggacgttcagcttgccaggaggattcgtggcgagaggctctaa

SEQ ID NO: 24407 - DNA, 1215 bp, Oryza sativa
  Clone ID: PAT_MRT4530_29393C.1
atggccagcctcgatcttctcctcaagctagggtttcgcttcaacccgtctcaggaggaggtcatcacctactacctgccacggctcatcgccggccacccgcccaaggacaccgaggggtacatccaccgcgctgacgtctacggcgccgacgagcccagggacctcgccggcaagtacgcgcccgtggcgaggagccccaatggcgaccggttcttcttcaccggttgcaagcgggtcaaagggaagttctcccgctccgccgggggtggcacctgggtctcgcagtccagcaaggatctcaagaacagggagggcatcaagatcggcgaggtcaagaacttccgcttcaagaaaggtggcaacaacacggattggttgatggaggagtatcacctctgcgggaaagaagccggtggtgtcgtcgagcccgtcgtctgccggatttacgtctccccgagggcggctcctgattcggtggcgcaccaagaatcagccgccctgccgccgcctcaagaactcgtgccgccgccccaagaactcgcgccgccgccgtatcctgcagcacaggcggcgccgcaagctcctgcgccgccacgacaagtgcccgtgatcacgcagcagcaggcgccgccccagaagaggcccgccgcgccggtcgccgagccgccgtgcgccaccaagaagatgaaaggcgctgtctcggcaaaaccaatggcgccgcagagcagcgtgacggcgtccgcggcgccaccccggtgtgccgtggcgccatcgcagcatcatccaccattccagacctacccgacggacccgttcgagccaccggcgccagctgcctcggtgactcagccgtctgtccctgcgacgccagagcaaggccctgcttatgtacccgatccggctgacatcggcatggaaatggacgagcttatgagcttcctggacagtataccagtcgacggcatcctcccttcccagctatatgaatacgacgagctcgccaaagaactggaggacgcgctacaaggaggaggagaagaggacggcaatgacaatccaccgcgtcgtcgcggaagaggtggatgtgacaagcagtcgcaggggggctaccgtgtgcttctgaaggacatgggcgacgatcaaattgaccaacagtggctgaaggtgtctctgaaagactaccaccatctgatgaagagctgtaaattgtag

SEQ ID NO: 24408 - DNA, 200 bp, Oryza sativa
  Clone ID: PAT_MRT4530_29394C.1
tgccggtgtttgtggtcctccactgttcccttgttccctggatgggaatttggcctgtcttattggcctttgggttatttggtttaatttccttgggtggtaattttccccccaggtttccggggaaacccttggaaataaagaaaacccacaagaagccattaatttggagccttgccacaaaccaagttccatttccc

SEQ ID NO: 24409 - DNA, 147 bp, Oryza sativa
  Clone ID: PAT_MRT4530_29395C.1
atgacggcaggcggtggcaaggctgcggcggcggccgtcccagattccatggtgttgacattggtgtggtggcggctgtcattgcaacggaacatctcaggcggtgcgaggctgccacgggatagaggagcggtgcacggcggctag

SEQ ID NO: 24410 - DNA, 754 bp, Oryza sativa
  Clone ID: PAT_MRT4530_29396C.1
cgagcaacggagcaagcgggcagcccacaccacacccaaggatggtggacgcgtggtggccgctgctcgccgcggcgatcccggcggtggtggccggtcaggccttccgcgtgaagcggcggcgggacgaggagcagcgcctcaaggcggcgcgcgggcgcgagaagagctccgacgaggtgttcgtctgcgagcgcgtgtgcacctccaagcggatgctcaagaaggtgggggccttctccaaggaccccatcccggagacctgcgtcaccgtctgcggcgtctccgagctcgacgcctgcgccgacgcatgcgcccggaccgtctgcgtcaaccagcaccaggtccccaactggaacgacgtctgcctcaagaggtgccagagcgagtgcctcaagctctcctccaccctcatgtagcatcccccactgtaagccatcgttgtttgtaccttgtttttggtacaaaccatcaagctcttcttgttcctaatgcaatccttattactacctaagaggagagcttcagacatccatagctatcgtttataaatcatgaggaatggaataggtgaatgactgcttcctgattgttttgtgcttcacatttgatcttcaacaaacaattgtgattgctaggtaccataccatgtcttttgtgaggcgtatccgaggttgagtttttcagctgggccgacgaataacaccagcccaatttatttagtatcagaggttgaatcaccccttttggatgg

SEQ ID NO: 24411 - DNA, 480 bp, Oryza sativa
  Clone ID: PAT_MRT4530_29397C.1
cccacgcgtccgcccacgcgttcgtccacgcgttcgggaagcgtcaacctcccgaatccatcgtcgccgccgccgacgccggcgatgtgtccgccggtcgacaccgtcgcgctcggctgcacgttcggcgccccgctcgggcatctcgttgtcggtcagctcaacttcggcatctcgcaagccaacctccgcattagggtggggctgatctggttcggatgcacgggacgggcgttactccgatcggtttacgcatcgagatccgcttctgactcgactacgaatactgggacttactgtacaatgcactgtcagctaaggtggcgttgtatgtggtgttcggaccggacgactaggggtttcagccgctatttgatctcgatgagaccgggagtggggagaagagcggcttggataataggattgtcgggacaccttagacctcctgttttaattaaagatgctctgtgaattttgtat

SEQ ID NO: 24412 - DNA, 2244 bp, Oryza sativa
  Clone ID: PAT_MRT4530_29398C.1
atggccggccacgacgacgacatgtttgattttttctcccaatcacaagcacatcacgaagccgcctccgttgacgccgacgagtacagatttagccaagcttcctcaggccatggcggatctggtgcaggctaccattttccagggaggggatcggcgggcctggatctgaactcccaagtagaagacttccccgatttcggctcctaccagcagatcctgcaagaagatggtggaggaatacctccactcttccaagccaccagatccgacgtcgccccgtcgcgccgtccagtacctggttccaggggcggcagaagaggtggcagaagccgaggtcgaggccgcggaagggatggcaccattggtgccgccgccggcaatcggatgaggggattcgttcccatggtgagggtgttgtgggctgtgggagctccatgtcccacggtgcgggtgtcatcggccgtgggagctccatgtcccacggtgcgggtgtcatcggccgtgggagctccatgtcacacagtgctacggggtatgggggcttcggtggaggaggatgggatgctgggacgtcctctaccccaaccgaagctgccgaagaggaggactacaacgttgaggacgatgatgaagacgacaacgatggtcagcacacgacttcgatatgtgatctcgtatattttagatgcattatacttttctctggctttgttaggacagaatatgactggatgtggtagaggaccaaataatgaagttactaatgcagatgatgcttggtggagaagaaaagtgaaggagaagccgtgggccaagaaatttagatttggcaatcctgagtacttagacatgctcatagagatgtaccaaggtgtagcagtagatggatcctctgcctatatccgtggacatgaagaagaggaagagggagatgatgcaacacttgagggtctagctataggggctgagggagtaaggggggcagcagtacaggaaggaggtgaggatggttttgggaacagccccatgagcacaagcagcagaaaaagggggagcaacacttgtgatcagtccacagcatcaagtcctggaaagaaaagcaagagtccagtggttaagcttatgagggggttgttacacactttcagcagtgacaatgaaaaggcaaatcagctgatgagtgagcttgtgaatgcagagaagcaaaaggagaacgtcacagagaagcaaaaggagattctcaagcaagaattgctgcattgtcaaagaatgtatagaccggtgtttgagaggttgcatagtgtgcttgtggaaaagtatgaattgaagtctactagaaacatgtcatcaattgaggctttaggactttttttgtggatagtaggtgcaccccaatcaattagacaagttgaagatcgctttactaggtcacttgcaacaatagtttccaagtttgatgaggtgttggatgttttaatacaacttgcaacagatattgttaggccaaaagatccccacttcactactatccataagaagttactgtccccaaaatatacaccgtacttggataattgcattggagcaatagatgggacacatatacaagttgtggtcccaaatgcaactgctgttcaacataggaatagtcataaggagaggagtcaaaatgtgttgtgcatttgtgactttgatatgagatttacttttgttcttgccggatggcctggatcggtagatgacatgagggtgtttagtgatgctcagaacagatttggtcacaagttcccatggccacctgaagaaatgttctatttcatggactcagggtacccaaacaggccgggttatcttgcaccatataagggaataacttatcactttcaggaatacaacgaaggcataatgccccaaaataggaaggaatactttaactactgccattcttcgtgtcgaaatgtgatagagaggtcctttggagtgttgaaaaataaatggaggattttattccacttaccaagctatccacagcaaaaacagagtatgataatatgcgcttgcctagcattgcataatttcattagagatagtaaactagccgactgtgaattcgacatgtgtgaccaagatgaaagctatgttccattgcctgagcaaagtcctcaatcaaatgatccaaccagctctttggatagtcaagtgatgaatcaatttcgggacacggttgccaatggactgtag

SEQ ID NO: 24413 - DNA, 383 bp, Oryza sativa
  Clone ID: PAT_MRT4530_29399C.1
gacacccccaaaacctttaattttaaaaacttgacatgggagatttcgactttaaccagacctcccctaaaaatccatcccccaacgggctcaaacgataatcccatttcccccggggccccccccgaaaaagtacccaacatttaatccgggcccaacccccccgatccaacttttcacgagcgcccccccaaaccccggagcggggggggcggacccggaaaaaccgcccaacccttccccgccggcccccggggggtatccccatccccccggagttccccccccccccctggaaatggaaaaaaccccagggaagacccaccgcccccgggggagtgaaacccccggccttttcatccaaataacaataaacaatcccc

SEQ ID NO: 24414 - DNA, 354 bp, Oryza sativa
  unsure (1)..(354): unsure at all n locations
  Clone ID: PAT_MRT4530_2939C.1
atgagctcgtcgtcgtcgtcggcgcagctgaagcggctgaagccgctgtaccagcatgtggtgaacaatttcctcgtggtgatggccgcgccgctggccgtggcggcgatcgtcaacgcggcgcgggtcgggccggacgagctgctccggatggtgcgcgcgctgcggccggtgcacgtcttcctggcagcgttcggcccggcggcggccgcgacgctgtacctcatgctgcggcccgcgccccgcgtgcggttcatgacgcggctgctcgagcggtcggggctcggggaggagacgtgcctgccgccggcgcaccacttcatcccgccgtacggacncggaggcgtgcgcgcc

SEQ ID NO: 24415 - DNA, 1881 bp, Oryza sativa
  Clone ID: PAT_MRT4530_293C.1
ccggccgggctaccacaccgcagagaaaggcgtcttcgtactcgcctctctccgcgccctcctccgccgccgctcgccgccgttcgtctccgccgccaccgccgccgccatgagggagtgcatctcgatccacatcgggcaggccggtatccaggtcgggaacgcgtgctgggagctctattgcctcgagcatggcatccagcctgatggacagatgcccggtgacaagaccgttgggggaggtgatgatgcttttaacaccttcttcagtgagactggtgctgggaagcatgtcccccgtgctgtcttcgtcgatcttgagcctaccgtgattgatgaggtgaggactggtgactaccgccagctcttccaccctgagcagctcatcagtggcaaggaggatgcagccaacaactttgcccgtggtcactacaccattggcaaggagattgttgatctgtgccttgaccgcatcaggaagcttgccgacaactgcactggtctccagggcttccttgtgttcaacgctgttggaggaggaacgggctccggtctcggttcccttctccttgagcgtctctctgtggactatggcaagaagtccaagctcgggttcaccgtgtacccgtcccctcaggtctccacctctgtggttgagccatacaacagtgtcctctccacccactccctccttgagcacaccgatgtcgctgtcctgctcgacaatgaggccatctatgacatctgccgccgctccctcgacattgagcgcccaacctacaccaacctcaacaggcttgtgtcccaggtcatctcctcactgactgcctccctgaggttcgatggtgctctgaatgtggatgtcaacgagttccagaccaacctggtgccctacccgaggatccacttcatgctttcctcctacgccccggtgatctcggccgagaaggcctaccacgagcagctctccgtggcggagatcaccaacagcgccttcgagccgtcctccatgatggccaagtgcgacccgcgccacggcaagtacatggcgtgctgcctgatgtaccgcggcgacgtggtccccaaggacgtgaacgccgcggtggccaccatcaagacgaagcgcaccatccagttcgtggactggtgccccacggggttcaagtgcggcatcagcatcaactaccagccgcccagcgtcgtcccggggggagacctgggcggcatcaactaccagccgcccagcgtcgtcccggggggagacctggccaaggtgcagagggccgtgtgcatgatctccaactccaccagcgtcgtcgaggtgttctcccgcatcgacatcaagttcgacctcatgtactccaagcgcgccttcgtccactggtacgtcggcgagggcatggaggagggggagttctccgaggcccgcgaggacctcgccgcgctggagaaggactacgaggaggtcggctccgagttcgacgatggtgacgagggtgatgagggtgacgagtactagagaggttcagggttcttgcctggtgccttggcaatgcttgattactgctgctatcctatgatctgtccgtgtgggcttctatctatcagtttgtgtgtctggttttgaaaaacatttgcttttcgattatgcagggtttgcttgtagctttcgctgctgtgacctgtgttgtttatgtgaaccttctttgtggcatctttaatatccaagttcgtggtttgtcgtaaaacgaagcctctacttcgtaaagttgtgtctatagcattgaaatcgtttttttgctcgagaataattgtgacctttagttggcgtgaaaaaaaaaaaaaaaaaaactcgagactagttctcctgcagcccgggga

SEQ ID NO: 24416 - DNA, 183 bp, Oryza sativa
  Clone ID: PAT_MRT4530_29400C.1
gggagagccaagcacatcaagccaaaaccatttgattatctgattctgatgtaactgtcattgtatcacattactctcagtgattcgaatttccaaaaacaagcattgacgcaatgaacatatagcagcatttgacaaacttgtagcaaactactgaacaccacatgattttatgtgtgcctt

SEQ ID NO: 24417 - DNA, 183 bp, Oryza sativa
  Clone ID: PAT_MRT4530_29401C.1
cagattctctgcaacaaatatatggatatcaacatggtagaggtcttagtgcagctgctagacgtccactacgtgctcgcggtgtccgctaccatggcggagtgccaccatcaagaccaggcggtgtacactccgagcccgctatgtaagtcaggaatgggctacccgatgtacccggtcccg

SEQ ID NO: 24418 - DNA, 192 bp, Oryza sativa
  Clone ID: PAT_MRT4530_29402C.1
atggcaagcgcgcagaatttcggttgggtcgtcgactcgcggctcgcgggcgctggcgggctgggccgtggctgtggtggatctacgacggatggaaaaagtacaccaaagaggatctcgccctacgcgacggcgagctgcatctgcagctgcgacgcctggttctgcaggaaggagatggcctcgacgtag

SEQ ID NO: 24419 - DNA, 975 bp, Oryza sativa
  Clone ID: PAT_MRT4530_29403C.1
atggcgttttggtggtggttttgtggatttggagtggaggccggggtggagcttgatgtggcgaagccgtcggtggaaacggtgcagcacggcggcgacgggaacggcggtggtgggcggctgaatgatgccggcaagcggcggaggttggtggcacggtggggcggctttccggtggctattggggaaaatggagcagctgccggggtgcggcaaagagcggcgaacgcgatggcgcaagcggcgcggcgcggggacagcggcagcggcggcagcggccggctggagggtcgctggtggaggggaaccgatttcactcggtttgggcgcgagggcacgagtgggagggctggaatcggcggcgacgtgggcggcaacaggcggcatggcggcttcgggcggttgctggccgggatggaggaagcaaaacatggattcaagtgcatatcacttcttgttgattatttgagcatggtgtttatggatgaagaggaagaaactacaagtaaagccttggtgcctctagccgataatgtgaaaacaaccttgctggatatctcaaagtggcttgaaggctccctagaaactctggtggtcagttgtggatcaatcagagatagattccttgtaatctacgaccaactcccagatgaactagccgatgttatcaccccagcggcatacctcgaacagcatcagctcaagcttgaaaaggctaaacaaagggttgctgatcgccgtgaaagaaaagatcttgaggccaccatccaggctagtaggacttctattaatgaagaaaaggcaaaacttgatgagttggaagctggtccaaggtccactcaagccaacatagatcggctgaatactcggaagatagaactcctagccgaattggagcagtgcaatgcacatattgctattgaagaacataaacttgccgatctgcccaaagctactgaggatcagagatcatag

SEQ ID NO: 24420 - DNA, 240 bp, Oryza sativa
  Clone ID: PAT_MRT4530_29404C.1
atgccgtgccgtgggccgagccttcgggcctcgggccttatggccatctatgccccgaaagcatgggtacccggcaggatctgcgagcaagagagtggtttatggtccaaggggttgggacagtggcagccatgtgatgaattcacaaagaccactactgttccaccgtacaactcgaagaactcatggtgctgcggtgaagctccttgtgtctgcggaagtgacgaatgcacgaagtag

SEQ ID NO: 24421 - DNA, 624 bp, Oryza sativa
  Clone ID: PAT_MRT4530_29405C.1
atggagcagcagttgtcctcgccgtcggcgtcgcaacgtggcggcgggagggagctgcagggtccacggccggcgccgctcaaggtccgcaaggagtctcacaagatcaggaagcaggagccggtgcagcagctccggcagccggtcatcatctacaccatgtcgcccaaggtcgtccacgccaacgccgccgacttcatgtccgtcgtgcagcgcctcaccggcgccccgcccaccgcaccgccgcagccgcagccgcaccaccccacgctcttggcgcagatgccgccgcagccgtcgttccctttccacctccaacagcaagatgcttggccccagcagcagcactcgcccgccgccatcgagcaagcggcagcacggagctccggcgccgatctgccaccgttgccgagcatcctgtcgccggtgccggggacagtactgccagctatcccggcgagcttcttctccccgccgtcgttgatcagccccgtgccatttcttggtgcaacgactacttcttctgctgcgccgtcgacgtcgccgtctccaatgggcggcagcgcctactattgggatctcttcaacatgcagcagcagcagcactaccaccaccaaaattaa

SEQ ID NO: 24422 - DNA, 1369 bp, Oryza sativa
  Clone ID: PAT_MRT4530_29406C.1
cgggctgcaggaattcggcacgagggactcgacgcgccgcgatgtcaaactacaaaggctgctgctgctgcgcctctgcaccacctccacctccacgcctccacacggtatcaccacttccgccgccgttgccgccgccgcagccgccgcggcatacgcgtacgcggaaccgctaggcctcacccgcgcgcccttctcctcctccgcctcgtcgccagccgagacgatggcgtccgcgtcgccgccgccgtcgacgtgggtgatcctgggcagcatcccgcgcgtctgcggcgccgacgagaagggggccgggggcgggatccctgcgggcgccgatctctccctcgcgctcaaggcgcccccgcgcgtctcgctgctcaccatcccttcgcggatcttcccgagcgccaccacgtccgacaacttccccagcgtcatggccgccgacccctccggcctcctcctcctccacgccgaccagggccgcgccaagggccccaccgtcatcgaccgccccggccgtcaggagttcatgtggcgccagttcgtcccgggctacttcgtcctcgacgccgccacggccaccgcggtcgctctccccgacccggagctcgtcatgcacatgggccacatgggactcctcgcctcccccgacggcggcggccgctacgtggtcgccgagctccagcccatcctccacgccgaccacgccacgctcctctgcttctcctccgacgtcggcgagtgggtcgagaaggaggtcgcctacccgttccctccccggcagttggcccccaacggcgccgtctcgcactccgggaggctctggttcgtcgacctctcctggtgcctcatcacctgcgaccccttcgcccccgcgccggcgctgcgcttcgtccctctcccgccgggcaaggagctgaggtgcagggaagcttgcgggccgcccggccggctccgctgcgtgagggtgagcgccggcaagctgcggttcgtggacatgtacaaggcgaccgctccccatcagcgcggtcctcacaagatcagcgtgtggacgctggccgatccggactccgaggagtggacactggagcacgaggcgagcttcgccgagatctgggccgacgacagctacaaggcgaccgggctgccagacaagatccccgtgctcgcgctcatccaccccgagaacccggacgtggtctacttcttcctggaggagcacctcttcggcgtcgacgtgcgcgcgcgcaaggttgtggggtctgaggtctacgagctggtcgcgccgccgagcgaggtcctcgctactcgcttcgtccgcgcttgggagctgccaccggcgctctcctcagaaaatgacatctga

SEQ ID NO: 24423 - DNA, 769 bp, Oryza sativa
  Clone ID: PAT_MRT4530_29407C.1
tttttttttttttttgaagtcaatcatcaggcatcagcgaggtagctgcatatatttcctcttgccaagtctagtaggtcatacaaaatccatcaagttgcttccttcaaattggcagctagtagctggcaattttgactcctattcatacactgaagcaatcacctaaccatctagcaacaattttaaaaagaaagtactgtcttgcctgactcgatgtataattgtaccaaccattgcataatcctacagaacattcatatccctcttgaattcaaccatcaagcacatcaggaaggatggtcggtggcttcgacaaactgaaagtggagttcatcgaccaagatgagagtgtgcaggtcgttgcagacaccatcagaagctccggtgagattcctgaaaggtatgccaggcctgagatggaggccgatcctgtcatcatcgacaccgatggttacaatctgccggtaatagatatgtcaaggttgatcaatcctgagttctccgaggaggagattgccaagctcggatcagcctgtgaggattggggattcttccaggtttgggaccatggggtggatggggagttgctgcaacggatcaaggatgacatcacagagttcttcagacttcctctgcaggagaagatgtccgtggcgatcccacccaatggcttgcaggggttcggtcaccacttcgtcttcttcaaggagcagaagctggactgggtcgatttgctcttcctcaccacacgcccagtggaggacag

SEQ ID NO: 24424 - DNA, 388 bp, Oryza sativa
  Clone ID: PAT_MRT4530_29408C.1
gggggtggggttttttttttttttttttttttttttgggaagggaatcgatacaccgatttatcaggacacccactcccacacaataatttagagacaattccggaggtcgggaaacaggggaatttcgcttccaccagacaaaacccagggcggggggagagctatacacaacgggcccccagattaaaggcccccaaagaggccataaggggcaaccgggccgggcaccgcagcaagggccgcagcaaagcacaactgggggcaaaaaatggggacgggatccggttcggccacccccaccagaccaccagccgggagacaaccccatcagcttaataggcggggccaaccaaccttcccccctggttcctcctcgcggccccaaa

SEQ ID NO: 24425 - DNA, 267 bp, Oryza sativa
  unsure (1)..(267): unsure at all n locations
  Clone ID: PAT_MRT4530_29409C.1
atggccggcagacggcaggggggcaaccttgcctggggaccgcgcctggcgccgtgcttggagacgacggtcacgtggttggtcgccgtgatgaagcggcttctcgacttcaacccctgcgccccactggagtcccagcagtacacggggcaaggccccgatgggattgaggcctncaatntgacgagatgctacagtcaatanggtattaaagatttgattggaatgaaaggttttttgaaaaggatacttgataatgtaacctaa

SEQ ID NO: 24426 - DNA, 2857 bp, Oryza sativa
  Clone ID: PAT_MRT4530_2940C.1
tgatatcaacaacgacttcaccgccggcttgcctccatcgccgccgactggtgtctccgcctacacggctggcctattatgccgccgttgttgggcgtctacgacttcaccaccggcttgccaccgtcacggccgactggtgtctccgcctacacggctggcctattatgccgccgttgttgggcgtctacgacttcacagtcggcttgcctccgtagccgccgactggtgatctcgcctatacggttggttggtcacaccgctgttcatgggcgtccacgtcttcaccgaccgaccgccacgtctgccgccgactggtgctttcgccttcacagctggcctattatgccgctgttgatgggcgtctacgtcatcaccaccggcctacctccgtcgccgccgactggtgtccccgcctatacggtcggttggtcacaccaccgctgttaatgggcttcatcatctacaccactggcttggttccactggcgccgactggtgtttttgtcaccattgatggactgctttattcccacatcggctacttctgctatcaccaccggctcgcctcgaccgccgccgactggtgtttccgcctgcacggctggcctattatgccgccgttgttgggcgtctacgtctttaccgaccggcttgccttcgccgccgccgactggtgtttccgctaggggtggatatcgagccagctcggctcggctcggctcggctcgctaacgagccacgagcttcctggccagccctagtttccgcctgcacggctggcctattatgccgccgttgttgggcgtctacgtcttcaccgaccggcttgccttcgccgccgccgactggtgtttccgcctgcacggctggcctttataccgccattgttgggcgtctacgtcttcaccgaccggcttgccttcgccgccgccgactggtgtttccgcctgcacggctggcctttatgccgccgttgttgggcgtctacgtcttcaccgaccggccgcctcgtccgccgccgactggtgcttccgcctgcacggctgacttattatgccgccgttgttgggcgtctacgtcttcaccgaccggccgcctcgaccgccgccgactggtgtttccgcctgcacggctggcctttatgccgccgttgttgggcgtctacgtcttcaccgaccggctgcctcgtccgccgccgactggtgtttccgcctgcacggctggcctattatgccgccgttgttgggcgtctacgtcttcaccgactggcttgccttcgccgccgccgactggtgtttccgcctgcacggctggcctttatgccgccgttgttgggcgtctacgtcttcaccgaccggcttgccttcgccgccgccgactggtgtttccgcctgcacggctggcctttatgccgccgttgttgggcgtctacgtcttcaccgaccggcttgccttcgccgccgccgactggtgtttccgcctgcacggctggcctttatgccgccgttgttgggcgtctacgtcttcaccgaccggccgcctcgtccgccgccgactggtgcttccgcctgcacggctggcctttatgccgccgttgttgggcgtctacgtcttcaccgaccggccgcctcgaccgccgccgactggtgtttccgcctgcacggctggcctttatgccgctgttgttgggcgtctacgtcttcaccgaccggctgcctcgtccgccgccgactggtgtttccgcctgcacggctggcctttatgccgccgttgttgggcgtctacgtcttcaccgaccggccgcctcgtccgccgccgactggtgcttccgcctacacggctgacttattatgccgccgttgttgggcgtctacgtcttcaccgaccggccgcctcgaccgccgccgactggtgtttccgcctgcacggctggcctttatgccgccgttgttgggcgtctacgtcttcaccgaccggctgcctcgtccgccgccgactggtgcttccgcctgcacggctgacttattatgccgacgttgttgggcgtctacgtcttcaccgaccggccgcctcgaccgccgccgactggtgtttccgcctgcacggctggcctattatgccgctgttgttgggcgtctacgtcttcgccgaccggccgcctcgtccgccgccgactggtgtttccgcctgcacggctggcctattatgctgccgttgttgggcgtctacgctttcaccgaccggccgcctcgtccgccgccgactggtgtcaccgcctgcacggctggcctgttatgacgccaactgatgctatcttcttcacggctggctacatcaccatcaccgctaataagcatcatcatcttcaacgcaagctgtctacatctgctgctgactagtgccctcacctctacgtctggtttagacagctaccactactgatggacatcatcgtcttccgttgccgactggttatgccgccgccgactggtgcttttatcttcacaactgcgcgtcttcgctaccagtttgcttctgttgccgccgactcgtgttcacttcatcacggcgatgcaactttgtcatcatggtggagcgacttcatctttattatcttcgtcactggcaaactctattgctgctacttcgcaagttttgctacttcaccaaccacgacgtctttgtgaacctcgacatctcggcatgcgatgccgtgttattttactacaacaagtggctctccaatattcaggatttctacttggacatcttcaacacatatcttcaatcaagcaatgactattcgatgacaagaagctacagttctcgactctatgtttagttgtttcccaac

SEQ ID NO: 24427 - DNA, 1117 bp, Oryza sativa
  Clone ID: PAT_MRT4530_29410C.1
gcacgaggattatctgtggccttgtgattggatccaggttgccgggcccccccccgccgccccgaccgaccgctccccgcgggcccccccgcgccccacggcgtccgcgccgagcgaacacacagggtagcgctcgcgtagtcgcgtactccccggcctgctcctcacacagacgcgatggcccagggaagaggcagtgcagcgcaggggctcgccctcggcttgctcctcgtgtgcctcctcgtcggctcagacgtcgccgccgccgccacctacaacgtcgactggtcgttcggcgcggacagctggtccaagggcaagaacttccgcgccggtgacgtccttgtgttcagctacgacccgtccgtgcacaacgtggtggcggtggacgccggcggctacagcggctgccgggagtccggcaccaagtacagctccgggaacgaccgcatcacgctcggccgcggcacgagctacttcatctgcagcttctccggccactgtggcgcagggatgaagatggccgtcaccgccagctgaagaggaagcccacgcagcacaaaagcagggccaggctgctgccgctctagcctggagctatccatattggacatgtgtcgcccgaccagcaataataagaggcaggcccccgccccgcgtccgccggcttggttggctgacgcggggctggcgtatcactggcttctgggcggtgtctggggagtcgtccggggggcggcacgcctccccccgggccccgcccccggcgcgcgcgtcgcgcgccctcgcggtgccgggcgactgccgccttgcaggcgcgcgcgcagccggcgttcagcgcccttgccgccgggggtcccggccgtcgccgcctccttccccccccccccgccttgccgctgcgctgcccggccctcccccgcatgcaccctcgctcctgcccctgtccccccccgcgcgcccgcccacccgcgatgggtgggcccgtcatgcgcgcttccccccgccagcgcaccacacacactacgcctcccatagtatacgtgtgagcggcgaccatagaaagagacaagagtaagaatactcgattcggactctcgcgccctcgcccacccgt

SEQ ID NO: 24428 - DNA, 2096 bp, Oryza sativa
  Clone ID: PAT_MRT4530_29411C.1
atggcgccgctccctctccccctcccgcttcccgccactcgccaccctcccaaaccgcacgaggcctcggcctccgcctccgcctcgctccacgccgcgctcgcctcgctctcccagcagtgcggggcgggaggcggaggcgggggcgccctccgcgacgccttcgccctcgtcgcccgcgccgagcgcgacgcgtgccccgcagcggtggtctcggtcggcccggaggcgtacgcgtccctcctgcagtgctgcgtcgcggcggggtgcctccgcgcggggcggcaggtgcacgccgccgccgtcaagcgcgggccccgctactgccgccacgcctacatcggcaccaagctcgccgtgttctacgcccggtgcggcgcgctcggcgacgccgagcgcgcgttcagcgcgctcccggccaagaacgccttcgcgtgggccgccgtcatcgggatgtggagccgcgccgggctgcacggcaaggccctcgccgggtacgccgccatgctcgaggcgggcgttcccgcggacaacttcgtcgtgcccaacgtgctcaaggcctgcgcggggctcgggctgcttggccccggcagagcggtgcacggttacgcctggaaggcgggggtcgggaactgcgtgtacgtgatgagcagcctggtggacttctatggaaaatgcggcgaggtggatgatgcgcgggaggtgttcgacgtaatgccggagaggacagtggtgagctggaactcgatgctgatggggtatatacacaatgggaggattgatgaggctgctgacttgttctatgagatgagggtcgagggcgtgctgccgacaagggtgagtgttctgagctttctgtccgcatccgcggatcttgaggttcttgatgggggaaggcagggccatgcagttgcagtatcaagcggcctggagatggatttgattctgggcagttcaatgatcaacttttactgtaaggttggtttggtggaggctgcagaggtgatatttgagcagatggttgaaagagatattgtcacctggaatctgatgatttcaggatatttgcaggatgggcaaactgacaaagcccttaccacatgccatagaatgctggagagtggcctgaagtttgattgtgtgacgttagcgtccgttatcatggcttgcgtgaaatcttacagaatggaggtgggtggagctgctcatgcttacgcagtgagaaacaatcttgaatcagataaaacggttttttgtagcctgatagaattgtattcaagtagtgggagaatcgaacaaatgcgcagagtatttgattcaattagacggagagatatagccacgtggaaagcgatgatctgtgcttatgcagaccatggaatgggttctgaggctctgaagcttttatatcaaatgcagcttgaaggcacatctccaactgcagcatgttgggattcagtactttcagcttttattcgaaatggacagttagatgatgccctaagcaccttctatgagatgcttcaaacgagcacacgccccaatctgcggacatggagtctgttaataagcggcttgtctcgaaatggtatgcatcctgaggttatgaatctatgttgcaagatgcaagaagtagagccagcacctagtccaacaatattttctgcagcacttcttgctgttaaatctgcagcttcagtacagtatggaaaagcaatgcacgcatgcattgttaagaagggcctattattgtcgaaatctgtggtgcagtcgctgctaaacatgtatggtagcttcaatgatagaggcacagtagagagtttgctaagatttcttgctgctgcacagtaaataatttcagggcgtcaagaatgtggtgctagtaaaataggacatacaggtttacaggtttacagctgtacataaatacatgggcggtttgcacatatgaattcacattcaataatacaattcctattttgagtgatggagtatggactaaatcagagtggtcatgaaacaaagatacgtcataccagtttgatacgaaataacatctcttacatgattgtattaaccttgcagatacattacag

SEQ ID NO: 24429 - DNA, 207 bp, Oryza sativa
  Clone ID: PAT_MRT4530_29412C.1
tgttaaggatactcttttgaagaacagaattgggggttatgatacaatcattggcgggaaagacggctactaccttactggtgctctgcagcataactttccatcttaaaatgaccattagatcgacaattaacacagtactacgctggatgctcaactcacaagcatgctgtgaattgaacgagtggtggtatgagggacaatgtc

SEQ ID NO: 24430 - DNA, 142 bp, Oryza sativa
  Clone ID: PAT_MRT4530_29413C.1
acggccctacctttttttttttttttttttactttttaacatgattaaccatcagatagcatttttgcattttgcctggtcatcccagcaagcacccagaagatatgcccttgacagaggctagaaaaggtcaaacacccac

SEQ ID NO: 24431 - DNA, 487 bp, Oryza sativa
  Clone ID: PAT_MRT4530_29414C.1
ctggtaccctaggtatcgagctggtacctaggtatcaggccttggtacctgggtatcagtgtgataccccaagagagagaaggaggaggagtagatctggtgcctaccttgtgccattccgtcgttcattgacgtgcctcgctccaaaccgccaaacccgtggctccattgacgccgcctagagcagctcctcatcgctcatgttgtgccaaagcactcgccccgatggccgcgtccaccgctccccggccgtaggaggcgccagcgccgccgaggaggagggcagtagcggcgaggaagctagcggcaagaacaacgaagaggaggagcggcttgaggagcttgagggggaggcttctcgacggcggccgtcgcctgtggcggtcgggagccccgccggctgtcgtccaggtcgtccgcgggggctggtggtgatggcaccgttgtcgtcgtcgctgtcgccaccgtcgtcgtcgtcgtcgccatt

SEQ ID NO: 24432 - DNA, 397 bp, Oryza sativa
  Clone ID: PAT_MRT4530_29415C.1
cgggctgcaggaatcggcacgaggctaaaccgacagacatggttgtgtcaatagctcttgttttacatggacctgtaatgcaaaaggccaaactgaattaccttattttacaccaatatttcaggttcgtttcctttttctctgaatcaacatgatcaattcttggtttgattctttacatgaaatgtacatatggtttggaaagaccatacatgattatcatacaatcagactagcaagacgttgatcagttagttctcatgaatactgtctcttaataattctcttgttgctcagatgtttgctgcatctgttcatccatctgcatgagatgtttcataagtattgttcattgcttctgtcgtgttacagacttgatgggggttcccaattcttt

SEQ ID NO: 24433 - DNA, 1478 bp, Oryza sativa
  Clone ID: PAT_MRT4530_29416C.1
cggcacgaggccgcgagctcatctccaactcctccgatgctcagctgcggcggccgccgccaccgccgccgccgccgccgctagccctcgcgtttgcacagaggccagcattcgcccgcgccgccgctggctctctcccttctcctgctctgcgatatacgacgcagccgcagccgcagccgccgcggggaggagcaggagggaggagtgtgtgtggccgccttcctctcctcgccgccacggcggccgtcgccggagggaagcgtccggtgcctctccaaccaagctggccactggcagtataaatggaagttggtgccagctctataatggaggatgccaacggagtagtcgatttggatgttgacattgttggcctagaaagtggtgctgcttgcagcaaatttgtcaaaactgaagatcctgatgctacagagtgttcaagttcttttggggacactctgtcagggtcagaagatgatgcaaggccttcagagattagtgacattgaggtcgactcaccattctgccgctatcctgctaatggtgatgctgctgctctcatggatgcagctgtttccgacaatttggatagattattaaagaagactatgaagaggaggaggagaaagagaaacgaggagaaaatgaatgcttcatcgtacatctcaaatcacactgtattctcttattatgagaaaacggaagcagatgccttttctattgatgacgatgaggacacagatgaaaacaccacagttaacaatgaaactgattggctacttggaattaagagaggtgaagctactgtcgagcagattcttttgagcattcaatctgctcaagataaagtgcttagcctgagatctagtctcaagaaggcaatggccaaaaagagtaagggagcaatccttaaagtcaacacacacatgaacggtgcacagagctcaagttgctcaccaggaaagggtaaagtgcttgaaagatcaccaagggacatgtcggattgtgatatggatgatgccgccatgcccgagagtgctctttcaagttatggagaagctaatgatatggatatttttgaaagcaccatgagcttattgtcggctgaagttccacatcagatgggagaatttcaccagagttctgaagatgtattgattgacaatcaagcagctgaggaagggtatcagaactttgaggtgatcagccatccatgcaagcgcctaagggtatcggtcaagagagaaagcggggcgcactccgaggatgagagtgttgcccccacagtctctgtgaagaaagaagctcaggaagaagccacaaccagcttcggtctccaggcagcgttttttaagcccggctacacaggcaagcggagaaggaggatgcctaaaattcaaagacgaggcggttcatccgcctctcctttttcgtcttggatttcctctcgtattcgtaaaaagcggcaattctaa

SEQ ID NO: 24434 - DNA, 636 bp, Oryza sativa
  unsure (1)..(636): unsure at all n locations
  Clone ID: PAT_MRT4530_29417C.1
ctgacncgtgggcggactcgtgggcgcgcggcaactagacaccgactagggggtctgcggtgccgcggttcggcgactgggactcgaacccggcgtcggttgacggctacacgcacatcttcaacaaggtgagggaggagaagcagaccggccaggccgccgggaagccggcggcggggctcggcaagggcggcgccgccgccgccggccacggcaacgccgccaagcgataccacgacgacgacttcgcctccacgaagtgctcctgctttggatggtgcaaatagagatggattttgaggctgttatcaatgtacttgtaaattgcagagaatgggattttcgtttccccagtgcgattcatcagcttcgaaactgcatttggtcatagattatttatttggaagtggggaaatatacattacagtatagttcatgcctgctgtaatggtagattacgtattggattgtttggttccttctgtactggatttacatgcttgtaatggcaggttaaagcttgggctgtttcttgttcttatcgtcatttaatttgtcccttgtcaacacagaaagtccattatgcacgtattaatctatgaaactagatttctggtaaaaaaaaaaaaaaaaaaa

SEQ ID NO: 24435 - DNA, 375 bp, Oryza sativa
  Clone ID: PAT_MRT4530_29418C.1
tttaaaaattgcggttgttccactgaatccttgtggtggaaagttctatgtccaaacagctgggaccatagagcggctttcattcacaacaggctgcaacttaaaacttaattattcacctgctaatgatgcttccctatctgctggaagggggaaatagttcttgcctcagttaagtgctgacaactcctggaatagagcaatgattgagaatggacctccaggagccgtattatctcaccaccactgggccgaaagatgcttcctcaaccctgagggcctggaagaaaaaatcttgctgctatattcctcctgctgacccatcaatttcctctactcctgctcttgctaagttgtgcacccttgccttcataa

SEQ ID NO: 24436 - DNA, 367 bp, Oryza sativa
  Clone ID: PAT_MRT4530_29419C.1
aaactaagtaccctggggaaggaatcttgcttaccatatcattacaccttggtcttgatactgctctacaattatgaataacatcaattacaataaatataatcgagaagagttctaaatgaaacaatgaccgccccatccttcaattttcttccctccaaaacacatgtaaactttcaattcttcatacatcttttttttcaaaaacaaaacaaactattggaatggccataaccagtacaagatcattttactctacaggttggccaattatttgtatacgtcaatttttattttggattcaatcttacattcagatatcctttaaaaaatgtattaaaagaattcatgcttcgctcatacaata

SEQ ID NO: 24437 - DNA, 1434 bp, Oryza sativa
  Clone ID: PAT_MRT4530_2941C.1
gtccgcctgcgaaaataggttcatttttgcttgctgttgccaactaacatcttcaccgaccggccgcctcgtccgctgccgactggtgccctcgcctgcacggctggcctattatgccgccactgttgggtgtctacgacttcaccgaccggctggccttcgccgccgccgactagtgttctcgtctatacggttggttggtcacaccatcgttcacgggcgtccacgtcttcaccgaccagctggccttcgccgccgccgactggtgtttccgcctgcactgctggcctattatgccgccgctgttgggcgtctacgacttcaccgccggctggccttcgccgccgccgactagtgtcctcgcctatatggttggttggtcacaccaccgttcacgggcgtccacgtcttcaccgactggctggccttcgccgccgccgactggtgtttccgtctgcactgctggcctattatgccgccgttgatgggcatcttcactttcatcgtcagttgcctcaagctgcttctatggctggtgttttcattgctattaatggatgactttgttcccactttcttctttatatgatattttccttttcctctgcctcactacatcaactggtttgccgttgactagtgagtcgggggctacagatgttatatcatattttttaaacaatttttcataatatttatcttgattgcttgcgacatgatccaaatccagatatgcataaaagggatttatggctttaagcttatctcttacgctccaggaatggatcagtcagaacatcaccaccggcttgccgtcgtcgccgccgactggtgtcttcgcctatacggttggttggtcacaacaccgttgttaggcgtctacatcttcactgccggtttgctttcgccgccgccgactggtgtcaccgcctgcatagctggcctattatgccgctattgttgggcgtctacatcttcaccgaccggccgcctcgtctgccgtcgactggtgtcaccgcctgcacggtcggcctattatgccgctgttgttgggcgtctacatcttcaccgaccggccgcctcgtccgccaccgactggtgtttccgcctgcacggctggcctattatgccgccgttgttgggcgtctacgtcttcaccgaccagccaccttgttcaccgccgactggtgtttccgcctgcacggctggcctattatgccgccgttgttgggcgtctacctcttcaccgaccggccgcctcgtccgccgccgactggtgtttccgcctgcacgtctggcctattatgacgccaactgatgctatcttcttcacggctggctacgtcgccatcaccgctaataggcgtcatcatcttcaacacaagctatctacgtctactgccgactagtttcttcactcccatggctgcatga

SEQ ID NO: 24438 - DNA, 576 bp, Oryza sativa
  Clone ID: PAT_MRT4530_29420C.1
ggccgcgggttttttttttttttttttctttttttttttttttttttttttttttttttttttttttttttttttttttttttttttaaaaaaaaaggggggccaaaaaaacccctttggttaacaaataaataggattttaaaggaatttttaaacctcctttacctttttttcccgtttaaaaagggagcatcctttttttcacaaacccaactttattttttcccaaaaatcctttgggttaaaatctttccagggggagggaagaggccttgggcccccttgtaatgccgggggagccccttgcccaggggggtttggggtttagtttggccccccccgcccccgggggaaacgtcaacgggccccccctccaccggaacttcgaccggcctggagtaggccacccaaaccttgacccttccgggccctttacccaccagggggggggggggccctttgcccccccccccccccccttggttggccccaaaaaattttttttcaacaagcagcgccgtcccgagcccccctccttaagctcgccggggttggttaaaacggacccccatttg

SEQ ID NO: 24439 - DNA, 189 bp, Oryza sativa
  Clone ID: PAT_MRT4530_29421C.1
atggttcaatggcatgctgatgagcccatcagcccaaggaaggtgccattatctgggaggtgcatccatgtcatgaatccaggattccggggtgcaattctcgactgcttcgttgccattggtgccagtgaaacccttcctttcttttactttctgtcagttggaacagtcagcacctacaatccatag

SEQ ID NO: 24440 - DNA, 168 bp, Oryza sativa
  unsure (1)..(168): unsure at all n locations
  Clone ID: PAT_MRT4530_29422C.1
aagatgatgggggtggcctgtgggtgtggtgtggtgcccacccttgtgaatgtacggatggtntaatgcccaggatgcacatgtgggatgatgggaccatggnccatggggagcccatggatgatgcccatgtgttttgtttggaggtnattcgcagtgcctgctgtg

SEQ ID NO: 24441 - DNA, 165 bp, Oryza sativa
  Clone ID: PAT_MRT4530_29423C.1
ctcgcctgcgcttcagagcatcatggaccaactaaggccaacagtgtttaagatccgattaacccggttaactgcaacgaagagcaattagagctagccagcttatctatgtggggaggtaatttgtatggtgtccgaaggctttttattgagaagatggatgac

SEQ ID NO: 24442 - DNA, 627 bp, Oryza sativa
  Clone ID: PAT_MRT4530_29424C.1
atggattatatcatctccggtgctccccctccccctgcgatcttctgcccaccacctctctcaccgccgccgccacctccacccattttctactctccaccagacgtttcgtacttctctccacccgcgctcccctgctatgctggcttccctgcatgcactggcggcggcggcggcggcaatgatggttctggcggcgacggccattccggcggggatgagcgtcgcgtgttcgtctgcaactgcaagtcatggtcatgggttcaagtgttcgttacgatgatcgcgtctctcttctcggcgtgcggtggcgcctacatctaccggagccagtgctggaagagcttgaagaagaagaagaagccaccgccgccgcttcctctgtatcgtccgcgtccgccgccggctggagacggtcgacccgacgtcaccgtacaccatcatcaccatcactatggcgccaacggcggtggcgggcacagcgccaatggcggcggcggactcgacggcagcagcagcatcgggaccaatggcggcgacatcggcggcaacgacgacctttacggcggcggcggcaacgaaagcttcggcgcagcctccgacgccgaggcgtgctcgatcatgtag

SEQ ID NO: 24443 - DNA, 1128 bp, Oryza sativa
  Clone ID: PAT_MRT4530_29425C.1
agataactgaaataagatcatttggcattataaaaccccaaatcagattaaatttttggaatgaaacggccaccatatgcctgtttttcccctctacacaatttaattatgattgacctacagaaaccatgctgggccgccccttttttttttttttttttggtcagcaacacttggctctgcaacctgatctttaaacagaaaacattcactgctgtaagcagttatacaacatcgatcaatcttgaaggtaattacaaatcatggaacaccagcgaaaataaacataattcaaagaaaaatttacacacatcctcaaccagatagcaatacctagaacagaggtaatttgacagatatgaaagtgaaatttaaaagggtgcttgggatgagagtgcttccagttcatcactcctttctgtccctgtgaacatcatccagaatcgcaacaagagccgcgatgaacacgtagtcgacttgcgggaacacggtgatgctgaatacgtccctccccagcaccacacttgcagcggtgtgcttacggttcatttgagctatgattgtgtttgatttgccaaggtagaaggcagatgatctgtcacagtagctgcccttgatcttgaaatcgcagacttgctccgcggtattcccggccaagaagatatccatctccgtcttcatcaactggagcattgaggacttcttcacggtgaagagcttatcgcacgaatgtgcgctgtcccctctgtatacttcccatctgttgtgcatgctaagtatcttctcttgcatggagaggagtggttggccgacggcgtcgtggaggacgcggcggtggcggacgctgaagagggtgcccttgacgttgaggacgacgttgtcgttggcgtcggtgacggtgaagtcgccgtcggtgaggctgatggacttcttggtcaccgtcagcggcaccacgtacggcgcgcagtactgcgggccaaccaccaccaccggctccgtcggccccgccgccatgggcgccggcgccggcagcatcggggccatcggattcatttttagttagattgtcggtgaatggaagagagagagggaaagagaggtggtggcgtcaggttaattcccggccgg

SEQ ID NO: 24444 - DNA, 3534 bp, Oryza sativa
  Clone ID: PAT_MRT4530_29426C.1
atgctgcgcgccgcggcggccgccgccgccgtcttcccctcgcggttcgctgccgcgccggccgtggcggcggttgaggaggtcaggtcgccgctgctcagggttttgggggcgctccgaggcggccgggtctcgacgctcgggaggagggcgcgcttctgctccaactccgccgggagcgactccgaggcggcggcggcggaagctaaggccgaggatgcggttgctgcggaaggggaggcggacggcaaggcgtcttccgccatcgtgcccaccgtcctccgccctgaggactgcctctcggtcatagcactgcctctcccacatcgtccactctttcctggattttatatgccgatctatgtaaaggaccaaaagctgttgcaagccttagtagaaaaccgcaaaagatccatcccatatgctggagcatttcttgtgaaggatgaagaaggtactgacccaaatattgtgaccagctcagattcagataaaagcattgatgatcttaaagggaaggagttgctgcagcgccttaacgaagttggtacacttgctcagataactagcattcaaggggatcaggttgtgctacttggtcaccgtcgtttaaagataaccgaaatggttcaggaggatccacttacagtaaaagttgaccatcttaaggaaaaaccgtacgataaggatgatgatgttataaaagcaacttcatttgaagttatatccaccttgagggaggttctcaaggcaagttccctttggaaggatcatgtgcaaacctacacacagcacatgggtgatttcaactacccacggttagctgattttggtgctgctatttctggtgccaataagtttctttgccaggaggtgcttgaggaattggatgtatataaacgtctaaagttaactcttgagttagtcaagaaggagatggagattagtaagttgcagcaatccattgcaaaagcaattgaagaaaaaataagtggggatcagcggcgttatttattgaatgagcaacttaaagcaatcaagaaggagctaggtttggagactgatgacaaaacagcattgtctgcaaaatttagggagcggattgaagcaaagaaggagaaatgtcctgctcatgttttgcaagtcattgaagaagaactcacaaagcttcagctgttggaagccagttctagcgagtttaatgtaacaaggaattatttggactggttgacagtattgccatggggaaactatagtgacgaaaattttgatgtacatcatgctcaacaaatccttgatgaagatcattatgggctgagtgatgtcaaagagagaatattggaatttatagcagttggcaagctaaggggaacttcacaaggaaagatcatatgtctttctgggccaccaggagttggtaaaactagtattggtcgatcaattgcacgtgcgctgaacaggaagttttacaggttttctgttggaggtttagctgatgtggcagaaatcaaggggcatcggcgtacgtatgttggtgcaatgccagggaagatggtgcaatgtcttaaatcagttggaacagcaaatcctctagtattgattgatgaaatcgacaagcttgggagagggcattctggtgatccagccagtgcattgttggaacttttggaccctgagcagaatgttaattttcttgatcactaccttgacgttcctattgatctatccaaggtcctttttgtttgcacagcaaatgttattgagatgataccaaatccattactggacaggatggagatcattgcaatagctggttatataactgatgagaagatgcatattgctcgggattatctagagaagaacacaagagaggcttgtggcattaaacctgaacaggctgaggttacagatgctgctcttcttgcccttattgaaagttactgccgagaagcaggagtgcggaatcttcaaaagcaaattgagaaaatttaccgcaagatagctctgcaacttgttcgccaaggggtatcaaatgagccaactcaagaagctgccattgtaacagcgagcgaagaacctaatggtggcgatagtgcaaacaagttgaaagatgagactatggaggatcctgctacagagaatgctgcaatgaccaatgctgatactgcctcaaaggaagctagcgaattagatttactgaatagaacagtcgatcatgatgtgcatccagctgaaacacccaaagaagctgttttaactgattcagccctatcgacagacaagttgtgcacaccagagatgttgaacctgaacataatgctcacttcaaatatgcaaaatcctacaagtggtatttctgtgctgctggctgttgacctgctgattaggctgttaaagttgtcaccgggcaacaaggatatggagggagccaaggaagagtcagctgataaggcagttgagaaggtagtaattgattcgtcaaaccttggagattatgttgggaaacctgttttccaagctgagcgaatatatgagcagactcctgttggagttgtcatgggtttagcttggactgctatgggtggttctactttatacattgaaacaacgaaagtggcgtccggagatgggaaaggtgcacttgtgatgaccggccagcttggagatgtcatgaaagaaagtgctcagattgcgcatactgttggtagagctatattactagataaagagccagaaaatctgttctttgcaaactcaaaggtacacttgcatgttccagcagggtccacccctaaggatggccccagtgctggatgcaccatgatcacatcaatgttgtccttagctatgggaaaacctgttaagaaggaccttgcgatgacgggtgaagtaacattaactggccgaatccttccaattggcggggtcaaagagaagaccattgctgccaggagaagtgcagtaaagacaatcgtattcccagcagcgaataaaagggatttcgatgagcttgctcccaatgtgaaggagggtcttgaagttcattttgttgatacatacaatgaaatatttgatatagctttccagagtgagactcagacagaaacaagctagcagttcaggttcaagtgttgagattgttgagagacatgggcaccaactgaatacccaagggagttttgcagctagactattctttgcaacatcaaaaataacttgattgatcaccctttttttttgtacgcgccgtgtagcagtaaatgttaagtaaaaattttggcaagaatgttgcagcaagatggctggggaagtatcacaaagaaaaaactattgtaaactaattcttataatgaacgaggtctggccattcatccattttgttttctggcgagccagagtttcgttatttcttttccgttctgatagtcttggaggtgttgtcgttccttgttggtatggtatgtaagtgaactcgtttgtaagaataaaattaaaggaaatgccttaaagaagttgctgcattttgcaacc

SEQ ID NO: 24445 - DNA, 303 bp, Oryza sativa
  Clone ID: PAT_MRT4530_29427C.1
atgaccgcggcggcgagcgacgtgttctggaacggcggcgcggcgtgcgggaagcggctggcggtgacctgcaccggcgcgacgaaccagggggtgccgcagccgtgcaccggccggagcgtcaccgtcaagatcgtcgactactgccccgcggggtgccgtggcaccatcgacctctcgcaggaggccttcgccgccatcgccaaccccgacgccggcaagatcctcgtcgaataccacgaatttattcacgataagctgtgctcatttgcagggtctaagatcaaaatcaggatggcttga

SEQ ID NO: 24446 - DNA, 807 bp, Oryza sativa
  Clone ID: PAT_MRT4530_29428C.1
atgacggttttgatggttggaatggtcggtaataccctccaaccgtcattgggggctaatccacaccgtccagacgaagccctggagcagatggcgctgaggagggttcagccaaacctggggacgaaaggaaacaaagacttggttgttgatcaggagttgcaactatgctgcatatctcaaagatacagttgcaaggggtgggagaacgaccaagaggatcctagggtcatgctccaccagattggggcgcaccccacatgggccccacttggtccggggtcccaaacgaagttacaagcccaaaggcccatgataggtgacgcaacaccttgtttcttcatctgcggatggcttggatggaatttggcgatgaggtcgccaaatctgattccagcacatggaggacttgatcttgatatcatcttgttcttccatgatgctaggagaaacacaaaacgagaacggaattcaacaaactcctgcaaaggagaggcgagatccccgctgctaggcgtggccaccgcggccgccgccgcggcttccctagcgcggaggagcggcagcgccgagacgccgaggagcaagccccgccgcgccagcacgtacaccgccgctgccgactgggacgagccggcatcaccagacgatgatgccaagttcgatgcgacgatggccgcgcctctccgcacgcggcctcgtcggcggcagcagccaccggaggacgaccggcactggaacgcgagcggccgcggcgccggcgacggtgcgaggaggagctaccccatcccgtcccccgcgacgtga

SEQ ID NO: 24447 - DNA, 258 bp, Oryza sativa
  Clone ID: PAT_MRT4530_29429C.1
ccggccatccaactaaccgcccaaacaccacagccaagatgacgaagggtacctccagcttcggtaagcgtcacaacaagacgcacaccctgtgccgacgatgcggtcgccgctctctccacatccagaagcatgagtgctcttcttgcggttacccttctgccaagatccgcaagtacaactggtccgagaaggctaagcgaagaaagaccgtcggtaccggccgcactcgctacctcaaggatgtgtccccgacga

SEQ ID NO: 24448 - DNA, 678 bp, Oryza sativa
  Clone ID: PAT_MRT4530_2942C.1
atgggcgttcacgtcttcaccgaccagctggccttcgtcgccgccgactggtgttttcgcctgcacggctggtctattaagccgccgctgttgggcgtatacgacttcaccaccggcctgcctccgtcgccgccaactggtgtcctcgcctatacggttggttggatccagatccagatatgcacaaaagggattcatggctttaagcttatctcttacgctccaggaatggatcagtcagaacatcaccaccggcttgccgtcatcgtcgccgactggtgtcttcgcctatacggttgtttggtcacaccaccgttgttgggcgtctacgtcttcaccgaccggccgtctcgtccgccgccgactggtgtttccgcctacacggctggcctattatgccgccgttgttgggcgtctacgtcttcaccgaccggccgcctcgtccgccgccgactggtgtttccgcctgcacggctggcctattatgccgccgttgttgggcgtctacgtcttcaccgaccggccgcctcgtccgccgccgactggtgtcactgcctgcacggctggcctgttatgacgccaactgatgctatcttcttcacagctggctacatcaccgtcaccgctaataggcatcatcatcttcaacgcaagctgtctacgtctgctgctgactag

SEQ ID NO: 24449 - DNA, 276 bp, Oryza sativa
  Clone ID: PAT_MRT4530_29430C.1
gcggcttgccccgtctcgagcctcggaggtgctggagcgacctaccatggggagcgcgggggcgctgctctcgcactcgactacggggatcggcggattcccttctggtgaccatcactaccaccgtctctgcggcctgcgctgcgtaccggtcctcacctccccgacgcccgatcccctcacctgtagccacgggccggaccttcgatggaccgtcgcttaccggggagcccgtcgagagacggagcgtccctcggcagccgtacctcaaaagga

SEQ ID NO: 24450 - DNA, 493 bp, Oryza sativa
  Clone ID: PAT_MRT4530_29431C.1
atggtggcgctgccgcgggccccctcgccgacacgcgcgtgcactcgcgggtgcgcgcacggccatcgagtggctgctcggcggtgcctctgtgcccctcccccctccgttgccggcgtcaacgatggccggcgacgagttgaggtgttcgtggaggaagaagcgccggacatcgtcgttgtcgtcgcggcttgatgtggacggcgacgacggtgtgcttgacggcggcggttgttgttgcagcggtggtcgtgggcgatcccggcgaggtcgtggcgcggcggtggcgtttcccgtcactggctgcgccccctctcgattggattagggtttgtagggtagagttggtggcggcgacaaatctcgtaccttgtgccgtgccggcctccacccctcttttatatggcgcagtgtgacgggggcccaccagccattgggctggacacccctgatcaaggcgcggtcataaatcatcaattgatctgaggaaaaa

SEQ ID NO: 24451 - DNA, 408 bp, Oryza sativa
  Clone ID: PAT_MRT4530_29432C.1
gtcacacagccttcattcaaactccaatttaattggaactaaaaattttaaaagtacaaaataaacagcatgcatgaatgtaggtccaaaatgtacatgatcccgaacagcaatcaagtagggggatagtccaagtaaatttgtgtggagccaatcgagcaaggaaagagccttgtctgagactctctgatttgtcccgcccgcttgaccaaaacctctaggctctagtgatgttccacgccctctggtcgttttcagcaattcgttcacttgattcccgcacaatctcggagagaaacagtattctacagtctgcacttcgtctgcacacaaaccatggcttctttgattcttcttcttcccgtcatgcttggccttttctgccggggcgaatgcctacccttcggc

SEQ ID NO: 24452 - DNA, 1031 bp, Oryza sativa
  unsure (1)..(1031): unsure at all n locations
  Clone ID: PAT_MRT4530_29433C.1
cctcccggtcgacccagcgtccgctcaatagccatnaacagcccttggcgggactgggaaacactatcggtcaagtaagagacgaggctcgggaagtcaccgtcgctaacgttgctatcgaaggaatgaaggaggaaggtatcactgatagccttcttgtactggtggggttagtaagccccatgagcaaattgtttccagtgatccaaaagataatctcatgggagaaaccacttgtgactatcagtgtccttgccatgatggtgttaaccatatacagagagtgggtcggttttgcgttagcggcatccttgatactggcagcaggattcatggtttgggctagacaaagaaaaatcggtgcactatgctcagaggtgatcatcgacacttcatcggacaagacgacgatggaaagcctagtggaagcacagcaaagcctgaaaagagtgcacgagtacatcaagacagcaaatgtcgtgatcctccgagtatcgtcgatcgcgttagcgaggtcaccaaagcatacagaaacggtgatatggatgctgacagggttggcgctggcgctggccgtgatcccgttcaaatacgtcctgatcggggtgatggccggcggcttcatgtcgaacacgaggatcgcgagagccatgtcgaacccgcagggaagccggcggtggagggagtggtgggagagcatacctgccgtcccagttcgggcggttgacgggggtggtctgtgaagtgttcgacgaaatgccggcagaaaaatcctcggtattgttcagctataagcttaagtgttcatgtatgttttttgctcagagatgtgccatactgccatcatctttatcacctgtcagctggtgtataccagaaaagaaaaatggcagagcacttaacacggaacactttgttggatgtactaacggttaaataactgtcaatgtgtgttgataaataaaggaatacgtcatatattcaatattcaaaaaaaaaaaaaaaaaaaaaaaaaaaaaaacaacacaaac

SEQ ID NO: 24453 - DNA, 392 bp, Oryza sativa
  Clone ID: PAT_MRT4530_29434C.1
gtgttgaggtatccaatctatggtgggatgcaagactggaactattacatggaggttgctttgagttaaccctggaaattagtgacgtaaaatggccaaaggcagctgaggtatttttctttttttttgcatctagttatctgcctatcaatttccagataacttgataatcactttgttgtgttatttcttccaaattcttctatagcttcctgtcatatgggaacagaataggatgagtatgcttaatcttgctgcaagccttgtgaaggtaagacatttccacaggattcatttttttcactggaaaggttaattactgtacttctcgaaatgaaatggtgccagttggttttcggattgagggctcgagggtctcgtaggagggtact

SEQ ID NO: 24454 - DNA, 462 bp, Oryza sativa
  Clone ID: PAT_MRT4530_29435C.1
atgccgtgtaccaaaagagcaggcaatgacctcgactgcacatccggtcaccgaaccatatccatccacgcccatctaacttggggaagaaacgatgtgcatgtatcagcttatccaagtgagagcaagagactgtatcggcttacactactagaaaaatcatacatgcgtacaactactacaagttcaagggtggagaaacagacacgaacaagggagaagctgctagtacatacatattggccgtgtcacaagcaacctagaggcactgtcctctgcgggtattacgcgtgcgaattcctcacggttaatgggaggtacagggttaacgcagaggatttgccaagaatagaatttcgaacaagctttgacgatacaggcatcacaaatgtccagagcgatttgtgtcacttcatccaccgcggccgctttctattttcgcaggcggacctgtctagctaa

SEQ ID NO: 24455 - DNA, 192 bp, Oryza sativa
  Clone ID: PAT_MRT4530_29436C.1
ggaattgccgcgtcgcacccacgcgggcggcacaacctgaccttctaggcgcgatcagcatgggcaaagagcagcgacgagggcacgaggcccgtcatcgagatcgacttgcacagaccttacgctaacgctgaaagggagcactgaagaagctgtggactgtgcgggacaggcaaactgatgcctgtcctg

SEQ ID NO: 24456 - DNA, 673 bp, Oryza sativa
  Clone ID: PAT_MRT4530_29437C.1
cggacgcgtgggcggacgcgtgggcggacgcgtgggcggacgcgtgggcggacgcgtgggggaaaccctaagcgaagcggaggagagaaagcaatggcatccctgagcaagcgcggcggcggcggcggcgagggggagggcatcctggcctccttctcccggtcttcggtggcggcgcatgggcgcgaggcggcgaccatggcgaagaagctgctgcggagcacggggaaggcggcctggatcgcggggaccaccttcctcgtcctcgtcgtcccgctcatcatcgagatggaccgcgagcagcagctcaacgacctcgagctccagcagcaggcgctcctcggcgggccgccaccgcccgcgcctctcaaatgatccatccgtccatccttagcttctactgctgcctacctatgtcgtcgtcgtcgtcgtcttagtctttttcttcttttcttcttctcttagtgtacactgctgctactagtgtttttgcctgtctagtcggacaaatcaaaactttcttgttttcatcatcgatctatgctatgctgctctgatgagatgtcgctttttctttcctgctgctactttattttcacgctcatcttatcatgccgaataaatcgatcggttactataaaaaaaaaaaaaaaaaaactcgagaccctcggca

SEQ ID NO: 24457 - DNA, 3747 bp, Oryza sativa
  Clone ID: PAT_MRT4530_29438C.1
ctagctgcccgaatcctcaaaggcggagcattttctaaagtggagttctcaaaaaaagcgtcttcttggggtggattgcaagttggtgacccaaatccgtcgctacgggtcgggatttttgatcattgcttctccatgaaagagatggaagaagaccattttgaagcccacataagaggtgttgcagcacatcttctagataattttggtgatcattcattcatgatctcgaatttcggcattcgagatgaagaaagccccatatatcacattttatctgagtatggtatgaccgtcctggactaccctggccactatgaggggtgtccacttctcaccatggaaatggtccactgcatcttgaagtcgagcgaaagctggctctctttgggtcagcgtaactttctgataatgcactgtgaacaaggatgctggcctattctggctttcatgttagctgctctcctgatatacctgggacagtattctgatgagcagaaaacactggatatgctttacaagcaatcgccagtagagctcttggagatgttttcacctctgaatcccatgccgtcgcaattgagatacttgcgctatgtttcgatgaggaatgtcgtgcctgagtggcctccagctgatagagccctgacgttagattctgtgattttgaggatggttccagattttcatggtcaaggtggtttccgtccaatattcaggatatatggcccagatccgcttatgcctactgatcagactcctaaagttcttttttcgactccaaagagaagcaacgttgtccgtttctattcacaggcagatgaactggtgaaaataaaccttcaatgtcatgtccaaggggatgttgtcctagaatgtatcaatctgtatgaggatctggatcgtgaggacatggtattccggatcatgttcaatacaggtttcatcaggtcaaacatattgatgcttaatcgtgaccaaatagacattttatggaacacacaagaccaattccctaaagattttcgagctgaggttattttctctgatatggatgcaactacttcacacatcacaacagagccggttagtcatcaagagaaacaaggacttggtattgaagagtttgctaaggtgcttgatatattcaaccatttagactggttggatgggaagaaggatacttcgcttcacatacctcaacgaaaagcatcatccacttctcaaggaaatatagatgaatctcctgctgatgggtccgagactttcttcgatactaaagaagaacttgactttgatagtctctctgtcctcaccagttcagccacagggactgatagattctgcagtgcaaattgcaccagcacagtcagcgtcaaaatcagctgagaactctggttcacaaactccagtaaaccaagaaccttcacctcttaccgtaaataattcagcatcgaccgcatccttgatagctttgtgcacacctccgcctcttcctcctccgccgcccactgtctcattagcccctgtttcccccattttacccataaatactagtacaagtataatcagcgtttcccttagatcgatcatgccctccccttcaccaactgcagcatccccacccctgccgccgccactgccaccccctctaaaaccatctactgtgatgtttcctccaccccctccgccgccgccacccccacccccaccatttcccgtatcatcattttctcctccgcaaccaccgccgcaacctccttcagcagtaccagggctgcaagcatcgcctgttccaccaccgccgccacctccacctcctccaatgattccagggatgaaaacaccacccaccccaccgccacctcctccagcagctccagggcagcaagcaccagctgttccaccgccacctccacctccacctcctccaatggttccagggatgcaaacgcggcccattccaccaccacctcctccatctcaaactaactctttggtttcttcatttccatccacaagtaaaagaattccaccgccaccccctcctccatctcaaactagctcattggtttcttcattgccatcctcaaggaaaggaaatgatgtggcagcccctcgtcccccacctcccccaccactgtattccaggtcatctcatgtcacttctgcaccatcagcaccacctgcacccccattgcctcctccgaagctagttggggccagcaaaccttcacaagagcaaatgataacctggccaccaccacctccaccaggcccacctcctaagaattcctcgaactctttgccaagtaagggtaatgttgtcagttcatctcctcccccacctcctacattctcatttggcgcaaaggaccgtagcacagcccggtccagaagtcctagaagtttgcggcccaaccagtcatctaagaggacaccattgaagccgttgcactgggtgaaagtgtcaagagctacacagggaagcttatgggctgaaacacagaagtctgatgaagcatcaagaaccccagagatagatatttcggaacttgaaagtcttttctcggtagccatgccaaacatggaggagaaacgggcacgccaacgtccttctgttgcagcgaaacaagaaaaagttcttttgattgaccttcagcgctcaaagaattgtgaaattatgctgagaaacattaagatgccattaccagatctgatgaactcagtgcttgcacttgacgattccattgttgatggtgatcaagtagattatctaataaagttctgtccaactaaggaagaaatggaactactcaaagtgtttttcctcctactttttcaggggtttacaggcaacaaagagaacctagggaaatgtgaacagttcttcttggaaatgatgaaagtcccaagagtggagtcaaaactgagaatcttatcctttaagattaagtttcttacacaggttgcagatctgaaaaacagcttgaatactatcaattctgttgctgaagaggtacactgttatataatatgacctcaagtcctcaaccttttcccgtttgacgagtttaaacatgctgttatataatgttatttggacaggttaggaactctgttaagcttaagcgagtgatgcaaacaattctttcgttgggaaatgcattaaaccaaggaactgcaagggggtcggctgttggatttagattggatagccttcttaaactcattgatattcgggcacgtaataataggatgactctcatgcattatttatgcaaggttctttctgacaagcttcctgaagttcttgattttaacaaggacctcacatatttagaacctgcatcaaagattcaattgaaagagttggcggaagaaatgcaagcgataacaaagggactggaaaaggttgagcaggaattgacaacatctgaaaaggatggtccagggtctgagatattttacaagaaattgaaggaatttcttgctgatgctcaagctgaaggaagatcgttagcttttctttacagtactgcggggaaaagtgcagattctctagcacattattttggtgaagatccagtgcggtgtccatttgaacaagttgtctctactttgctaagcttcgtgaaaacgttcgagcgtgcccatgccgagaacctcagacagatggagctggagaagaaaagggcccagatggaagcagaaaaggagaaagtgaaagcagcagctcacaaggag

SEQ ID NO: 24458 - DNA, 440 bp, Oryza sativa
  Clone ID: PAT_MRT4530_29439C.1
ataaaaggttccatttttttttcttttttttttttttatattttctctttcttgtatgttttattgatctatcaggccttacaggaggtcctatataaacaatattggtgggtcctcgcatccttggtaggaaacattatggactgaatccaaacacaagaacccttccaactcttgctcgggaatggaaaccatcgtcagcacccttttacgttgcggggatacatttttaagcgctaatttaggaaggcaactggggctttctcatttgttggagacaattcactaaagctaaagttaaaggaagccatgaacggccccgcggaataaccataaaggctaaggttttactggagaacccctgattcattgaggggttagaataccggcccgcaggcataacatgaaaccttcccgacctgcaaatttaggggggaccg

SEQ ID NO: 24459 - DNA, 2781 bp, Oryza sativa
  Clone ID: PAT_MRT4530_2943C.1
atggactcgaggcgtctcagctttccggtcgatcggccgcgagtccactctgccggcttgtcttcgccaccgccattgctgataacaacaacgacttcaccgccggcctgcctccgtcgccgccgagtggatcctccgcctacacggctggcctattatgccgccgctgttgggcgtctactacttcaccgccggcctgcctccgtcgccgccgagtggtgcctccgcctacacggctggcctattatgccgccgctgttgggcgtctacgacttcaccgccggcctgcctccgttgccgccgagtggtgtctccgcctacacggctggcctattatgccgccgctgttgggcgtctacgacttcaccgccggcttgcctccgttgccgccgagtggtgcctccgcctacacggctggcctattatgccgccgctgttgggcgtctacgacttcaccgaccggcttgcctgcgttgccgccgagtggtgcctccgcctacacggctggcctattatgccgccgctgttgggcgtctacgacttcaccgccggcttgcctccgttgccgccgagtggatcctccgcctacacggctggcctattatgccgccgctgttgggcgtctacgtcttcaccaccggcctgcctccgtcgccgccgattggtgtcctcgcccatacggttggttggtcacaccaccgttcatgggcgtccacgtcttcaccaccggcctgcctccgtcgccgccgattggtgtctccgcctacacggctggcctattatgccgccgctgttgggcgtctacgacttcaccgccggcctgcctccgtcgccgccgactggtgcctccgcctgcacggctggcctattatgccgccgctgttgggcgtctacgacttcaccgccggcctgcctccgtcgccgccgattggtgcctccgcctacacggctggcctattatgccgccgctattgggcgtctacgacttcaccaccggcctgcctccgtcgccgccgattggtgcctccgcctacacggctggcctattatgccgccgctgttgggcgtctacgtcttcaccgaccggccgcctcgtccgccgccgactggtgtttccgcctgcacggctggcctttatgccgccgttgttgggcgcctacgtcttcaccgaccggcttgccttcgccgccgccgactggtgtttccgcctgcacggctggcctttatgccgccgttgttgggcgtctacgtcttcaccgaccggcttgccttcgccgccgccgactggtgtttccgcctgcacggctggcctttatgccgccgttgttgggcgtctacgtcttcaccgaccggccgcctcgtccgccgccgactggtgcttccgcctgcacggctggcctttatgccgccgttgttgggcgtctacgtcttcaccgaccggcttgccttcgccgccgccgattggtgcctccgcctacacggctggcctattatgccggcgctgttgggcgtctacgacttcaccgtcggcttgcctccgtcgccgccgattggtgcctccgcctacacggctggcctattatgccgccgctgttgagcgtctacgacttcaccgccggcctgcctccgtcgccgccgactggtgtctccgcctacacggctggcctattatgccgccgctgttgggcgtcttcgctttcaccgtcgaccgccttcgtcgccgccgactggatccagatccagatatgcataaaagggattcatggctttaagcttatctcttacgctctaggaatggatcagtcagaacatcaccaccggcctcctcgtccgccgccgactggtgttttcgcctgcacgcacggctggcctattatgccgccgttgttgggcctctacgtcttcaccgaccggccgcctcgtccgccgccgactggtgtttccgcctgcacggctggcctattatgccgccgttgttgggcgtctacgtcttcaccgaccggcttgccttcgccgccgccgactggtgtttccgccagcacggctggcctattatgccgccgttgttgggcgtctacgtcttcaccgaccggccgcctcgtccgccgccgactggtgtttccgcctgcacggctggcctattatgccgccgttgttgggcgtctacgtcttcaccgaccggccgcctcgtccgccgccgactggtgtttccgcctgcacggctggcctattatgccgccgttgttgggcgtctacgtcttcaccgaccggcttgccttcgccgcctccgactggtgtttccgcctgcacggctggcctattatgctgccgttggtgggcgtctacgtcttcaccgaccggccgcctcgtccgccgccgactggtgtttttgccatggcatccgccgctgactggtgtcaccgcctgcacggctggcctgttataacgccaactgatgctatcttcttcacggctggctacatcgctgtcactactaataggcatcagtatcttcaacacaagctgcctacgtttgccatggctgccgactggtttcttcacttccatggctacatgattctaccagtgttgattagccttatcttcttcaccgccgctaccactactgatggacatcatcgttttctgccgccgactcgtgttatgccgccgtcgactggtgcttttatcttcacaactgcgcgtcttcactaccagtttgcttctgttgccgccgactcgtgttcacttcatcacggcgatgcaactttgtcatcatgg

SEQ ID NO: 24460 - DNA, 939 bp, Oryza sativa
  Clone ID: PAT_MRT4530_29440C.1
atgggccgcgtttgcatccctggaaccattggaggaggtggaggtggaggtggcggtggaacagctggtgcttgctgccctggagctgctggaggaggtggcggtggggtgggtggtgttttcatccctggaatcattggaggaggtggaggtggcggcggtggtggaacaggcgatgcttgcagccctggtactgctgaaggaggttgcggcggtggttgcggaggagaaaatgatgatacgggaaatggtgggggtgggggtggcggcggcggagggggtggagctggagattggcctctctttagtggtgcagaaaccacagatgaagtagatgaatatatcgagtttgaaatcaatgttggttgtattggcggtggaggtggaaacatcacagtagatggttttagagggggtggcagtggcggcggcaggggtggggatgctgcagttgaaattgaaattaatgaggtccgagtgtctgaagtcagaggcattgcaggcaaagcttctgggacatatgttcttgtactgctagattccttttctatggacaatagagaatctgatgacaatgcagtgacactggaagctctagaaaattcaggtggaaacttctcaaggttttcacaggaagctagtggagaggctgatgattctggaggttgtgaaggggagggcatgatcgatctaagggaaacgctgattatacttgtactagtatttatgggtaaaatgggggaaacaggggctaatgagacagtgggcggcggaggaggaagaggcggaggtgtgcacaaagctatcaaggatgcggtcgatgctgaattatttacgaatctatcagtccctgtggctgaactggtgaggacggtgcttggggtattaccgtgcttgaaggtagtgccattgatgaagcactggtctttggcatcttaa

SEQ ID NO: 24461 - DNA, 649 bp, Oryza sativa
  unsure (1)..(649): unsure at all n locations
  Clone ID: PAT_MRT4530_29441C.1
atgcctaaacttgataaattgacttatttctcacaattcttctggttctgccttctnctagtaagtagctcacgaggaatggggggacagattccctcaatctcgagatacgaacgtatcgtgtcaaaattattggcanatttttctcagtgttttgtgaccgatagacttaaccttattttaattttatttccctcatttttttgggacttattatggcagaaggaggagggaggctnttnctctactctaattggatcctttctggttgggttccgtttttttttgggaaagcccaaagtttgtttcggtttggagacccaccaagcctgggcttatggaacgggcccttccgatcccttggggccagataattgaaacccttactccgcggcctctttttcaatgggctttggggcacaaaacccgaaccggattccccccgggaaaagagggcccaaagggaaacaacccctttggcctcttattaattccggaagtcccccggaaacaattttggggctgtgtcaaataggggagaattctcaaggctcaaccccgcgnaaaccttaacctaatattggaaaaaaaatgccgggctctacaaccacncatttccactttggttattagaagcctcttagaactc

SEQ ID NO: 24462 - DNA, 645 bp, Oryza sativa
  Clone ID: PAT_MRT4530_29442C.1
atgggaaggaggtcggtggggcgaggcggcagaggagaaggtttggcggcggcgacgggggagaaggggacaccccacaccagctgcaactctagtcggcggaagaaccgcgagtcttgccgcttcatggccctccccacgccaatgtcgccaccaccgccagatgccccaagctcctgtgagctcaccggcgaccgcgattgccagcgaagagaggtaggagcggcaggagcgaaggaggcctgcagcagtgacgaggacgatggtgacgagagagaaagagatggatgcagcggcgacgacaacaacgacatgttgatggatacggcactccacgtcgggctcgtggcacctaggtggcgacctggacggaaacggcgctccgcgtcgaactcagggcagagagcgaggagagtggaggggaagagcggcgccggcgactgcatctcttcacacagcggcgacccctctctctacgacgccagtcgagctctgtgtcgctggtgcacagttccttccccgctagccactggctacgcccgccgcaccaacctactgcgcccagcctgccggtcgccgccgtggagaggaaaggagagaggaagagaggtggagaggggaggggaagaagaggctgacgtgtga

SEQ ID NO: 24463 - DNA, 267 bp, Oryza sativa
  Clone ID: PAT_MRT4530_29443C.1
atggcggtgagtccctccccccatcccctagtgcggtggcagctctctctctctctctctctctctctcgctggatccctcggaccagtgcatcctgctcaacagcgacaccctccctggcatggcggtaattgttatccagtaattgctgtgtatcctacagtacgtttaagtttattagaccgcggcaaccatccaggacaagtggcaaacttagcctggaaagaagctggtctacttggcattgtagaaaccattgaaacttaa

SEQ ID NO: 24464 - DNA, 413 bp, Oryza sativa
  Clone ID: PAT_MRT4530_29444C.1
gggttagctccttcaaaaagactttttattcaaaaaagaatcacaaatttcagatgtgcatattcatattggccactaaattttttgcttacaactatgattcttccgtcaccatcgcattggagcagaaaagaaagggcagcatatgcctaaaaccttgttgtactacttcatcaaaagttattggtggggacttcgataattcaaaggtcccatcttctccccttcttggattgcattgcataatctcgcatatactataggaaatatgttccgtcttcttccattcttgggccaactcctaaattttcaacaaaccttggtgtaacactttgccttagaagtccttttaaagactcatcttttttggcactgggaacccacaacagctttttgattggcacacttttata

SEQ ID NO: 24465 - DNA, 123 bp, Oryza sativa
  Clone ID: PAT_MRT4530_29445C.1
atgcgtgcagtggcatcccgtgttgggtccgtaggcgtgtacgctggcgctgacctcgccaccatccattttcagtttcccctttgttctactctttggacggcggtgcagaaactggagaag

SEQ ID NO: 24466 - DNA, 2132 bp, Oryza sativa
  Clone ID: PAT_MRT4530_29446C.1
ggggcgtctaaactagtggatccccgggctgagggcgctcctcctcctccgcatcgcccatggcgggggaaaccctctcctcgtcgccgcggaaaccctaaacctagctcgattccagcgccgccgccgccgccatggggacgcgccgagacgtgcgcttcgtctcctccggtgtgaagctcccctgcgccgacgcggctccggcgccagcgccagcgccgacgctgctctccgcggcgctcccgttcgcgcgcatcggccgcgccatcgatggcgtggtgcgccacgtggccaggtcgctgcccaggctacccgtggcgagggccgagacgggggcgggggcggcggcggcgcccatcgcgctgccgcggaggcagaaggacggcggagggggtggagggggagaggagcgggtgctgatcagcgaggtggcggtgagggggaaggacggggagcccctggagcggcccgagctggaggcggccgcggcggcggcgctccgggcgtgccgccccaacgcggcgctcacggtgcgggaggtgcaggaggacgtgcaccgcgtcgtcgagagcggcctcttccgctcctgcatgcccgtcgccgtcgacacccgtgacggcattcgtctcgtctttgaggtggagccgaaccaggacttccatgggttggtctgtgagggtgccaacatgctgccatctaagttcctagaggacgcatttcatgatcgccatgggaaaataatcaatataagacatttggatcaagtgatcaagtctgttaatggatggtatcaggaacgtggtctaactggcttggtttcatatgctgagattctttctggaggaattctgaggctacaagtttctgaagctgaggttaataatatcaatattcgctttctggatagaagaactggtgaaccaactgttgggaagacgcaaccagagacaatactccgtcaccttaccaccaagaagggtcaggcttacaatagagcacaagtgaaaagggatgttgaaacaatccttactatgggaatcatggaggatgttactataattccacagccagttggagattctaataaagttgatcttgtcatgaatcttgttgaacgaccttcgggtggtttttctgctggtggtggcatttcaagtgggataacaaatggaccactttctgggcttattggcagttttgcatattctcatcgaaatgtttttgggaggaacaagaagctgaatctctcactggagagggggcaaatagattctatatttcgattaaactatactgatccttggattgatggtgacaataagaggacctccagaactatcatggttcagaactctaggactcccggaacacttatccatggtggggaccatcctgaccatgggcccattacaattggacgagttactgctggcattgaatacagtcgaccattcagacctaaatggagtggcacacttggattaatatttcagcatgctggtgctcgtgatgacaaaggcaatcctatcatcagagatttctataacagccaattaactgccagcggaaatgcttatgatgatacactactagctaagcttgaaagtgtctacacagactctggagatcgtagctcaacaatgttcgttttcaacattgagcaaggtcttcctattcttcctgagtggctcagttttaacagagtgacagcgcgtttgaggcagggctatgaaattggccctgctcgacttcttctaagtgcttctggaggtcatgtagagggaaacttttcgcctcatgaagcatttgcaattggtgggacaaatagtgtaagaggatatgaagaaggtgctgttggttctggccgctcatatgctgttggtagtggagaagtctcttgccgcatgtttgggccattggaaggtgtggtgtttggtgactatggtagtgatcttagttctggtcccaaagttcctggtgacccagccggagctcgtgggaagccaggaagtggttacggttacggtgttggcgtccgtgtggactccccactgggacctttgcgtcttgagtatgctttcaatgataaacaagcaaggcgatttcattttggggttggctacagaaattaa

SEQ ID NO: 24467 - DNA, 653 bp, Oryza sativa
  Clone ID: PAT_MRT4530_29447C.1
gtggatcccccgggctgcaggcttccattgttcacctctatgtgttccctgcgaagccctatgagctgcaagccaaccagtcaccaggaaacgtctcagtactcggggattatgtatcctcggaccctgtagatccttttgaaataaaggaaagtaacagacccgccaaattgaagcttccgcagttggaaccagatgagagaagcacaacaaacataaaagaaagtgttcgagacttcgtggttggcagtggggaatatgtgatcaaggattttaaattcactgttaaccaagctgtacggccagtcgagaagcggtttgacaaattgatgaaaaagaacaagaaaagccaggatgacaactgggtgagtgcagtgtcaccagatagaccggttcgtggaattgatgatcctctgttaggtggtagcacaagtgatagtgggttcacgaaggggaaaaaacatcggagagctgtaagcacggttgctgctgcggacagttggggaggtggtgatttggcatctgatggctatgagataaggggtcgacgctgggccgtaaagaactaataatgttagacattctggattggtgcacttgaatccacactaggtgaccttctgcattactcgccaattctggtggtttgcagg

SEQ ID NO: 24468 - DNA, 1133 bp, Oryza sativa
  unsure (1)..(1133): unsure at all n locations
  Clone ID: PAT_MRT4530_29448C.1
cggnaattcccgcggtcgacccacgccgtccggnagaaaacaaacagacacgtaaggaggagaaatttcccctcccttccctgctcttttcgtactacttgcaaggaggagaaagaagaacacgaggaggaaatccaagccaatcgccgcctccgcctccgattccttccgatgaagaagatcttcggcgccaagaagaaccaggagcccccgcccagcatccaggatgccaccgatcggatcagcaagaggggcgactccgtggacgacaagatcaagaagctggacgctgagctcgcccgctacaaggaccagatcaagaagaccaggccaggccccgcccaggaggccatcaaggcacgcgccatgagggtcctcaagcagcgcagaatgtacgaagggcagcgtgacatgctgtacaaccaaacatataaccttgaccaagttgcttttgcatcagagggacttaaagatgctcagcaaacgatgactgcaatgaaggcagccaataaagagctgaaaggaatgatgaaaactgtcaagcttgaagatatagatagcttgcaagacgagatgatggatcttatggatgtgagcaatgaaatacaggaaactctcggaagaagctacaatgtccctgatgacattgacgaggaagaacttatgggggagcttgatgctttggaagccgacatggactttgaatcaaattcagtcccctcgtaccttcaaccagataaggaatcagatctagattctgagcttaacttgcctgctgcaccaacgggtcacacacccgccccaccaaaccggcagcaggaggacgaattgggattgccgacagtgccacaagcatcgatccgtagttgattggattcgttttgtaaaaacataatgtcgtatgcaataacaaattcagtgtatctttgctcatatactactgcaatttgttaagattggaaatagctttctcattgttttgtttagggtctatatgtaagagcatttgttactttttgaagtacagtgtaaatttaattggctgctggggcatacatatataagtccttattctgtgttggtgatgaaaaaaaaaaaaaagggcgaacaaaaaagagaaaaaaaagattacg

SEQ ID NO: 24469 - DNA, 825 bp, Oryza sativa
  Clone ID: PAT_MRT4530_29449C.1
atgaagaagatcttcggcgccaagaagaaccaggagcccccgcccagcatccaggatgccaccgatcgggtttctttctgtctttcttgtttcgattccatcttcaattctattctattcaattcatccaccaagcaatcgaatgaatcgaatcaaacaaacccgcagatcagcaagaggggcgactccgtggacgacaagatcaagaagctggacgctgagctcgcccgctacaaggaccagatcaagaagaccaggccaggccccgcccaggaggccatcaaggcacgcgccatgagggtcctcaagcagcgcagaatgtacgaagggcagcgtgacatgctgtacaaccaaacatataaccttgaccaagttgcttttgcatcagagggacttaaagatgctcagcaaacgatgactgcaatgaaggcagccaataaagagctgaaaggaatgatgaaaactgtcaagcttgaagatatagatagcttgcaagacgagatgatggatcttatggatgtgagcaatgaaatacaggaaactctcggaagaagctacaatgtccctgatgacattgacgaggaagaacttatgggggagcttgatgctttggaagccgacatggactttgaatcaaattcagtcccctcgtaccttcaaccagataaggaatcagatctagattctgagcttaacttgcctgctgcaccaacgggtcacacacccgccccaccaaaccggcagcagaatttggtacttcatccgtttcataatgaggacgaattgggattgccgacagtgccacaagcatcgatccgtagttga

SEQ ID NO: 24470 - DNA, 556 bp, Oryza sativa
  Clone ID: PAT_MRT4530_2944C.1
ggcttgtttggggtttttttttttttttttttttttttttttttttttttttttttttttttttttttttttttttttttttgggacgaaaaaagctatatgtttgggtaataatccaaaacaagcccgttgtacaagggggtgcagtacatgggggggggggggggggctctctttgggacacgtccccctcgaaaggggcaaaacgtccgagaccaacacccaagaagaaaaaagcttgctagcgggaccgggccgatcaaccatggatgcatggggattgatcgaaaccttaactagctcattttttattccagaatacagatatgatactactaggactggatacaaaattcggttccacacatcgacccaggcagaatttactagggggcaaccggccccctgctgtatatatatgatccggctttgatcgagggctcagctcaccctggagcagtccatggaagccctgatggtgtaggggacgcttaccccgcacttggaggggatgctggcggggttgcccgcgttaacccccttgttgccgggggcc

SEQ ID NO: 24471 - DNA, 2834 bp, Oryza sativa
  Clone ID: PAT_MRT4530_29450C.1
gggccccaacattactgtttgtcattacacggcaattcagcaaagatacagaaaaactttttttgtcaacttgcagaacatacagtacaacaagggagcatcacagggctaaagaaatggactctggagctaccattctagacaaatacaacaggttctctgttaggtataaccatccaacgtctaagtttgctgaaaattattaggatgtaaacagtatttccgggtgtgtggccatgtgatacaaaaattcacatatcaagcagagtctaaatgtgccttctacaatgttatgatttctcttatgttttcttaccacacacttgaggaacatgaaacgaaataacagcttacacacaatcaatatgttctattgatgactgcagcagcattagcaaactcttcgtgatcctcaagagctgtcaatcgatccaacatcatttggtgactgctaagatccgataccggcgatttcacccttcgctttcgctgcagcttgctgtgctgcggctgctgcagctgccgctgccgctgcagctgatgcagctggagatgatggtacagctggtgtcttctgtggagcttcaatagcatgctcctgctgctgcttgttgtttacttgggccaatatgttctttatttgggcaccggtgagcgtctcgtgctcaagcagcgcattggctagagcatggagctccttgttgtgtttgatgagaatattctttgcattgttgtaagcattctccacgaaacacttgacctccttctcaatcaggagccttgtttctgtgctcatgctctttccatcatcctcataattgtaagaaacaaagccaagctgcttgctcataccatatttcgttaccattgctcttgccactgcagttgcttgctggaaatcagacgatgcgccagatgtcacctcgctatccccaaaaataagctcctccgccacccgtcctgccatggacacatccagccttgccagcatctgtttccgtgagaagcttgtctcatctttttccgggagttgggacaccattccaagggccattcccctgggcactatggtagctttgtgaacagggtgagcaccttcagtgtggatggcaacaagggcgtgccctccctcatggtacgccgtcaatttccgggattcatcagaaataactgctgacttgcgctcactgcccatcatgatccggtccttggcatactcaagatcattcattgtaacggcttttgccccatccatggcagctttaagagcagccacattaaccaagttagcaaggtctgcacctgagaatccaggtgttcccctggcaatgatcatcaaatccacatcatcactcttcaagacctttgacatatgggactctaggatttgccgccggccttcaacatctggatttggaacaacaatatgccggtcaaagcgcccaggtctcactagtgctttatctagggactcaggaaagttggttgcagcaataacaattatcccctcattctgcttaaagccatccagctcgacaagcaactggttcaacgtcatcttcatatactgttgatcctttggatttctactcccaccgatcgcatcaatttcatccatgaatatgatacagggagaacgttttttagctgcagcaaaaaggtccctgactcttctagctcctacgcctacaaacatctcctcaaattcactaccactgcatgagaagaaaggaacaccagcttccccagcaatagcccttgctaacatggtctttccagtgccaggaggaccaaccagcaagacaccttttggcagttttccaccaagacgtgtaaaacgcttgggatctcggaggtagtgaactatttcctcaagttcagctttggcttcatcgacaccctttacatcactgaatttcgtattagattccatgcttggttgaacctcttcatttagaccaaggcctttgcttattcctctatcctcaataagagctccaatgccagaaatcaggaggaatgttagcgctatacttcgaaaggtacgccaaagctgttccttaaattgacctgtttctgctgtaaccatgtgaatgggtgcatttgcagtgccaagaattccatcttttgtcacttgaccagcacttctaaatgctgaaacactaccaagattttctgaaacactaccaaggttttcttcctcccttgctgaagcagcaattcctctctgcaatgttttcagcaaggtgctatcctccaacctatcaaccctgacaagagcttttacatactcagcaagtgctgaaggattggaatgcaatgaaggttggctttcaaatatctgtatgacacgttctggatcactcctatatatttctttcagcagagaggcttcacttggtgagtccatctgtcgcatcctgcgtgcaaagctaccaacatagcttgactgatacctctcatgtaagtttctaagtgttccacctgctatggtgtcacctctaagaatcctcgatgggttggcatatattatttcattgcagattgcatatgcggatcggttccttgcgacctgcgaaaggacgcgccgccacgccatcggccggaatcccttattagtccgccgccgccgccgcgatgagatccccaacccgcaagagaaccctgtgtgagggcggcggcgggggaggggggggagggttgcgctggagaagcgagcgaagccccaagagcggcgggggctcggtcgcggcggaggcgaggaattcgccggcggcgaggtggggggaagagaggagggatgggccacgtcagttgacggtcacgcggcgcag

SEQ ID NO: 24472 - DNA, 218 bp, Oryza sativa
  Clone ID: PAT_MRT4530_29451C.1
cgctttcttctgcttcttcttctgtcctcacttcgttcgcttcctcggtcgctcgggcgtcatgtccgcccaaggagcaggacgaggggtaggggacccggatgtgttcgcgtagctgtggcgaggcttcccgcagacggtatccgatgtaccacaagctgacgagcggctgttctacttccttcaggaccacctcgagcaggtgcaagagccgactg

SEQ ID NO: 24473 - DNA, 972 bp, Oryza sativa
  Clone ID: PAT_MRT4530_29452C.1
atggtgcaggagctaatatacatgttggatatagcacaggaacgtggcagcaacaccattcacactcatgaggacaaagcagaacacctccatgcgcatctcacctcaattaatctgggagcaagggaacggaggaactgcacaataaactgggaggccctagccctggaaaaactacaagatgaagatacagatgacatggatggccccttctcagaagaagagatttgggcggcaatgtccgaaggaaaaggcggcagggccagacggcctattagtctgatccacttagtggcgaagctcatttctaagacactggccatgagccttccccttgacctcttccgccgaggcgccaacgaccgtggccagcctgccaggcaccactcgctgagaacccgagaccgcgaagacgccgacgggccatgccgcatagacgggaggtggtgccggctcggttgggcgtcgtcggcgcgcaggcaagcggtgctcaatgggacaaaggcggagctcaacggggttgtccacatccatgtcggtcacactaatgctggacatcctcatgctgcaacactcgtcctattaaagcccccgcagaacgccgtgagctcgtccagcggcgccgcgaccaccaccttggctggggctcacgacgacagcgagagcttgctcggcccgatgctggggcagctgccactgcgagggagctgcttcggcctggcgggaattggtaccatgccggctgcgtcttcctgtggcgcgggatgtgccgcgccgagctgctggccagcgatgccgctgcgtctaggcatgacgcgtcgtaagagctactcggcggcgccgacgtcttgtttggctgggttgccggccaccgtagggctgccatgccacctccatagccacacatctcgcgaacgtcgtgctacctccgccggtctaccagcgtcgctgcaccgtgctgtgctatcctag

SEQ ID NO: 24474 - DNA, 485 bp, Oryza sativa
  Clone ID: PAT_MRT4530_29453C.1
gttggcaccaagcgcggtggggctaggatagcacagcacggtgcagcgacgctggtagaccggcggaggtagcacgacgttcgcgagatgtgtggctatggaggtggcatggcagccctacggtggccggcaacccagccaaacaagacgtcggcgccgccgagtagctcttacgacgcgtcatgcctagacgcagcggcatcgctggccagcagctcggcgcggcacatcccgcgccacaggaagacgcagccggcatggtaccaattcccgccaggccgaagcagctccctcgcagtggcagctgccccagcatcgggccgagcaagctctcgctgtcgtccaccacctccgccgcgttgagccagccccgacccttgcgcacgaccgcgtagcgcttccccagccgaggtgccgcaccggactgcgcctcgccgtgctgccgctctcggttgaagaaagaggagagaaagagagagaagata

SEQ ID NO: 24475 - DNA, 240 bp, Oryza sativa
  Clone ID: PAT_MRT4530_29454C.1
atggagaggcctcgcgctgctggggaggacagggtccccggcaagccagtgagagggaggatggaggccatcgtgccgtcgcccagagccgctggagtgaacgggtccgctgctgggcgcggagctgccggaggacaggtggagattgcttgcgtacaggcggatcttccgctgctcaagtgcctcgctcggtcgcgattggatcgtcagggtagcagacggcatggcggcatcagacgg

SEQ ID NO: 24476 - DNA, 180 bp, Oryza sativa
  Clone ID: PAT_MRT4530_29455C.1
aaggacaccatgaacaggcgaggattatcaaatttggtttgtacatgatagccataccaaagaaaagggttaaaatacacacatgaacctaacttaaagcctcaccctcaaggaaacctggaacttttttaacgctgcccgatcaagtaccattttttttaaggatagctgcttcgggga

SEQ ID NO: 24477 - DNA, 480 bp, Oryza sativa
  Clone ID: PAT_MRT4530_29456C.1
atggcgccgccgccgccgccgccgtacccctcgtggtccaaccaccaccacctcccgcccggcggtcccgcgcccatggtggcggcgaggtactacggcccggcgccgccaggctccgtctcgcacccgatcaacggcagcccggtggtgccggccgccgctgcgctgtggcgtgtccccgccgccgccatcgccgtggcggcggccgccgcgccgctggcgcgccaagaacggcagccgccgctgtcgctggccggtggacgcgaggaggaggacgcaatggtggaggtaaggagagggaacggggtaggcggcgccgccgccgcggtggtgcaactgcaacccggctcgcggctgtcgcggtcgtcgtcctcgtcgtcgtcggcgtcgtcgtcttcgcagcatcaccacgagcgccgccgcctgggagacctggcagagattaaccgggagaatgtgagcttggatctcaccttgtaa

SEQ ID NO: 24478 - DNA, 356 bp, Oryza sativa
  Clone ID: PAT_MRT4530_29457C.1
tgccgagtgcgagttttgggcctactgccctggataatacactgtgcctggtgacccctgagagaccctcttcgtggatgatggaccacacacttgcactgggcactgaatttggaacgcttgtgcgtgctccacctgtgtgatgttgtgatccatctgatgtgggagatttgtgagcgaatattttctgtctccgattgcgtccgatgctcacctcttggatttcctgatgcatgcatgcttatattgggtgtgcaccacaggaataggatgtccatgccatggtggatgccacgacccacaccagggaaagggaaaagaacacttaatttacttaaaaaaaaaaaaaaaaaaaa

SEQ ID NO: 24479 - DNA, 1186 bp, Oryza sativa
  Clone ID: PAT_MRT4530_29458C.1
ttccaaccggattcgcgacgcgagcgcgaggctcatcaccgacggcggcgcccgcaaccgcgggagcgatcccctctccccccgccgcccggcctgcggagagtagggactccctccctctctctctctccggaagtgcactggctgtagatcgtcagtcaagacaacagtttattggtcagcggagcgggctagagcaatgttctccctggcgtatggtctatggaagtacatctttaacaagacagagtttcatgttcttattctaggtgttgacaaggctggcaaaacgactttgctcgaaaagataaaatcgatttatctgaaaggagaagggcttacacctgatcgcatcgttcccactgttggacttaatattggccgtattgaagatgcaaatgcaaagcttgttttctgggatctgggaggtcaggttggacttcgcacaatctgggaaaaatattatcaagaggcccatgctataatatatgttattgatgctgccgctgcatcatcatttgaagatgccaaatctgctctagaaaaggttcttcgtcacgaggatcttaaaggggcaccgctgctgatatttgcaaacaaacaggatttgccaggggtcatcactgatgaagaattagctagatatctgcagcttaaagagctagatgagaggccgtacaagtttcaagctgtatctgcctatgatgggagggggatcaaatctggcatagattgggtggtggaacagatggaaagaagtaaacgcactgaagttctgagggcgcgagcaggctttactgggcagatttagaatgttgacccgcagttttcaacaaagatttcgagggaaaaaaaattcaaggcatttgattgaaagggcttctgttacttatgacaatatgcagcttggcggatttcagcgactacatggttcatccttccagatggcacaccaacaaaattgtttgcccttgtgcgttggtgagtgaggtgattcgtttggtttatgagcatggtattctgctctgtatctaaagatccccttaggagtcgttcatatgattgctttttttgatacatggaaagtgtccgtatagaggaaccagagatcgtgcaacctctgtaatgttctttgtgaatgggaaaaaaaaaaggtaaaggaatccattgtaattggagttccata

SEQ ID NO: 24480 - DNA, 371 bp, Oryza sativa
  unsure (1)..(371): unsure at all n locations
  Clone ID: PAT_MRT4530_29459C.1
tgaaaaaaaaagagaggccacgaagagagctgagctgctgcctctagcttacttggtgataaggaggaggaggaggaggagggcaccnacatggcctgagtcacggcctacaccgtggcgctcctcggcgccaccggcgcgcgcgttcccgccgttccacgctccttcctgcttttgccgccccgtggttgagctcttcaaccgttgcgtctccagtaatctttcgcgtcttgaccctgttcctcggcaggtgcggtttttcttggtgaacattccatttcccacccggttattctctttttacccccccttggttcttttttttctcaccaaggttttcccccctgcccctttttttcctttttcttttt

SEQ ID NO: 24481 - DNA, 2580 bp, Oryza sativa
  Clone ID: PAT_MRT4530_2945C.1
atggatcagtcagaacatcaccgactggcttgccttcgccgctgccgactggtgtttccgcctgcacggctggcctttatgccgccattgttgggcgtctacgtcttcaccgaccggcttgccttcgccgccgccgactggtgtttccgcctgcacggctggcctttatgccgccgttgttgggcgtctacgtcttcaccgaccggccgcctcgtccgccgccgactggtgcttccgcctgcacggctggcctttatgccgccgttgttgggcgtctacgtcttcaccgactggcttgccttcgccgctgccgactggtgtttccgcctgcacggctggcctttatgccgccattgttgggcgtctacgtcttcaccgaccggcttgccttcgccgccgccgactggtgtttccgcctgcacggctggcctttatgccgccgttgttgggcgtctacgtcttcaccgaccggccgcctcgtccgccgccgactggtgcttccgcctgcacggctggcctattatgccgccgttgttgggcgtctacgtcttcaccgaccggccgcctcgtccgccgccgaatggtgcttccgcctgcacggctggcctattatgccgccgttgttgggcgtctacgtcttcaccgaccggcttgccttcgccgctgccgactggtgtttccgcctgcacggctggcctttatgccgccattgttgggcgtctacgtcttcaccgaccggcttgccttcgccgccgccgactggtgtttccgcctgcacggctggcctttatgccgccgttgttgggcgtctacgtcttcaccgaccggccgcctcgtccgccgccgactggtgcttccgcctgcacggctggcctattatgccgccgttgttgggcgtctacgtcttcaccgaccggccgcctcgtccgccgccgactggtgcttcctcctgcacggctggcctattatgccgccgttgttgggcgtctacgtcttcaccgaccggcttgccttcgccgccgccgactggtgtttccgcctgcacggctggcctttatgccgccgttgttgggcgtctacgtcttcactgaccggcgtgccttcgtcgccgccgagtggtgcctccgcctacacggctggcctattatgccgccgctgttgggcgtctacgacttcaccgccggcctgcctccgtcgccgccgagtggtgcctccgcctacacggctggcctattatgccgccgctgttgggcgtctacgacttcaccgccggcctgcctacgtcgccgccgagtggtgcctccgcctacacggctggcctattatgccgccgctgttgggcgtctacgacttcaccgccggcctgcctccgtcgccgccgagtggtgcctccgcctacacggctggcctattatgccgccgctgttgggcgtctacgacttcaccgccggcctgcctccgtcgccgccgagtgccccatccccgccgtcgccctctctctcccacgccgccggcgacctccagccgcctgtgccgcctcgcccgtgcgccggccggccgcgccatcgcctcctccagcgtcgccgccacctcctccacgccggcctgccctccgtttcgcgaggagacccccggaactacgttcccgccgtcgccctcctctttccttcgcgccggccacctccagccgccttcctctcctcgcccgagcgccgcccggccgcgccgtcttctccctcggcctcgcagctgcctcctctttcccggcttcgcctccgtttcgcggggaaatcaccggagacgcgtcctcaccgacgactagtgggtgtcgccaccactccaccatctccagctgtcccggccgcctcgcctgagcgtcggccgacgtcaccgtctcctccctcggcgtcgccgcatcgccctccaccccggctgctcctcggttttcgccggaacgccgtcgccgcgccggtctctccatcctcttcgtcgccggtgtcctttcggccgccccttcctcctccccggctcgtcggctcgctgcacctccaccacctccggcatcgcagcggcaaggtcgctcttggcctcgcttcccctccatccaaacccctccgcggtccatcatcgtcgtctccgatcgttctcgtcgtcgacgtcccgtcggtcgcccggctcgtcgtctcgcggcaccgcctccgtcatcgtcatcgcagcggcgtgtcccacgtcgtcctcgtctccgtgcagccgctgccggctgtcctcgtcgcctcctcgccggttccggtcgtcgtcgtcatcgtcctctcgtcgttcccggtttcgctcgtcgtggcgttcgtccctccgtcaagccgttctcatccgtcgtccgcatcagtcaagcaagtcgctgcagcccccgtcctcgtcttcgtcctcggctccgcgtcgtcaagcctcgtgccggccgcgtctcgccttcgttcaaggatcgccgccgaagccgtcccctcgccgttcgtctccgttgtgcccgtctgtctccgccgcgcccgttcgtcgttgtcgttcccgcgcctcgtcgcgtggtggtaa

SEQ ID NO: 24482 - DNA, 500 bp, Oryza sativa
  Clone ID: PAT_MRT4530_29460C.1
atggcgcgcaagcgtggaaggcgcgggagggtctcctgctcctgctccgctttctcggccgccacgtggtggccgagtgagggcctcagggcggtacgtgccaagggcacgaggggtgtgacgtggcaccccaaggccccctggccacctcagtgctacccgatctccccccgaggggacggggaaatagtcgtctcctttagtctccgtcgccgtcgttggattcgcaaagaggagaagaagcccgggcaccggttccttttagccgtaacctgctggaagcccgtcatcgacgtgaatccgatctactccgcctccggcagagccttgccatcgacttcgtggttcctggacgtcgtagtcgccttcttcggcatcgcagcgccaaggtgaagcccgtccgctggttttcctctgccaaagatcgccggaacgccgttgtcgtcgtcgaccagtacctcgttgcccttcggagctcgtcgccggtcgtcttccgtcat

SEQ ID NO: 24483 - DNA, 318 bp, Oryza sativa
  Clone ID: PAT_MRT4530_29461C.1
atggcggagaggcgatcataccacctgtcatacctcctcccccctctctctctcaggcataaagctcgcacagcggtcggcgtgtgggcgccggtggcgcgcgtcagacgggcagtcggcgtgcgggcggtggtggagtgcggggaggacgcggcagcggcgggcggcgtcgaggagggtgttggaggacgagggcggcaggacagcgacgtaaccgtgatggccaccgacgttgatgacatctatgggcgcaaatgcatcatgcaccttcttacaggagatgatgttgatgttcctttcttcaccttgctgccttga

SEQ ID NO: 24484 - DNA, 855 bp, Oryza sativa
  unsure (1)..(855): unsure at all n locations
  Clone ID: PAT_MRT4530_29462C.1
caacctcaatccccatccattccattccatcctgcacgagttctccactggagtggagatccgtactatactttttttattattaccacctgcccgcaaaaccaaatccccgcaccttcctctttccccttctttctcctcccaaaaccgctctctttcttctcccaattgcccacctaccggaagagaggaagagagagagagagagatgggttcttgcggattgaggagggtcagatgatgccattaccaatttaacatcttctgcatcttttttttgcctttcttggcatattcttctcttctggatgtgtagatccttctttccccagtcctgcttagctttcaagcagaccaacaggtccgagattggtgacctgggagcggtttcttgaggtgtggtgccgttctgggtaagatcgactctgttgccctgcaagaattcgatgcaggagtaagggcggcggcagtatgtaatttggtgggcggttgttggagaagaggagcaattttgcccatcggtttcttgggtgcaaattgagggcaaatttcggtgaatttcgtcggaaattgaggaagcccgtttggcaatcggtcctgtccatgtcccatgcctagaagctggggcattttgggggggtgaattgtgaacgaattccagnccaatttgggttgggccaggaaagtaccctttggggggtttcagtttgtgggtgtgatctgcaatctttccagattgggggggagttcttttgtgtgtgctggtggcaaatgggttgcacacactccanaggtggagatgaggaagccgtcaggaggtgcaggataggaggaagctgatgaagcagctaatgc

SEQ ID NO: 24485 - DNA, 1249 bp, Oryza sativa
  Clone ID: PAT_MRT4530_29463C.1
tgaatgggcggccaaaattgcaattagccccttgtcgccctcgggcctaatcgcaattttggccgacggcggcagacagcgcggtcgacccaccgtctgccacgtcagcttgccgcccaccaattgggcggcaggggctatttctgcaatttttttgtcgatctccccgtcgcttcggtctcgactcctcgtctcctcggccgccgccgccgccgccgccgccgagcagaggcgatctccacccgcgagcagcggcgccgtcgccggtttcaagatgcctcgctatgatgaccgtgatcgctacgatgaccgttacggcggcaacacgaggctgtacgtaggtcgtctttcctcgcgcacccggacccgggaccttgaagaccttttcggcagatatgggagagtgcgatatgtggatatgaagcacgagtttgcatttgttgaatttagtgatgctcgggatgctgatgaggcaaggtacaacctggatggtcgggactttgatggaagccgcatgattgttgagtttgctaaaggggttccacgtggccctggaggatcacgtgaatatatgggcagaggaccaccacctggttctggccgctgctttaactgtgggattgatgggcactgggcccgtgactgcaaagctggagactggaaaaacagatgctatcggtgtggagacaggggccatatagaaagggactgccggaacagccctaagaatctcaagcgtggaagaagctactcaagatccccatcccctcgtcgtgggaggagccgtggtaggagctacagcaggagccgtagcaggagctacagccgctcccagtctccaaggagggatagccgtaatgaaaggagatcaaggagccctcgtgacagtcggagccctaggggaagcccccgtgacagtcgcagccctagggggagcccccgtgacagtcgcagccctaaggggagccctcgcgacacccagagccctaggggaagccctcgtgatagccgcagccctaggagaagtgcttcaccacccaacgggaggaaccgcagccctacccctaatgccagcaggagtcctgcaccaagggacagcaggagcccaatgagagctgacagccgtagccctgctgaccatgagcgccgtgacatgagtacagctgccaatggccggagcccaagccccagggattatgaagacaatggcaatcatcgggcctcgcctagaggaagcgcatccccttga

SEQ ID NO: 24486 - DNA, 438 bp, Oryza sativa
  Clone ID: PAT_MRT4530_29464C.1
atgaatcttcctcggaatcgcgcgattcctcgcaagcgcgagcacctccgcatcccgaagattcatcctcggaatcgcgtgcctcctcggttgattgtgccagcgcacgcgaagaaggtagcagggccctttgttggcatggaatttttgtcacataaggaagctcaggactactacaatcgggaacctaaagctttagcatcgggcagccctggcggtgaatcaagaacagccaacaagtttcccaaaaagaaagtttcaaaggccgccactggctccaccacagacgccgccaccaccacgctcacgccactctccctcaccggtacaactaacctcgtgcgcaccggcgccgctgaagaggaggagccgcgagcaggctccaccgccgccgaccccgccaccgcagccatggtcgcgacagtttgggagctgtag

SEQ ID NO: 24487 - DNA, 720 bp, Oryza sativa
  Clone ID: PAT_MRT4530_29465C.1
gtcgcttcggtctcgactcctcgtctcctcggccgccgccgccgccgccgccgccgagcagaggcgatctccacccgcgagcagcggcgccgtcgccggtgtgctgcttctcccgtcggaccctcgccggtgagcacacttcaagatgcctcgctatgatgaccgtgatcgctacgatgaccgttacggcggcaacacgaggctgtacgtaggtcgtctttcctcgcgcacccggacccgggaccttgaagaccttttcggcagatatgggagagtgcgatatgtggatatgaagcacgagtttgcatttgttgaatttagtgatgctcgggatgctgatgaggcaaggtacaacctggatggtcgggactttgatggaagccgcatgattgttgagtttgctaaaggggttccacgtggccctggaggatcacgtgaatatatgggcagaggaccaccacctggttctggccgctgctttaactgtgggattgatgggcactgggcccgtgactgcaaagctggagactggaaaaacagatgctatcggtgtggagacaggggccatatagaaagggactgccgggaaacagcccttaagaaatctccaaagcgttgggaaagaagcttactcaagaatcccccatcccccctccgttcccgttgggggtaaggaaaccccgttgggtttggaacccttcccggccagggaaccccgtt

SEQ ID NO: 24488 - DNA, 474 bp, Oryza sativa
  Clone ID: PAT_MRT4530_29466C.1
gggtttggtttttttttttttttttttttttttttttttttttttattttttttgcttttttttttttttttttttttttttttttttttttttggggtaacatttttcctttttggggagtttttttaaattttggtataattgggggggggggggttttttgtgtataaaatgtttttcttttaaatttggacaaaatattatatccgaaaataaaagggaaaaacggggggggccaaaagaagggggcaaacaaaaaaaaaggggggagcacaaaatgcccgtttgagaggggaaaaaattggggcgccaactaaattaaaaaatgggaaaacccccggaaagagggggttagcatatggggccccaggggggtttttttttaaaacagggaggaggggaaaaaggttgaagctttaaaccggggggccctgaaaaaatttacaaaaagggggaaacagctggtttccccc

SEQ ID NO: 24489 - DNA, 1310 bp, Oryza sativa
  Clone ID: PAT_MRT4530_29467C.1
gcacgaggtctcgactcctcgtctcctgggccgccgccgccgccgccgccgagcagaggcgatctccacccgcgagcagcggcgccgtcgccggtgtgctgcttctcccgtcggaccctcgccgttcaagatgcctcgctatgatgaccgtgatcgctacgatgaccgttacggcggcaacacgaggctgtacgtaggtcgtctttcctcgcgcacccggacccgggaccttgaagaccttttcggcagatatgggagagtgcgatatgtggatatgaagcacgagtttgcatttgttgaatttagtgatgctcgggatgctgatgaggcaaggtacaacctggatggtcgggactttgatggaagccgcatgattgttgagtttgctaaaggggttccacgtggccctggaggatcacgtgaatatatgggcagaggaccaccacctggttctggccgctgctttaactgtgggattgatgggcactgggcccgtgactgcaaagctggagactggaaaaacagatgctatcggcgtggaagaagctactcaagatccccatcccctcgtcgtgggaggagccgtggtaggagctacagcaggagccgtagcaggagctacagccgctcccagtctccaaggagggatagccgtaatgaaaggagatcaaggagccctcgtgacagtcggagccctaggggaagcccccgtgacagtcgcagccctagggggagcccccgtgacagtcgcagccctaaggggagccctcgcgacacccagagccctaggggaagccctcgtgatagccgcagccctaggagaagtgcttcaccacccaacgggaggaaccgcagccctacccctaatgccagcaggagtcctgcaccaagggacagcaggagcccaatgagagctgacagccgtagccctgctgaccatgagcgccgtgacatgagtacagctgccaatggccggagcccaagccccagggattatgaagacaatggcaatcatcgggcctcgcctagaggaagcgcatccccttgaatgagaggaagcacatccccttaaatgagatgttaggggatgtatcagtcttaaagtttatgaatcaatttaaacctgttggagattttagtcatatctatgaacctgttgggatttgagtggatctgtatcctatttgttattgacgcctttcataagttgatagaccatgccatctgttggttgtactccgaactgcataaaatggaatttgcggcccaccgcggtttctggaacatatcggctattgcttgctcttgct

SEQ ID NO: 24490 - DNA, 664 bp, Oryza sativa
  Clone ID: PAT_MRT4530_29469C.1
ccggccgggctctgactctctactagtaatacagtactatactactcttcttcttccttccaacctcctcaactccaaaccaacacctccccaataaatccatccaaccccatcacacaatcaccaccatcttctccatctcgttttgtcaaaccaaaccatacaatcagaagcagcagaagctagctagatatagctactccagccatggcgccgccacggtgcaccgctctactgctgctggcgtctctcctcctcttcttcctctgcatctcagctactcatgaggctgcgagaacagcatcaggccaaccgatccaagaacaagaacaagaacagcatggcaaggtggaggaggagacgatggcggcgagcttcgcggcggtggaagagcagtgtggaggggaagaaggagaggaggaggagtgcttgatgaggaggacgctggtggcgcacacagactacatctacacccagggaaatcacaactgatagttagtacaatctactactatatggtagcctagctcatgcagcagcgaaaattggatgaatttacaattcgctttgatttctgtttgctccaatcagttcactttcactgtgactgattgatgtcatcttatcttatccaatcatttattgctgctgctgacttctctct

SEQ ID NO: 24491 - DNA, 242 bp, Oryza sativa
  Clone ID: PAT_MRT4530_2946C.1
aattcctaccctccgaaaagggcactgaatcatttctatttgctcatgcttcatatacattcctcccagagagacggctccatggaagttagtcttgccgtcaaccggcaaagaaaacacacacacacagtgccaggggaagcgctatcaccagaacactaaccaacatccagagctaaaaccaacaaggggagcaatgcacatccggaaaaaaatactccggggaaagaccaaatcttctt

SEQ ID NO: 24492 - DNA, 169 bp, Oryza sativa
  Clone ID: PAT_MRT4530_29470C.1
aagggcttaatacatcactagatttgagttttttttaacaatacacaactgcaaaccacagcccacacaaactttcaagcatatgggctaacagtagtaggttcaagtaagatcacacaagagccagggtctcagaactcacacatatgttatcagggatacacagcac

SEQ ID NO: 24493 - DNA, 544 bp, Oryza sativa
  Clone ID: PAT_MRT4530_29471C.1
gttgtgccgtgtaatgtgctcgtgttctgcaagtgccaagctgtacgtgcagaagtcagccaactatgcagtagtttcccaagcaaacaagttgagccatgggcaccacaggatccgtatagccaagtacatgatgcaaacgttgggcatgggtagctgccacaagccatggttcatgatcacaagccaaatgggctgcccctggcagcaagcaaatgttggcatggcaagctggcaaggcatggatggcctgcagtggcaactgtggacaaccagttgaccagatggatgcagagctatgcaacaagttatttgtgctgggactcgggcagcagcagatgatgatgaacactggcgatgcagatgccatacatgtgcaacatggcccctgtgcaaacttccaaactctcttcttgtgtttgttgttgatcaaacgttggttacatgtactctataataagtttccatactatctgtccaaaacactagaaataagaaccattgaataaagtatcaatcaatttcagacttccaaaaaaaaaaa

SEQ ID NO: 24494 - DNA, 453 bp, Oryza sativa
  Clone ID: PAT_MRT4530_29472C.1
tcaaaaacccgccgccaccgccaccgccaccgccgccgccgccggcacattctccggcatcctccggccatttccggtgaaactcaccgccgccggaagcgtgtctctcgcggcgcgatgtctacgcatcttaccaagaacccatcgcccctgttgcatcgccatctccatctcctcctgcagccccgccgcctctgcagcagcgccaccgccggcgaactcgcctcggaatccgcatccgtcggacgggcggtttaccgggtggacgacgacctcgcggaggagtcgaggagcaggctcgtgcgcgacacctgcaggctgctcgagctccgggagtcgtggagcccgaagctggaggcccagctccgccacctcctccgcgtgctctcgccgccgcaggtccgcgccgtgctgcgcgcgcaggcgcggggggacgtccgccgcgcgttcgag

SEQ ID NO: 24495 - DNA, 915 bp, Oryza sativa
  Clone ID: PAT_MRT4530_29473C.1
atgagcgggatgaattcgctgagcatggtggaggcgaggctgccgccggggttcaggttccacccgcgagacgacgagctcgtgctggactacctggaaaggaagctcctcgacggcggcgtgggcggcgccgcggcggcggcggcggcggtcaccatctacggctgcccggtgatggtcgacgtcgatctcaacaagtgcgagccatgggaccttcctgagatcgcttgcgttggtggcaaggagtggtacttctatagccttagggataggaagtatgcaactggccaacgaacaaatagagcaaccgaatcgggctactggaaggccacaggaaaagatcgcccaataagccggaaaggattgctcgtcggtatgcgaaaaaccctggtgttctacaaaggtagagcccctaaggggaagaagaccgagtgggtcatgcatgaattccgcaaagaaggacaaggggatccgatgaagttgcctctcaaggaggactgggtcttgtgtagagtcttctacaagagtaggacaaccattgccaagctgccaacggagggtagctacaacaatattgacagtgtggccacaacttcactgcctcccctcactgacaactacattgcatttgatcagcctggttcaatgcaaaacctagagggttatgagcaagtgccctgcttctccaataatccctctcaacagccatcgtcgtcgatgaatgttccgttgacatcggccatggttgatcaagagcaaaacaatatgggtagggcgatcaaggatgtgctgagccaattcaccaagtttgaaggcaatgtgaagagggaggcccttcaaagtaatttttcccaggatggatttgattacttggctgagagtggcttcacacaaatgtggaactcactcagttga

SEQ ID NO: 24496 - DNA, 789 bp, Oryza sativa
  Clone ID: PAT_MRT4530_29474C.1
atggacggcgtcgcgaggtcgcgcctcctcgtcccgctcctccccaggatctccgcccgctccttctccgccgcctcccccgcgtcagagccagcggcggctgcggcggccgtcgccgcctccgacgcggccgccgccacggactactcgtcctccgcgggcgatccctcgtccgcgccgcccccgccggcccgcaagccgctgggcctgctcaagggcggcgtcctcgcggttgtcgccgccgcgttcggcgccacaggctacgtcagctatgcttattctctggatgaaattgatcagaggacgcgggagttccggaagaactcgaagcagcccatccgtgatgacctgtccggtttcgagaagtttcaggctatggcttattcagcagctatgaaagttcctgttgctgctattgagttctatttggataccaggagccaaatagaagatcaaattcggggctttagtgaaccatcatcagataaacttcttccggatctacttcctcaagagcagcatgtcttcaccctagttctggatctgaatgagactcttgtatactcagattggaagcgtgagcgaggatggagaacttttaagaggccaggagtggatgcctttttggaacatcttggaaaattctatgaaattgttgtgtactctgatcagctgagtatgtatgttgatcctgttattgaaagactggatccaaagggctgtgttcagcacaggttatcaagagttgcaactaaatatgaaaatggaaaacactatcgggtatggtag

SEQ ID NO: 24497 - DNA, 1756 bp, Oryza sativa
  Clone ID: PAT_MRT4530_29475C.1
tgcatatctctctccgtccccttttgctctccgaaaaccctaacccctcgccgccgatccggccctcctccgccgctggccgccatgccggacgtgcagccgctcgtcagcgagttcgtcctcaagctcaagcgccgcaaggtggaggggtcccatgccgtggcgcggcagacggcggagctgctgcggtcggtggtgtcgcagcaccggatgggcagcaccaaccaggcggcggcgcttgcggacgccgtccgcggcgtcggggagcagctcatcgccgccaaccccatcgaacttgctgttggaaacattgtgagacgtgttttgcatataataaaagaagaggatatatcttctacagcagttggtattgaaggcctttctgtcaccgctgagagcgatgatgaatatgacagtggaaatgatgatcaccctaccttatctgctgctgtccttgctgcccatgctagaaatgcccttcgggcaccttcattgcagacacttctggaagatattcctgtgagcactgcgctttcacgttccgcatcgtcggctggggactctgatggaaaatcagctggagataagagctcaaaatctcggaaactcaagcatgatgttattgcagccattggtgatctaattgatgaaattgatacgtgctatgaccagatctctgagcaagccgtggaacatattcaccagaatgaagtaattctaactctaggccgctctagaacggtgaaagagtttctgtatgctgccaaagagaaaaagcgatcttttcgtgtatttgttgctgaaggtgctcccagatataagggtcatgttcttgcaaaagagctggttgagaagggtgtacaaactactgttataacagactctgcagtttttgctatgatctcccgtgttaacatggtcatagttggagcccatgcaattatggcaaatggtggagttattgcaccagtaggaatgaacatggttgctcttgctgctcaaaggcatgctgttccctttgttgtggttgctggcagtcacaagctatgtcctttgtatccacacaacccagaggttttactgaatgaacttaaatcaccatctgatctgctcgactttggcgagttctcaagttgcatgaacttcagtactcaggatggcactcctcttctgaatgttgtcaatccaacgtttgactatgtgccaccaaagcttgtgagccttttcatcactgatacgggagggcacagtccatcatacatgtaccgccttatcgctgagtattactcagctgatgatttggtagtgcggcggaagtcgacatcttcatagaacaaaaaaggcgcactagagtactttagtatgttggcattctgaaggtacaatctaggatgtacacaaatgctgttagagaggttgctgtcctcaatggaatcagctgttttgatctggaagttgaattctgtaattattacccccgaaccgcaaccaagcatttttgagtgtagactgtttgaggctatgggcgtgacggatgcctgattggaacatgaattgtataaactagagaaggaagctacatatgtgatgcagggtgtaaagtgtggatgttttcgagtccgtgcatcctgtgatctgccgagtccaaattttgtgggggggggggggccaaatggggggtgccagtgttaaaagccaaacattgatggacttagctaaagaattttccttaaaaaaaaaaaaaaaaaaaaaaaaa

SEQ ID NO: 24498 - DNA, 228 bp, Oryza sativa
  Clone ID: PAT_MRT4530_29476C.1
atgcagccgacagattcaccagggctggcggaacgtaggacttaccccttcgccggagatcgaaagccgatgcagccccgcgccaggtgccaagttccgtcggatgataagcacaatggcgacaccgaggggacgaggacggggccgcgaaggagggatcctcaccacaacgggacgaagcgtggaatgacgacgaccaatgggcgcggtggagacgaatgggaatga

SEQ ID NO: 24499 - DNA, 2743 bp, Oryza sativa
  Clone ID: PAT_MRT4530_29477C.1
atacacgacctggtgcataatttggcaagatgaatattatttgatgcagttctggattctggaaaaaaaatcaatattggggtaagtagttgtcgctatggaatgctcagagattgcggcacaccactagagttggttacaccttcacttgcaaagataaaaacacttcattttctgggttgtggcaaaattgagcttcatggttttgcattctcatccgcttcatgcttgcgagatttagatttaagtggctgttccatcctgatgttacctgcttctatcggtcaattaaagcaataaaggtaccttaatgctccgtgtatgaaaaatcgaatgattccctagtgtatcaccaagctctcaaaattaaatttcctcagcctgtgcaggtctcttgctatctcagcactcccagagtcaattggtgaaattgaaggtctcgtgcatcttgatttatctggttgttcacgtttaaaagcgctcccaaagtcatttgggaagctcagatggttggtgcacctaaatttgtcgaattgctctcgtgttaaagatgtatcagaatacatttgtggccttaccaaccttgaatatttgaacctatcagtgtgccgtaaaattggatttctaccgagaacattgggcagcctcacagaacttaagtatttgaacctatcaggttgttttgggataaaagaattaccgaaatcatttcagcagctaaaaaatttggtgcatctggatctgtcatgctgtaattgtgttaaagatttgtcagaagctttagatggccttgcaaaactgcagtacttgaacttatcatattgtcaccattatggaaaccagtttcgtctgagagggctgccagaagtcattggcaatctcaccagtctccggcatttgcatttatcggggttcctagacaatatatttggcaaccaatctggagtcatggacaagctcctggaaatagggtatttaaatttatcaacattccagggtaatatttttcagcaactaccaccaggtcaaagtcacagtttcattgagtgcatcggtgccctttcaaatctggagcatctaaatttgtctaataatgtcagcctttatagtgtacctgaaagtctgggtaaccttaggaagctacacacattagacctcacaggttgcattggactattgtggctaccagaaagtataagtaaaattcaaagcttgaaatatgtacttatgaaggatttgttgagacttaagtccacactatcttgtttcaacaatggcccaatcttgttgccaaactttgtggtccaagctgttgacaagaaatccagcaatcttggtcagcttcttgatgcaaaccctgctgagttggacataagtagtcttgaaaatgtgaagtccacaaaagaagcaaagggaataaaattgtcaggaaagagaaatattgtcaaactgaaatttgattggaccataggaaccaagcgatacgtggaggacatggaagtgttgagagaactagtgccgccaagcactgtgaagtactttgaactgcgaggttatcacagtacaagctttcctacctggttaatgggcattgcacactgtctccctaatcttgtcaaaattaagatagtggatttgtcgaaatgcagcatactaccacttggtcagttaccaaaccttaaacaactggttctcggtagaatgaagagcataacaaagatcgatgcggacttctgtggtggtgcgagagcatttcctcagctgaagacatttgacatatacagcatggaaaggttgcaagagtggaatacaacatactcttgtggtgaggatggtgtgactgagttcatgttccccaaccttcagtggttaagcataagtgactgccccaatttggttgtgaaaccactcccgcctagagttacgtggtggaaaatagagggcggtgaaagtgtcatatcatcatggggagggagtgtgcacactggtacatcttcatcctcttgttcagtaactaatctggtcgtcaaattctgtacgttgccgttgagtcagtggagtctgcttcaccaccttcctgccctccgtcacttaaccatccactggtgcgctgatctgactagctcaccagagatcattcaagacctccactcactcaaatcactcgtccggaaacgaacaggcagagcttccagattggctgggtgacctcccttctcttcaagaactaaagataaccatgtatccagcgctgactgagctgcaagagaaaattaggcagctcatgtcactacagtcattgacattgtcttcttgtcagatgctgacatcattaggtgaatggtttgggagtctcacctctctccaagaattgcacatctcacactgccaaaggctgaacagtttcccagagggcatgcagtatctcacctccctcttgtcactgcatctgagttactgtgagagcatttcagcactgcctgaatggttaggaaacctcacatccctcaagacactccagatatgggaatgcagaggcatcaagtctttgccggagagcatcgaacaactcactatgcttgaacatctagaaatttctggctgtcctgaactaaagcaatgtgtttttggtagtgctgggaggctagaaggtgtcttcactaatctcaagcttgcgttacaaatccaggagcatctcggcgctatatgtgctgccatgtcactgccggcatctcaaaaataa

SEQ ID NO: 24500 - DNA, 742 bp, Oryza sativa
  unsure (1)..(742): unsure at all n locations
  Clone ID: PAT_MRT4530_29478C.1
ggatataaaaacagatcgtatgctatgtatatatattaagcacttgcattagtcattggtcattagggctaattaatcgagttttccaatgcaatgagctgtaggaaaatgagagacatgacaaccttgtacctaggaaactcctatggcagaaatgactagcattgacatggagcttggaagtacccccatcaaaaaacaaaaaaacatctgtattttatttttgagatgccggcagtgacatggcagcacatatagcgccgagatgctcctggatttgtaacgcaagcttgagattagtgaagacaccttctagcctcccagcactaccaaaaacatttattttttatgtgagcaagcttcgttttgctatcctctaattcacaccattgctttagttcaggacagccagaaatttctagatgttcaagcatagtgagttgttcgatgctctccggcaaagacttgatgcctctgcattcccatatnctggagtgtcttgagggaatgtgaggtttcctaaccattcaggcagtgctgaaatgctctcacagtaactcagatgcagtgacaagaagggaggtgagatactgcatgccctctgngaaactgttcagcctttggcagtgtgagatgtgcaattcttggagagaggtgagactcccaaaccattcacctaatgatgtcagcatctgacaagaagacatgtcaatgacttgtagtgacatgagctgnctaattt

SEQ ID NO: 24501 - DNA, 243 bp, Oryza sativa
  Clone ID: PAT_MRT4530_29479C.1
aaaaaaaaatttgtttaaaaaccatttatggggaccctttgaaaccacattaaaaccgtttaaccggaaactttatttaaaaaaaagggtggggggtgtgaatttgctcacctttgaaggcttttaaaagggggggaacccacaagggaaaaaaaacggaagtttaaacccttgggggggaaaacccccaaattttttgggcccaatgatgcaggagccaatggaaaacctgttttacccttt

SEQ ID NO: 24502 - DNA, 192 bp, Oryza sativa
  Clone ID: PAT_MRT4530_2947C.1
atggcgcaccaggcgtgtttccaagagaaagcgccctcgggttccaccgactcgacccccgaaatttttacctccgccttgcgggctcgggtggcgcgcacgacggcgtgggtgtgggtgcgctgcgccgagccgagcagacggggatgggggagcgtcgtgatcggtggaaaggtggttgcgcgcacctga

SEQ ID NO: 24503 - DNA, 604 bp, Oryza sativa
  Clone ID: PAT_MRT4530_29480C.1
taaaccattttttgaccagcctactctttactctcatccacctaccatccgcggctgcggctattattcaactcacgtattattcactcttctacttctctatctctcctctacatcctcctaaaccttctttttcataattcatcatccttccttccattctttctaaactttactctttcatcataactatttttccctttcctcctctctatcactacctaattatctttattcttccctcctctattttctctctttcccctcctctttctcctcacttttctctttctttctcctcttttttccctcctccacattttccccttcttcttctttatcctctctctcctttttttctcgttccctttttctctccttttcccttccttcctccttttttttttccctcatttcttctttttccctctctcttctttttctcttttccccccttccctcctctctccttttttttttcccttcttcttcttcccttctcttgttcctcttcccttttctttttttcacttctcccctcttcccccttctcacctctcaactcatttttctcctttttctcttttttctcctccccttcttt

SEQ ID NO: 24504 - DNA, 603 bp, Oryza sativa
  Clone ID: PAT_MRT4530_29481C.1
gttcccaaattcatcaaacgaaataaaggaagaaattcaaatttaccaccttgagactcctgaggtacaaaattggatatatggtccctaaaaattgaagtgtgaccgaccataacttgctgaaaacaatcatttttcatctatatgcatcatttgtaggaggatgcaagctttcagcattttcttcaacattgacttcaacataggacagagcagtactgtaccttgaagtctctttccacacacccatctccatccttacatccacaacacgtcgccaatcctcattggcagcatacaagtttgacgctagcacataattccccccgtattcaggctccatttcgatcacatgatcgaccaccttcctcgcgagaatggcatttcctagatcccgacatgctccggtcaatacacgccatattacagggtcaggcctcactggcgtagccaggacgaactcaaatgcctcttccagcataccagatttgcacaggaggtccaccatgctcccatagtgctccatccaaggtggggatgtgatacttcttcaaccattaggacttgaacaattgggcgcgcctttatttgacgagacccccg

SEQ ID NO: 24505 - DNA, 261 bp, Oryza sativa
  Clone ID: PAT_MRT4530_29482C.1
atggaattaattaatatgccggcggagatcagcgtcctcagggtggataggatcgagccggcgaagaagacgaagacgccgccgccgccgccgacggcggtgaactcggtgcagacgccgaggatgggcggcggagcaccggcaccggcggcgactagtactgcaggccgcagcagcattgacgcggaggccgaggggttcatcaacagggtgaggcggcaatgggcggcggagtcgtcgtcggcggcgacaaggcgttag

SEQ ID NO: 24506 - DNA, 1157 bp, Oryza sativa
  Clone ID: PAT_MRT4530_29483C.1
ttttttttttttttttttttagtgtatgtagatcatgaaaaattccaatcactgtctttgaaccattacatctattacatttggtgtgtacctggaagttcaggtcttcaggcaactatatgctcatactttttgccaaaaaaagctgcaaaaatttgcatttatgcctgtgggtcctcttacaaatatttgaacatcggatgcacaagctaagcctcaaattagaaaggtacatgcatatgatacaggggaaaagcaacaggaaggttaatctaatctagcttcaactatgatgagtagttcctagacaagtacctctttactggcgcggcaagcacccctactctgtgtgggtggaaaaggacaacacaagctgcaaaacataccacagcaccaattaccacagtggtggcaagacgcattctcatggcaccacctggaaaagcaccaatggaggcagcgttaagccatctagcactagtctcagggtgacagcattgcctgtgtgggagagctttagtcactagaggcatattttcctcctctccagaagctgcattggttgagtgcaaatcatgttctccactggttccagtactttcagcaagtggcacagaaatgcccaactttggctggtttggagcataatcacctgcccatcttgtatcaacctgtctctgcttgtcatatttaggtctattatcaacaatgtttcgagcttcgcttacatacccaagaaattctgttacatgattttccagtctacccttttccaagttagaaagaagctctgaccctatgatgttgtccaacgagttcactattatttccagaacattgataaaatcgttctgtatcaggaatttcatcatgcatatccatctctggatatttgctaaactcagtaggttttgaaattcatctatggatggcttccttattagccatccaatgtcgatgaggaatcccaacattgcagtctgtcgaagtcctcgaagctcacaaggatcagaacttatgtccgaagaaccacacagagcatcatgtatctgctctagttcagaacataaatgcttgctaccaacaaggataggaacaaaatttgatagcccaaacatgttttccacttcctcaaatgcgggtccatgagtatccag

SEQ ID NO: 24507 - DNA, 2613 bp, Oryza sativa
  Clone ID: PAT_MRT4530_29484C.1
atgttgattgatttctctgggttttgttttggattctcagctggtattgttattgggtacttcctcttcatctacttccagccaaccgaggtgaaggacgtcaaagtttgcccactggtggaatatgactcaaattctttggatggcatccttcatgaaattcctttgtgggtcaagaatcctgactgtgatagaattgattgggtgagcagatttctggagatgatgtggccttacctcaacaaggctatctgcaaaactgcacaggatattgcaaatccaattattgcagagaataaagaaaaatataacagagattctattgagtttgaaacactttgtctgggtcgctgacaatcaacctttcaaggaatgaatccttaagttacagcagagtgggagttaagaatggagcgatctcttaagtgtgcagtaaaaccgaatgtcactggaggcgaaaaggcttatgaattgtaagtagctaaagaggttggagatttataagttttagcttcagaacgtatttctttaaaatctttgggggctaacatcccgtgctttgcaaaaatccttgtatctctcatggagaagccacatgtcgattttgggctaaaacttcttggagcagatgtaatggctattcctattctttacagttttgttcaggagaccatcaagaagcaagttgcgagcatgtatttgtggccaaagacacttgaagtgcctataatggatccctcgaaagcttctaaaaggcctgtcgatgacaagcttccatccaagaaaacaacagtgaagcgcggtaatcttaatccagagtggaacgaagatttcaaatttgttgtgacagatcctgaaactcaagaactggaaattaaagtcttcgactgggaacaggcatggaatagctttgttggaaagcacgacaagatgggcatgaacaagattctgttgaaagaacttcccccagaggaaactaaagttacaacctataacttgcttaagaccatggatccaaatgacatacataatgagaagtctcgtggtcaaattactctggagatgacatataaacctttcaaggaagacgatatagagaaagatgtccaaggtacagacgtagtagggaaagctcctgatggtactccagctggtggtgggctgctttatgttgttgttcatgaagctcaagatcttgaaggcaagcatcacactaacccatatgcaagaataattttcaaaggaaacgagaagaaaacgaaggtgatcaagaaaaacagggatccgcgatgggaggaggagattgagtttgtttgtgaggatccccctgcaaatgacaaactacatgttgaagtcctaagtaaaccccccaaaaaatggttgatacatggcaaggaaactttaggctacattgatataaacctcgcagacgtgatcagtaataagcggattaatgaaacgtaccatctcatcgactcaaaaaccgttggtattgttatcggttacttcctcttcatctacttccagccaaccgatgtgaagaatgtcaaagttcgcccactggtggaatatgactcagattctttggatgacacccttcctgaaattcctttgtggctcaagaatcctgactatgatagacttgattggctgaacaggtttttggagttgatgtggccttacctcaacaaggctatctgcagaattgcacaggatgttgcaaatccaatcattgcaaagaacaaagagaagtataaaatagactatattaagtttgaaacatttactttgggtagcttaccaccaaccttccaaggaaatcccaataccactgttgttgtaaaggcttacgggttgaaagcaactatccagccacatgttgactttggcctaaaacttcttggagcagatgtaatggctattcctgttctttacaaatttgttcaggagaccatcatggatcaagttgctagcatgtttttatggccaaagacccttgaagtgcctataatggatccctcaaaggcttctaaaaagcctgttggtattctattagtgaaagttttaagagctcaaaatcttcgagagaagggtccgttgggtaaacgagatccgtatgtgaagctcaagatgtcaggtagcaagcttccatccaagaaaacagcagtgaagcacaggactgaagttataactgataacttgattaagaccatggaaccgaatggtatacagaatgagaagtctgctggtgaaattactctggagctgacatataagcctttcaaggaaggcaatatacagaaagaagatcctggagggctgctttatgttgttgttcatgaagctaaagaacttgaaggaaaatgtaacacgaatccatatgtaaaactaactttcaaaggagtagagaagaaaacaaaggtggtcaaagagaacaggaatccacgatggaaggaagaatttgagtttgagtgtgaggaaacccctgcaaatgataagctacatgttgaagtcctagatgtgatcatcaacaaacggatcattgaaatgtacgatctcatcaactcaaagcgtggccagattcagattgagttccagtggaaatcttcgtag

SEQ ID NO: 24508 - DNA, 1591 bp, Oryza sativa
  Clone ID: PAT_MRT4530_29485C.1
cacacaccttggatcgcggcctcacgcgcgtgaggggccgcaacgcaacgtgcgaccccgacctctcctcctccacctcggcttccccccaaattccatctcctcgcctcggcgaatccgattccgagcactcacaaccggatcggagcgagttccatggcctgaatctcagggggggtgactggccgaggagcgggctctctctctcactgccttaggctgaaatctgctataactttggaggtactaaaacgagtctgagatgggtatagtcagcacggtgcttggtttctctgggtttggctttggattctccgctggtattgtcatcggatactacttcttcatctacttccagccaactgatgtcaaggacgtcaaagttcgcccacttgtcgaatatgactcaatatctttggacggtatccttcctgaaattcctttgtgggtcaagaatcctgactatgatagaattgattggctgaatagatttttggagatgatgtggccttacctcaacaaggctatctgcagaactgcacaggatattgcaaatccaatcattgcagagaacaagaagacgtataaaatagactatattaagtttgaaacatttacattgggtagcttaccacccaccttccaaggagtgaaagtccaagttacaaatgagcaggagttggttatggaaccctctcttaaatgggcaggaaatcccaataccactgttgttgtaaaggcttacgggttgaaagcaactatccagccacatgttgactttggcctaaaacttcttggagcagatgtaatggctattcctgttctttacaaatttgttcaggagaccatcatggatcaagttgctagcatgtttttatggccaaagacccttgaagtgcctataatggatccctcaaaggcttctaaaaagcctgttggtattctattagtgaaagttttaagagctcaaaatcttcgagagaagggtccgttgggtaaacgagatccatttatttcctttttatatggccagtttggaaaggatgaaaaattgggcatgtgcaagatttcgctgaaaaaacttaccccagggactgaagttataactgataacttgattaagaccatggaaccgaatggtatacagaatgagaagtctgctggtgaaattactctggagctgacatataagcctttcaaggaaggcaatatacagaaagaagatcctggagggctgctttatgttgttgttcatgaagctaaagaacttgaaggaaaatgtaacacgaatccatatgtaaaactaactttcaaaggagtagagaagaaaacaaaggtggtcaaagagaacaggaatccacgatggaaggaagaatttgagtttgagtgtgaggaaacccctgcaaatgataagctacatgttgaagtcctaggtaccaaaaaagcgttgatacgcaataaggaaagtttaggccacattgatattagcctcgcagatgtgatcatcaacaaacggatcattgaaatgtacgatctcatcaactcaaagcgtggccagattcagattgagttccagtggaaatcttcgtag

SEQ ID NO: 24509 - DNA, 252 bp, Oryza sativa
  Clone ID: PAT_MRT4530_29486C.1
aagaaaaacagggatccgcgatgggaggaggagattgagtttgtttgtgaggatccccctgcaaatgacaaactacatgttgaagtcctaagtaaaccccccaaaaaatggttgatacatggcaaggaaactttaggctacattgatataaacctcgcagacgtgatcagtaataagcggattaatgaaacgtaccatctcatcgactcaaaaaccggtcagattcaaatcgagttgcagtggagaacttca

SEQ ID NO: 24510 - DNA, 167 bp, Oryza sativa
  unsure (1)..(167): unsure at all n locations
  Clone ID: PAT_MRT4530_29487C.1
ctgtcattaagcggggctgagaaatctaaaaattctcacagaantctagtgtcgacacggaggtccaaaaagactaaccgagatgatgatggcagtgaggataagtgctatgttcacagtgatggtgctgaatacccttctgatactgactccctcgacgaagatct

SEQ ID NO: 24511 - DNA, 345 bp, Oryza sativa
  Clone ID: PAT_MRT4530_29488C.1
atggcggatcgggcaattcgttacctcctgcgcggcgaccagcggcggggccttcggcgtcgagcccagctgctcgccgccgccggtcgctaccaccgccgccgccgtctgctcctcctcgactccggccgcgtgctcatgttgctcgccgtcgttgccctcctgcacctgctgacggccgcctgcactggccaggttgagttctacgtcgtcctcgtcgcgttcctcctgtggctactcggtgcggcgttcgccgtgacgtcgctcgtcgccggccagttccccgttctcgccgccgccgccgccgcgaggacgctccgtggctggctgcttggcggtctatga

SEQ ID NO: 24512 - DNA, 672 bp, Oryza sativa
  Clone ID: PAT_MRT4530_29489C.1
atgacggcagaccggtttggagcggagcggcgacacgggcggcagacgcggggcaggcgcggcgccacgacggagcgggcgctacacaagatcacctacttcaacaagaaaagccatgagcaggcgtgctcctacgagccgtgcttctgcccggactctggctgcggcttcagcgggtcagtggcgacgctctggaaacatttcaccactcaacacaagtggccgtccacggagttcaagtactatacaccgttcgacctcagagtcaaaccaggcgcccacttcctccgagctggcgatggtcagctcttcgtgatgaacatggtgtcggtggagccagtcggccatggggtctccctcgtctgcatccagccgaacacttcggagtccagtttcaggtgcaatgttgtcttctccagcttcacgggccatcaccagatctcgacgctggagtcagtcaggtgctcgtcgctgtcggacgggcttccaaagaactacttctgcatcgtgcccaagtctcctggtggtggcgctgccgtcttgctcagaatcaccatcgacactaagttggtgctcgaagtcgaggacgaacaggaggaggaggaggacgatgacgactatgatgaggatgaggatgaggatgacgagagcgacgacgaggatgggaattag

SEQ ID NO: 24513 - DNA, 738 bp, Oryza sativa
  Clone ID: PAT_MRT4530_2948C.1
attcggctcgagttttttctccttgaactcgaattttcactactgctgatgaggaggttctgctagatttctggccaagtccatttgggatgagggtcaggattgcacttgctgaaaagggtatcaaatatgagtccaaagaagaggacttgcagaacaagagccctttgctcctcaaaatgaacccggttcacaagaaaatcccggttctcatccacaatggcaaacccatttgtgaatctctcgttgctgttcagtacattgaggaggtctggaatgacagaaatcccttgttgccttctgacccttaccagagagctcaggctagattctgggctgactttgttgacaataagatatttgatcttggaagaaagatttggacatcaaagggagaagaaaaagaagctgccaaaaaggagttcatagaggcccttaaattattggaggaacagctgggagacaagacttattttggaggagacgatctaggttttgtggatatagcacttattccattcgacacttggttcaagacttttggcagcctcaacatagagagtgagtgccccaagtttgttgcttgtgccaagaggtgcctgcagaaagacagtgttgccaagtctcttcctgatcaacacaaggtctatgagttcattatggacataagaaagaagttcgacattgagtaggttcatgttggattttaatagccatagtgacgtattgatcattctt

SEQ ID NO: 24514 - DNA, 623 bp, Oryza sativa
  Clone ID: PAT_MRT4530_29490C.1
ccggccgggatcggcttcggctccgaccgcgacgacacgagacttttcctgcctccgccgccggtctcggcgtggtgccctgaggcggcgaggccgccgtgagatctcagctccgccgcccgtgggaatcgagctccggccccgtgccttttcctgcccccccagctgaaaaatggggaggataccgtctctgaaaaatttcaatgccttcccccatgcggaagaccacttactaaagaagacttactctggtgctatcgtcacgattttcggactaattataatggttacgttatttgcgcacgagctcaaattttatcttaccacctatactgttcatcagatgtctgtagatctgaaacgaggagaaactctgccaattcatataaatatgtcatttccctctctaccatgtgaagtcttgagtgtggatgcaattgacatgtctggcaagcatgaagtggacttgcatacaaatatttggaagcttcgcttggataagtatggccatatcattggtacggagtatttaaatgatctagttgagaaggagcatgggactcacaatcatgatcatgaccatgagcatgaatatgaacaaaagaaagcagagcacaccttta

SEQ ID NO: 24515 - DNA, 1677 bp, Oryza sativa
  unsure (1)..(1677): unsure at all n locations
  Clone ID: PAT_MRT4530_29491C.1
ctccgaccgcgacgacacgagacttttcctgcctccgccgccggtctcggcgtggtgccctgaggcggcgaggccgccgtgagatctcagctccgccgcccgtgggaatcgagctccggccccgtgccttttcctgcccccccagctgaaaaatggggaggataccgtctctgaaaaatttcaatgccttcccccatgcggaagaccacttactaaagaagacttactctggtgctatcgtcacgattttcggactaattataatggttacgttatttgcgcacgagctcaaattttatcttaccacctatactgttcatcagatgtctgtagatctgaaacgaggagaaactctgccaattcatataaatatgtcatttccctctctaccatgtgaagtcttgagtgtggatgcaattgacatgtctggcaagcatgaagtggacttgcatacaaatatttggaagacaaattcagtagttgcactaattatcctcattgcttatgacgcgcttcgcttggataagtatggccatatcattggtacggagtattcaaacgatctagttgagaaggagcatgggactcacaatcatgatcatgaccatgagcatgaagatgaacaaaagaagcaagagcacacctttaatgaagatgcagaaaaaatggttaagagtgtgaaacaagcaatggaaaatggtgaagggtgccgagtttatggtgttctagatgtgcagagggttgctggtaacttccatatctcggttcatggtttgaacatttttgttgctgagaagatttttgatgggtcaagccatgtgaacgtcagtcatatcatccatgatctatcctttggtccaaaatatcctggaattcataatccactggatgagactacaaggatactccatgatacaagtgggaccttcaaatactatatcaagattgttccaaccgagtacagatacctctcaaagcaggtgttgccaacaaatcagttttctgtcaccgagtattttgttcctaaacgcgctactgataggtccgcgtggccagctgtgtacttcttgtatgatctctcaccaattacagtcacaatcaaagaagaaagaaggaacttcctgcatttcctcacccgactatgtgcagttcttggcggtacctttgcaatgacaggaatgcttgaccgatggatgtaccggcttattgagtctgtcacaaaatcaaagaccagaagcgtactacggtaattgcgcatcacatgataagtggaggcaaactgtgacaaccctgtgtgttgtcactggtcatacaaatcagtcagagcatatcgtctcagatacggtcaaccccagtgggttttcatgttttgatatgctctatggctcgattgcttaaaatacttatgttgttagctttgtcattaatcactcatgttagactggcacggactcataacagttttgtaatcaatgattcccacaaatcggaggtgccaacgtcgtgtgatcatggagaaacaaatcccagtatagcctgataattccaaaaaagcagaaaaaaaatcaacatataaaacttcgatactaaaaaaaaaaaaaaaaaactcgagggggggcccggtacccaattcgccctatagtgagtcgtattacaattnnnnnnnnncnnnnnnng

SEQ ID NO: 24516 - DNA, 222 bp, Oryza sativa
  Clone ID: PAT_MRT4530_29492C.1
atggccatgggcgacatggcttgcttgctaggctggtggacaccgaggcagctgtggctgacgggggtggatgcactctcagtatccgtcgacgtcgccgactcgccgtggggtcaggattgttcgcggggaaccaaggggccggcgctgagcacgctggcttatggcgcgccgtggctcaccgcctggagagcgagacaggaggcggcggcggcgttgtga

SEQ ID NO: 24517 - DNA, 924 bp, Oryza sativa
  Clone ID: PAT_MRT4530_29493C.1
atggccaacatgcatggcagcatcccaaggattgacttcgccggaataatcgacctagccgcgttgccgccgccggcagcgccgcctccccccggcgccgaccacctacggccacggtgggccgccgtgcgcgccgccgtcatggacgcgctccgcgcgcacggctgcttcgaggcggtcgtggacggcctcatctccccggagctccgcgccgccgtgctcggcccgggcggcgcggcggagtccgtgctgtcgctgccggcgagcgccaaggcgcgcggcaacgaccccggcgagggcaagccgtaccacggctacgtcggcggcatccccggcctgccctacgagagcgtggccatctccgacccgctctcccccaccgccgtccgcgccttcgccgcccgggtgtggccggccgccgccgccgcgttcccggaggaggcggtggtcgcgtacgcggggaggctggcggcggtggaggcggcggtgcggcggatggtgctggagagcgtgggcgcgacggcgtcgtcggcgggggccgtggaggcgcaggcggcggcgacggcgttcaagctccggctgtcggagtacgcggcgcccggcggtggggaagatgcgaggctggggctccccgcgcaccgggacacgagcttcctcgccgtggtgacgcagaacggcgtggacggcgtcgaggtggagtgcggccgcggcgacggcggctgggctcgcccaacgctctcgccgagctccttcctcgtcttctccggcgacacgctcaagcaagacgacttgttaattgaagatcacaagaccttgatgggaggcaattttgaagacgtcatcgacaagcatttgaggactttgaaagagatggaggcacttcaagacggtgtttacagagaacaatctatgggaaatacttga

SEQ ID NO: 24518 - DNA, 157 bp, Oryza sativa
  Clone ID: PAT_MRT4530_29494C.1
atgcagcaccgcgcggcgcggagacgtgctcgctaccgatggataggtggtacgacgtaccagtgtgttactgtgtacatctcgagccacctgcgtcttagttggaactcgtcgtgtacctgcactggacgacagatcactccggccggggcaccca

SEQ ID NO: 24519 - DNA, 326 bp, Oryza sativa
  Clone ID: PAT_MRT4530_29495C.1
atggcggacctcaacgaatccaccaccgacgctgccgccctgaagaagctgtacacggagggggctatccctccgaagcagaccatggcctgggaagcaggagagttcctcctgttgatcctgaacttttacggcctttctctcttgcacctcaaccccaactccttcgccttccttaccatctttgctcacctctgcgaggcctacatcagagtagtgccttttcttgacagtcacctgtcacctagcgcaacaatgcatgcatacatgtctttactagccgtgattgtacctagtgtgttggttgggcttgtgtacatgatcag

SEQ ID NO: 24520 - DNA, 195 bp, Oryza sativa
  Clone ID: PAT_MRT4530_29496C.1
atgggggctgctataaagtttcagacatttttgcaaattgttgtcggctgtggggtggtggcggttggcggcggggtggtggcgcccggcgtcgcggtgctcggcgacggtggggccaggggcagaaatgtccatgaacaggaccccatctccggcgacatccctccccaggcggcaggcggcggtgtgtgctga

SEQ ID NO: 24521 - DNA, 1293 bp, Oryza sativa
  Clone ID: PAT_MRT4530_29497C.1
atggagaagttgtccacctgtagtgcccgcttcctgcctgcctgcccgcctactcggccattaatttgtcccagctcgaacgacacctgtgctcgtttcaatccacaaaaacgtgcccgtgccagaaacggcggcggcggcggcggcgaacacggtggcgcggcggcgccaccggcggtagggtggtgctgcgccggcggcggcgccgaggaggaggaggaggaggtcgtggcgctgtcgtcgtcgtcgtcgtcgtcctcggcgccggggaagaaggtgggggcggcggcgggggggttgccgcggctggtgcggttcgaggagttgccggactatttgaaggacaacgagttcatccgggggcactaccgctgcgagtggtccgtccgcgacgcgctgcgcagcgccttcgcctggcacaacgagaccctcaacgtctggacccatctgggaggcttcttcctgttcctatggctcgccgtcgccggcgggacggagcggccggccgcggcggcggcgggcgtcaacgccgcgccggggatcatgacgttcttggtggcgtcatcagccaacaacgcgtcgtgggagaccaatagcacggattttgataggaatagcttggaggggaaggattcgccggcgttgttgggcggcggcgaacatgcgctggcgaggtggccgcggacggtgttcctggtgggcgccatgacgtgcctggcggtgagcgcgacggcgcacctcctggcgtgccactcgcgcaggttcagccgcctcttctggcagctggactacgccggcatcgccgtcatgatcgtcgcctccttcttcccgccggtgtactacgcgttcctcggccgggccgtggcgcaggtggcgtacctgtcggcgatcaccgcgctgggcgcgctcgtggtggcggcgctgctggcgccggcgaggtcgtcgccgcggctgcgccacatccgcgcggggctgttcgtgtccatggggctctccggcgtcgtgccggcgctgcacgcgctgtggctcaactgggggcacccggagtgctacctggcgctgtcgctggagctggtgatggggctcgtgtacgccgccggcgcggggttctacgtggcgcgcgtgccggagcggtggcggccgggcgcgttcgactgcgtcggccacagccaccagatcttccacgtgctcgtgctcgccggcgcgctcacgcactacgccgccaccgccatcctcatcgactggcgcgaggcggcgatcgccgccggcggcggcgccgcggcatttttgtga

SEQ ID NO: 24522 - DNA, 687 bp, Oryza sativa
  Clone ID: PAT_MRT4530_29498C.1
atgccccttcgtagctgcattctggaattccttgcaaatcaacctgaacatcacctctatgcaggagcttcacaatctgcccagaccaagccggattccgaccaaacacttcgaaatcttctagtacctccgcttctgggggctgttgaatcatcggcagacgtcgtcttcagaaagcagaacccctccggcctccaccgcccggctaatttcaaaatgtctagaagatgcaaacctcaggacggaaagcgagctcctgtcgcgccgccgcctcctcctgcttcccgccgcgggccgccgcccccatccggccgccgccaaccataccccgccgccagcctcgctggccaccgctcgctcctcgtcggtagcaactgtgagaggatgaggaatagaaagagaaggatagaggacaagactgtgatggagatgcttctgctgacggcagcagcgacggcggtagcggtggtggcggcgcagtgtgaccctgagcagctatcggcgtgcgtgagcccgatcttctacgggacggcgccatcagagtcgtgctgctccaacctacgcgcacagcagaaggaggggtgcctctgccagtacgcgaaagacccgacgtacgcgtcctacgtcaacaacaccaacgcacgcaagaccatcgccgcctgcggcatccccattcccagctgctag

SEQ ID NO: 24523 - DNA, 509 bp, Oryza sativa
  Clone ID: PAT_MRT4530_29499C.1
aactaatagaataactagtggcttccttgattaccatatattccattgtgccttgtggctcgttctctttttcgaagtggccatgtaacacatttgatttgggggaagaccacttcacagcgcacgaggtttcatgggagaccaccataaggatgatcattggagatgtgagcaccttaccgcccttgaggcagcgcgccagtcatagacctgaacctgtgttcactgagtactacatcatggagggatgaaatgagctgcgttgtgccgtagccagcgagatgcgcttactacaggacagcactgactcattacactcaatgtatgctaatgactacaagcttgcctacatagagcaatgtcagggactgctttgcatggctctgcctagatgtaccagagacgatccacaacagatagggctcgcttcggcgacaggtggccacagcctgagacgctgaatcatggatgaacatcaatgagatacgacgaccaacaccttgaccagt

SEQ ID NO: 24524 - DNA, 3428 bp, Oryza sativa
  Clone ID: PAT_MRT4530_2949C.1
ctctcctcctcaacctcgacctcgatctaggtctacgctccgccctccgccccccgccccccgccgccgccagggagggagccggagccggagccgatcgatggcgtggctccgcgccgcctcgggcctcgcccgccacgccctccgccgccgcgtgcccgtcgcttcccgtttcttccactcggcgcggccggcctggaggtcctccgccccggtgccccgcgccgtcccgctgtccaggcttaccgacagcttcctcgacggcaccagcagcgtctacctcgaggagctccagcgcgcatgggaggccgacccctcctccgtcgacgaatcctgggacaacttcttccgcaacttcctcggccaggccgcgccctcctccgccggcctctccggccagaccatccaggagagcatgcagctcctcctcctcgtccgtgcctaccaggttaacggccacatgaaggccaagctcgacccgctccgactcgacgaccgcgccgtcccggacgacctcgacctttccctctacggcttcaccgaagctgacctcgaccgcgagttcttcctcggcgtttggaggatggccggtttcctctccgacaaccgccccgtcctcaccctccgcgagatcctcagcaagctcgagcaggcctactgcggccccatcggctacgagtacatgcacatccctgacagggacaagtgcaactggctaagggacaagatcgagaccgccaagctcaaggagtacaacaaggaccgccgcctcgtcatgctggacaggctcatctggagcacccagtttgagaacttcctcgccaccaagtgggccactgccaagcgctttggcctcgagggcggcgagaccctcatccctggcatgaaagagatgtttgacagggctgccgaccttggcgtcgagaacattgtaatcggcatgccacacaggggaaggcttaatgtgcttggcaatgttgtccgcaagcccttgtcgcagattttcagtgagttcaccggtgggactaggcccgtcgaaggcgaggatggcctctacactggaaccggtgatgtcaagtaccatctgggcacctcctatgacaggccaactcgaggtggaaagaggatccacctatcgttggttgcgaatcccagtcacctcgaggctgtcgatcctgttgtcataggcaagacgcgggcaaagcaattttactccaatgatcttgacaggacaaagaacatgggcattctcatccatggagatggcagctttgctgggcagggtgttgtctatgagacacttcatctgagtgcccttccaagctatacaactggaggaaccatccacatcgttgtcaataaccaagttgccttcacaacagatccaagagccggcagatcttcgcagtattgtacggatgttgccaaagccttgaacgctcctatattccatgtaaacggtgatgatctggaggcagttgtacgagtttgtgagcttgcagctgagtggcgccagactttccattctgatgtggtagtcgatctgatctgttaccgacgatttggacataatgaaatcgatgagccctccttcacacagccaaagatgtatcaggttattaagaaccatcctagttcattaaagctttatgaacagaaactgctaggaacaggcgaagtctcaaaagaagacgttcagaagatccacgagaaagtcaacagaatcctgaatgaagagtttgcaaaaagcaaagattatgttcccaataagagggactggctttcggcttactggactggcttcaagtctcctgagcagatttcacgcgtccgcaacactggggttaatccaggggtgctgaaacgtgttggacaggcaattactactttacctgaagacttcaagccccacagggcagtgaagaagatttttgagcagcgtgcagcaatgatcgagagcggtgaaggaattgattgggccgttgctgaagcccttgcctttgcaacactcattgtggaaggcaaccatgttaggctgagtggacaggacgtggaaagaggaacttttagccaccgtcatgcagttctgcatgaccaggaaaacgggaggaaacattgcccacttgaccatgttgtgatgaatcaaaacgaggagctgtttaccgttagcaacagttcactttcagaatttgctgttcttggttttgaaatggggtactccatggagaaccctaattcactagtgctctgggaagctcagtttggtgacttttccaatggtgcacaagtgatgtttgaccagtttttgagtagtggagaggcaaaatggctgcgtcaaactggccttgtcgttctactgcctcatggttatgatggccaaggcccagagcattccagtgcccgtttggagcgctttcttcagatgagtgatgataatccttttgtcatacctgagatggaaccaacactccgcaagcagatccaggagtgtaattggcaagttgtgaacgtgacaacgcctgcaaactatttccatgtgctgcgtcgtcagatacatagggagttccggaagcccctgattgtaatggcccccaagaacctacttcggcacaaggattgcaagtcaaatctctctgagtttgatgatgttgaaggccatccaggtttcgataagcaaggaacacgcttcaagcggttgataaaggaccggaatgaccacaagcaagtcgaggagggtatcaaacgccttgtattgtgttctgggaaggtgtactatgagcttgatgaagaacggaagaagactgaacgcagtgatgttgcaatttgcagagttgaacaactttgtccattcccatatgatcttatccagagagagctaaaaagatatccaaatgcggagattgtctggtgccaagaggaacccatgaatatgggcgcatatagttacatctcccctcgcctgtacgcctctatgaagactcttgggcgtggttcattcgatgacatcaagtatgtgggcagggcgccttcagctgcgacagctactggcttcctgtcggttcatgcgcaggagcagacagagctggtaaagaaagcactgcaggcagagcctatcaagttcccctgatatgatgcatctgtggtttccacttggtgcttatacttgtgcaagacaagtgtgtgcgagctcagctcgtccagcctttgcacacataccataccatcttaaaagttttgctatgtatttacaagctactgtttctctagcttgtttgaggcgattcgatttgaatgtcgtgaataatgcactatttgagccttcttatcgttgaggaggaacctgtttcgacgtgagcaacaaattttgcaatatagtagaagctttagcttcctttctttttacaaaaaaaaaatctctctcctcgtgc

SEQ ID NO: 24525 - DNA, 1857 bp, Oryza sativa
  Clone ID: PAT_MRT4530_294C.1
atggcggcgcacgaccccaaggacgacgtcgaccgcctcttcgcctgcttcaagtgcggcgtctcccctccccagtcggcgttcagggagaggccgcggcgggcgggcaagaggtcgcgggtagcgtccacggcggatggaggcggcggcggcggcggcgggagctcctcctcttctactcctacgccggacgcggcggagaagcatgaggcgccgtcgtcggcggtgatcaaatttactggccgcaagcagatgtccccggttgtgttctacggttccccgcaaggtgtcccggtgaagaagccgctcagcctgttgcggttgttgcgggagatccgaattgatctcaagaagcaaactgatttggtccccagtgccggtgtttgggcaaccttccctaggcaagaggaggcaatcaggttctgtaaagcacatgcttataccaatgtctttagctaccaagatcatttaagtgggcagagaagattcctcgtgtctacatacgatgagttctggaaaaggtacaataatatggatccgcagattcgccatcactatgaagttatacaggatggttcaccttgccatatttactttgatcttgagtttgacccaagattgaacaagatgagagatgcagatgaaatggtggatatattggttgcagccacattcagtgctttgcatgataaatattccattgaaggacaggaggaatggataatagagttagactcgtctactgaagaaaagttctcacgccatttgatcatccgcataccgaagactgcattcaaggacaactcccatgttggtgcatttatctctgagatctgctcacggatcgcatctcagcgtgcagctaatcctaactttgataaactgtacattacgaaagatagcagttgtacaggtcatgctgatcatctctttatggatattgctgtttactcccggaatcgttgttttcgtttagccttctcatcgaagtctgggaagaagtcatttcttgtggctactgagcgtttcaaacataaaaacatgagtgataaggagctctttatggagtcacttatttgcagattagatgatgactgtcataaacttttgacatgcaaacttgatttagattgcaagaaaacattgcattttgactcggaagccagcatgatacgaattcaaggaagaaacagcaaggactccattggtacctatcgaaatgattttcctgtttcaaatacttatgggatatctccttttccagctctggatgtctttattgaatctatagcttcttttggaaatgtctcagtatgtcaaggagtagatactgtgagcatattggaagagaacataaaagcaatcatgagagctgcatattaccaaaagtgttatgaccctgactgccaaggttaccgttctccattgcgccctgttccctgggacgtgattcctgagctcagctcgatatccgattcagcccagagggaatatcagggggaagttgtagagatcaacattgaggggaggaacaggaatgatgagtacctttgcaatgggacgaaatcagttacagagagcggtgaggatgatccgagctggtgggaagaagcggtgaaatttgctgacagcatcgagaacaccgatcatggtcctgacacacgtgaccaagttggtagtctcttctgttgtcttcttcttcttcttcccgctagtatttccaaacgtgctatcacagaaactgccatccatgtatgcgcgcaggacaaggattgtgatgacgcagactggtggatggatgctgaaaggattatggtgcagattgaggaacagatagggtcacagagcaacgcatag

SEQ ID NO: 24526 - DNA, 672 bp, Oryza sativa
  unsure (1)..(672): unsure at all n locations
  Clone ID: PAT_MRT4530_29500C.1
atgagctcggccaggcagtttgggatgggacaggtcccaatcggcttgtacttcactgataagatccaatgcagaggagaaatctcatcaacactgatgatggatcggctgctcaacatcccaggacctcctttgggcagcattgaaaatatagagctagcaaggttcaagagcaggaactttgacagatggtggggtgaatggaagcaacacttgttccaacaatcggcttccatgtacatgacagatctattcccggatgtcatccctcaggtattagctgatatgttctcctttgatatcaaggattatcttgatcaagaggcaaaagatgaaacaacangcaagaccctagcttctctagacgaagatgtcaaaagaactcttgaagatatatctcatcggctagaggcatctttaaacaatttgtgggtgattgtggagtaccccggcaaccccttcgccgccgtcgcaagccgccagagcgccgtcgccaccgtcgagccgagccgcgccgtcctcgcccggccgagccctctaccaccggtggtcgcgtcatcccgcaccatggccggcgatgatgtcaatagttcattacggggtgccagactgagaagcggcgagaagtccgtgggggtcgctggggagtccatgcctctggttattgagggg

SEQ ID NO: 24527 - DNA, 289 bp, Oryza sativa
  Clone ID: PAT_MRT4530_29501C.1
ctcgcgtgcggcgggagggaacccaccgaccttgttgggctcccttcacgtacacgacatgcgaagagcccccctcaagctagggctccccggcggatcctcggcggggtgggtctcgcgccccacttttgccgatttggaggctgggcttgccgcgattgcctcccaccagctgaagaccctcctgacccacaagctgaagcaccaccctgggtcgatcttcttccgtttcattatggagcacatcctcgccgggagcattttttttttttttttcatctatgttaac

SEQ ID NO: 24528 - DNA, 317 bp, Oryza sativa
  Clone ID: PAT_MRT4530_29502C.1
agaccatccacagaaatggctacataatcatcaagaaccgtccctgcaaggctgttgaggcttcaacctataaaactgggaagcacggggacgccaagtgccactttgttgcacatgacatatttactgccaacaagctcgaaaatattgtgccatcttgtaacaactgtgatgaaccacatgtgaaccgaaccgagtgccagctcattgatatatgtgaggatcgaactgagagtccggtaactggaaatggcaacatccaggatgacctaacgctccctactgatgataacctgcttagtcagatccatgatgga

SEQ ID NO: 24529 - DNA, 1455 bp, Oryza sativa
  Clone ID: PAT_MRT4530_29503C.1
atgagctcggccaggcagtttgggatgggacaggtcccaatcggcttgtacttcactgataagatccaatgcagaggagaaatctcatcaacactgatgatggatcggctgctcaacatcccaggacctcctttgggcagcattgaaaatatagagctagcaaggttcaagagcaggaactttgacagatggtggggtgaatggaagcaacacttgttccaacaatcggcttccatgtacatgacagatctattcccggatgtcatccctcagacaacagaatcctgtcctcctcgcaaaagcaatagtggcaaggatatagaatatgctccaggccttatcccaaatggagggcagctgggagaatcggccgatgttggcaaaaagaggaaaactaaggcatcagctattgattcatcaactctagcaccaaagaaaaaggccaaaaagaagaaatccaagcaaaccaatgatttgcctgccatagacccgtccatagaacaagccttggatgaagaggaaatcgaggaagatgttgaccaagcggcaaccgaactgagtgacttaggagaaaaaacaccatcggctttacccaaacagactcctccaactcctgcttctccagcccacttttcaatgaaaaagaaaactactgtgaagaagaaattgacactagcaccatctaaacaggttccatcgctgatgtcaagtgaccgtagtccatcggctatagacagccacaacattgaggaagaagaagaaccagcagctcctgccatcctagtattagctgatatgttctcctttgatatcaaggattatcttgatcaagaggcaaaagatgaaacaacaagcaagaccctagctcctctagacgaagatgtcaaaagaactcttgaagatatatctcatcggctagaggcatctttaaacaattttgtggttgattgtggttccattcgggcaagacttcgagaaattcacgctctgatcccggatgatctttcgaacaccatcactccagctgcatacctcgagcaacatcaattcaagctagaaaaaactaaacaaagattacccgaatggcgagagcggaaggacatcgaagccacaatccaagccaatcggcaactcgtgcatgaagagaagtccaagcttgataaattatctgaaggtccgatccagtccaacatagatcggcttgaggcccgaaagattgatctcatggcacaacttgaagaatgcaatgctaaattggccttggaaacacagaagctagccaatctcccaaaagcaatcgaagagaaaaaatcatgacttaaatcggccatcaaaaatgttgctgatttaaccaagtctgtgaaggttatcccaggaaccgatgcccaagacatccaagaagtagaggaaattagacaatgacctatatcggctatcctgcaatacctctctaaa

SEQ ID NO: 24530 - DNA, 294 bp, Oryza sativa
  unsure (1)..(294): unsure at all n locations
  Clone ID: PAT_MRT4530_29504C.1
agattttattgtttcacttctttgccccgaggaggaaaaagagagcagaaagtttcagaaaaaattgaaggtttgtcgatttggagtgtttcggtctgaatgaaaattngttccaaagcactttggacttttctattgttttgaaatttttttatgctcagacactcctcctgccccagatcattggggtatcatgagatacctcagaacatgggcccagaatgaagtaaactaattcgtaatgaatatatgaaataatggtgacaacattcattacagagaaaaaaaaaaaaa

SEQ ID NO: 24531 - DNA, 201 bp, Oryza sativa
  Clone ID: PAT_MRT4530_29505C.1
tttgtttttttttagtttaggggtttttgcattattttgtttaaccttttttcacatgagttttgccaaagcaaaaaccagcatcctagccaggtaatcctaggcctcgcaaaaaaaaacccgaaacagggctgcatgacccctgagaaaactgccccaagctaccggaaaaaatctaaaatggaaagggggggcgaattg

SEQ ID NO: 24532 - DNA, 270 bp, Oryza sativa
  Clone ID: PAT_MRT4530_29506C.1
atggcggctgctcgccggaggctccgtgtctcgttgcaggtggcagtactactggtgtccctcttgctgctgcccggatgtctcgccggccgtcgtgagcacgccggagtgaatgtagacaaatctcacgggatagtaatcaactgggagaagaagcatccagtacgtcggttatttctaggcttggcaactaataggcatcgtcgaattctgttctaccgaaatccaggttacttctccgccagttataaattatatgtgcctacttaa

SEQ ID NO: 24533 - DNA, 247 bp, Oryza sativa
  Clone ID: PAT_MRT4530_29507C.1
tttcgtgattagtctcacacttctcaccatagtaaatgatgcttaaattggtaataatttgattagctcctggtttggaatggtacattcctggtttggagatagacctgtgcagccgggatggttgttcagaatggatgggcctatataacagggtatgttgtatagcgttggattaatattgcttaattaatacttaactgttttattaaattctcaaatgtttgctaaatgctgcttttgcaaa

SEQ ID NO: 24534 - DNA, 361 bp, Oryza sativa
  unsure (1)..(361): unsure at all n locations
  Clone ID: PAT_MRT4530_29508C.1
cggacgtgngngncagngctggtagaacggntcacctcaccnatnaagcctccncctcctccttcgcctccntntccacctctcctctcctcttcctcttcttcctcctcctggggcctagccgcctaggggggttntggcctgcaactgcaacttcttcctctgccttctgctctctgcctctaagtatatggaatatggtgtgtgcgtnaagagaaattaagtnagggaggggaaagcnagcnaacagggcaacaatggggcaaatggacggcggcgacggcggcgncggcggccacccctaccactaccaggctctcctggccgcggtccaccagcagaccgtcccctttcccaatcc

SEQ ID NO: 24535 - DNA, 498 bp, Oryza sativa
  Clone ID: PAT_MRT4530_29509C.1
atgaagaagtttcaaaatgtgatttttgacaatgtttctgaagttccattcatggataaagagagggatatcccagaaaagtttcactacttcgatgaatcctgggagctctacccagaaattttcaaatctgaaaatatgagaggtgggccgctgatggtgacagctcagtatggggtcgaatggaggcactgcagtggtgacaggctgacaggtgacagccagatagggcgctcggccgccggcagctgcagcaatcccattctcgcgcccacggagacaggcgacgcagatggagtgggcggagggcgcaccaaaggcggagggtaccgtcctctagcatggagagggctccccggggtgacgacggacggcatcgacaacctaaatatgtggagaccagaggccggagcaaaggagagggcccttggtggtagcggccgtggaggggctagccagcggtggttgcggatgcgaactggcgtggagtcggcctag

SEQ ID NO: 24536 - DNA, 654 bp, Oryza sativa
  Clone ID: PAT_MRT4530_2950C.1
caccggtcagcgaccgggagagagagaaagggggtggcggcgcgcgggcccactggtcagcggcacgggggaaaggaggggcggcggcgccacgtggcggccgaaccgacggccccgatctacccaagggtagatcgccccgatctacccaagggtagatcggacggcggcgggacctcgcggccggggcgcgcgggcgcggcgcgagacggcggcgaccatggcgccggcggcgcggcgcccacacggcggcggcgcgcatgcggcagcggcgcaaggcggcgaccgaaggcgaccgaccggcggcggggagcggcggctagaggaggagcggcggctacgcggctaagcggcgcgcacgcggctacacggtacggggaaaaggagaaaggggagggggaagcctcaccgacaacggtcgacgacggcggccgacggaggacgacgacgacggcgggacgagctccggaacctcctaacgaacaaaaggagagggattagagagagaggaaagagcgtgggagggcgagagcgccggccgaaggcggcggccatggcgccgcttgccggcacacgacggggatgggtctccggcggcgtagatctcgaccccgcgaagctaacggcggcgacggcgcgagacggcgacgagcc

SEQ ID NO: 24537 - DNA, 131 bp, Oryza sativa
  unsure (1)..(131): unsure at all n locations
  Clone ID: PAT_MRT4530_29510C.1
atgganncttcacgcaaggtgttctcggccatgcttctcatggcgctnctgcttgcagccactggtgagatnggcnngccggtgatngtngcngannctcngacntgcnagtcgcagagccaccggttcaa

SEQ ID NO: 24538 - DNA, 565 bp, Oryza sativa
  unsure (1)..(565): unsure at all n locations
  Clone ID: PAT_MRT4530_29511C.1
cggacggtcngngacgcgtgggctctcccccgtcgcctgcacctctgatcgtgacgagccattactaccactagctcgattgctcgaatccctcctcccccactcctccgccattcacccgcctagcctcgcgcgcactcgcggtgtatatatctatccggcagctcgatttgtggccttgccggtgaggtttgtgagctgtgggcggcgtagcatgcggcggtgagagatagagagcgagagagagaggattgcagcaggcgtcgtcgcatcagcatcactatcagcacagcgccaagcctcccgtgtcgcggagctcgtcgtggatccggaggtccccgccgccgtcgccgccgcacaagaagctgtggggaggcggcggcggcggcggcggtgggaggagcaggtatgtgtgccgcatcgtgccgctgctcgtgctcaccgtgtacagcatcttcaccgtcgtccgcatccccagctcctccctcgtcgtctccaccgccgattcagagcgcgtggagcggcgggaggatgtggaggcgttcaagacgcacctgccgtcgaa

SEQ ID NO: 24539 - DNA, 1246 bp, Oryza sativa
  Clone ID: PAT_MRT4530_29512C.1
atgcccttggggccaatggcaagtccatctcttctctttctttctctccttcttcgttttgtgccgccggcggatatggtcgagcgcggcgaggtggtcgtcgtcgttgctgacgagggcatcgacctgtcggggatgcggcggaacaagttggcgacgatggtgtgggacagggcgaggccgagcaaaggccatggggcttggttgatggcagcgatgaagaaaacgtctcagcagcggctccgagctccggcgagacgatgccaactcattccattcgatatgaaggcatgcatgtgcatccatgaggttggatggccggacatcgacgatgccgaagcggcggcgctccaggacgacgatggcacgacggtgttcccgttgctacaatggatcaaacgcgatggcgtcaaaagaaagtttgttctgcaagatgaattgagtatggaacgcaaaagggataaggacgaccgtggcttggtgatgaatatgatcatcgtcttcatctcggctggcgatgggattgagaccaaagaggcagcccatgcttgttctctcgatgtggtcggcagtagggtggagagtgagatgggacgacggagttgggagaagaccatagctaccgccgccgccgccactcaatgcgccggcgaggccatggtattttgtcccctgctcgccgcgctcacgaggaagggcaatttcgtctcatcatccggtggaggagaaaaaaatgatttcgaaaatgcacaaaatggcaaaaatggcaaagtggcgattccctcctccatcgaatctctgatatttggagggagcgactcgacgcagcatcgcatccagcaccagctcgacgaggagaaccagagagccgcgctcttccactcctctgccccatcttcctctttgggagctgacggggaggaggagagggagactgtgccgctgctgtcctgcaagatggccgacgataaatctgacactgtccaggtctccgaggatacggcgcaccagattagcattgatccctggtatcaagttggattcattctgacaaccggggtgaatagtgcatatgttctgggatattctgcatcaatcatggtccctttaggctggattggtgggacatgtggcttgattctagctgctgcaatatccatgtatgcaaatgctcttcttgctcaccttcatgaagttggtgccaaacgccatatcagatacagagatcttgctgggcacatatatg

SEQ ID NO: 24540 - DNA, 486 bp, Oryza sativa
  Clone ID: PAT_MRT4530_29513C.1
ggcagagcgagcggcgctgaggataggaacgcggattggagtcgatgcgtcacgagaaggaaggggcagatggggcagattatctgtggcccattcggctggggcaccggctagatgatgagacgaaattacccttcctggtgagcgtggtgagcaggggacaaaacgccatggcctcgccggcatattgagtggcggcagcggcggcagctattgtcttctcccaactcggtcgccccatctcactctccaacctactgctgaccacatcgagagaacaagcatgggctgcctctttggtctcaatcccatcgccggcggagatgaagacgatgatcatattcatcaccaagccacggtcgtccttgtcccttttgcgttccatactcaactcatcttgccgaacaaactttcttttgacgccatcgcgtttgatccattgtagcaacgggaacaccgccgcgccatcgtcgtcctggagcgcgc

SEQ ID NO: 24541 - DNA, 2508 bp, Oryza sativa
  Clone ID: PAT_MRT4530_29515C.1
atgcccttggggccaatggaaggtccatctcttctctttctttctctccttcttcgttttgtgccgccggtggagatggtcgagcgcagcgaggtggtcatcgtcgttgctgacaagggcgtcgacctgtcggggatgcggtggaacaagttggcgacgacggtgttggacagggcgaggccgagcaaaggccatggggcttggttgatggcagcgatcaagaaaacgtctcagtggcggctccgagcttcggcgagacgacgtcaactcattccattcgatgtgaagccatgcatgtgcatccatgaggttggacctcaaggaggagctgatggcgcggtggcttgctccaggatggatgaggaaccggacatcgacgctgccgaagcggcggcacttcagagcgtgctccagcatgacgatggcacggcggtgttcccgttgctacaatggatcaaacgcgatggcgtcaaaagaaagtttgttcggcaagatgagttaagtatggaacgcaaaagggacaaggacgaccgtggcttggtggtgaatatgatcatcgtcttcatctcgtccggcgatgggattgagaccaaagaggcagcccatgcttgttctctcgatgtggtcagcagtagggtggagagtgagatggggcgacggagttgggagaagaccatagctgccgccactgccgccactcaatacgccggcgaggccatggcacaatataacaacatattctgtgccactcatatgggagactggtatgagaaactttcacaatcttttagggatactgcaaatgaagtattggcaaaagcagatattgatccaaatgttaggtgcttcacaagaaggcagatgaagcacatcacaaacaactacggcactgtcctgggaaaaggaggtttttctgtggtgtacaagggaaaacttgataatggccgttcagtggcagtgaaacaatataattggagaacacaggaaaaggagttcacaaaagaagcgatcatacagtcccagtgtagccataggaacattgttaggttattgggttgttgtgtggaggcagatgctccaatgctggtcactgagtttgtccccaatgggaacctttctgaacttctgcatgggaagagtggccagcttcctgtctcattagagacacgcttccagattgcattggatgtagcagaagcacttgtatatatgcattgctcccaaaatcatccaatccttcatggagacatcaaaccatcaaacatacttctaggtgacaagcatgtggcgaagctatgtgactttggaatatctaggcttctctgtatggacaatgatgaacacacgggctttgttataggaagtaaaggatacatggatccagtgtactgtgagactggacgactaagcccaaaatgtgatgtctacagttttggggttgttcttttggagctcatcaccagaaagaaagggattgatgaccagagcagaaatctagcgggaatgtttgctcgctcaagtagagataaaagacatgaactatttgacaaggaaattgcagccgatgagaatatagactttatagaggaaattgcaaatcttgcacttgattgtttaaagtctgaaatagaagatcggccgcaaatgaaagaagttttgaaacagctttggagtatcaaaagcgacatagattccatcataggtgacccagaacaggaatcaacctcagagacattttcaggaaaaagtgatgttgccatgggcaaggtttacatgggacgtttgaaaaacactccattgattgtgataaagatgtctgtggaagttgatgaggattggaaacagacatttttttatgagatgatcatgcaatctagaattaagcattggaatgttgccaagcttttcggctgctgcctagatcatgtcgatgccccagtattagtctatgagtatggtgagatgggcttgcatgacgctctttttggtaaggcgtggcagagtattgaacatcctttcacttcctatgtacgtctacaaattgctactgatgctgcagaaggccttgctcaccttcactcatttgacatggttcatggcgatgtcagaactgccaatgtaatagtggatgttttttctggatctaagctcgaaatgcctagaactagtacatttccggcaaagattgctggttttggaacaacaaagctcctttccttggacaaggctcagtatgcaagatttctaacagagaacatacattacaaggatccacacttcctaataactgggctcatgactaaggaacacgatgtgtatggttttggaggggttcttgtggagctcttcacaggaaacaagattcaaatgcacgacataaatacggtaattaaatattttgatagcgtatttgctatatgccatcatctcgaggaaattaaggaactagcttcgtggtgtgttgcacccgaggttacagaaaggccaaccatggccaagtcaacttag

SEQ ID NO: 24542 - DNA, 303 bp, Oryza sativa
  Clone ID: PAT_MRT4530_29516C.1
gtcaagacttatatccttggcgtcctccgttccatgcaaatcaaggcccatttcctcgtcatgctcctccacatccttgtcctccatttactccagttctgcatccagggcaagaacaccatcaccatcactacggacatcctggaagatcaaatggtccatcaggctctggcaacaaaccaggctaccataaccccagctatggaaatggaccaggaggttgcaggccacaacaccaagctcaaggataacattctgcatgattggttgcacagattatacccattcccaattgcattctga

SEQ ID NO: 24543 - DNA, 567 bp, Oryza sativa
  Clone ID: PAT_MRT4530_29517C.1
atggcatatgctgagctacaagattcaccggtgatgttttgcaacaggactaacaagcacaacgatggtctagaggcggcgctagaggaagttctcaacagtgagtgcaagcacgtaatcaagcttgttctgaccctcgccaaggagaccatagcagttcatgcggcggaggagcgcctcaccctcgaagatacgacgggtgttgttcttctcatccaggaggagaaggaaggggagcttacagttgcggtagaagctcacgtgcgccatggctgccgcggcaaggtgccgtggatcgccgagccgcgcgccgccgccggaggaggagaagaagaaggtgtggaggggagggtgaagtaccactgctacattgttgatcttgtcttcctggaaacactggaaacaggtttactggcaaagtggccgttggtgttgggtaccttggctgaggccgtgttacatggtcagaaatcccgtgttcttgtgacggttcgctgtcttcgctggtcgcagactcagggaagagctgaagttctcttggcgtggcggcatagtgctgctcgatga

SEQ ID NO: 24544 - DNA, 2514 bp, Oryza sativa
  Clone ID: PAT_MRT4530_29518C.1
atgtcgggccaaagtaattcccccgacatgatttttcaggtttatacgccaagaaaaagaaaatttttgaactctgttcactacagtgaatctaatagggccgtttctcatggatctgggttagtcactagtgctaaagatagtcatcaaggtgaagaatcatttctaaatggtccagctgggttgagctctattttgagtaactcacagggttttgctcctcaagatattctgtcaggaaccacagaactgagtggcattagatattcaacagatcagagccagacagctgtggctcataagttacttttcagctgtgaaaagggtgatcagagtattgtagctatggttcacccttctcagagttcccttgaaaaaattcaacagaagcaagggatatcaagctatgaagctaaacatgatgtacaaggttctacaaaagcagatgatagttctagtatattgtctcctcattctttggatgatgaaatcatgtcagttgttggcctgctatctccttctgcttatgaaagcctatgtgatgcggagaaaaaaaatcacgacattacttggccgaaaatcatagaaataaaagggagagtgaaattagatgcgtttgaaaagtttgtccaggaactccgtcgatgtcaaacccgatctttgatggtaatttctctttgttggaagtttgggacatcaaaagctggcttactgggaatgaaagaggttgccgagaactttgaagcgagccagaaggttggttttgcagatgtatgtgatggttccaatctctatgtctgccccagaagtgatgctgtaattacaatcctagcgaaatgtggtttctttaaaggcatgtcagcagctgatacaaaccaagactcattgatagggtgcattgtgtggcgccgaaatccactgtcaaaaattgtggatcatagcaggtctgaaactattggaaagggatctccttgtgtgcctcatgttggagcaaggcatccaacttcgttgccattttcagatggacatcaggcaacatcatgctccaacaatcctggcatggactctagaacaaacacaggcaatattcagaatgatattgatcaaatgcaagaaattcagagcaattctgtgaaaacgcatcctgtggcaactggtttgctatctcagtgtgggcatgctaagagtactggtgaaagagatcctacagaaaaagtagtgccccattctctattcaaacttgcatcaaagctaaccccgcagccaccgttcaaagcaccatcactaataggatgccagttgtcgcaggtttcaccgttcgaattggcatcgcatgaagtcccagaaattcagcaacatgttcagtccatcatagattctcattctggatcttttggagtgtggcatcctacttcacattctcaaggattgtctctgaaatccttgcatgttcagcagagaactacccactatgatttagctgcacaaaagaatcatatggcggaggccttctcaggcagcataactcaagaatatgcatcaaatgctgttgagtcttcaaaacaacaggagactaatccattttttctgcagcctgatacttatggtgctcatagagctaatgatatagatgaccttccaaaagttgacttcgctaatctccatagagttgagttgaaatttgatgtgcatccaatcaacagggaaactacaataacttctgatgtgctgatttgccctaggttatctgataagaagtcaaacagtccattccagcaatcatcgcaaccatcatttcgagttgaaggcatcaagaatcatgaaaaggttgaggtgaaagaaaatgtcacagacatgatttcaagggagataacgaatcaagtatctcatcgcaaggcagaaatagagaacttcaagagcaaagatgacattgatgctgaagacatgccagagtgtcacttccaggggttggataatgagaaactgcatcaaagcggttcaagtaaacatacatcaccatctttgaagaactccacagggtctaaagcaccatcacaagtgtttcctccaattactcagaaatcttatactccacttgaagtagaagacatctcttctggtcatgatccaaatatgccatctggatgtctgaacataccaagagatcaaggctcgtttcctcgcatcctccacctgcacaaggggatcaacggtcaagacttatatccttggcgtcctccgttccatgcaaatcaaggcccatttcctcgtcatgctcctccacatccttgtcctccatttactccaggacacgtgaggccacctagcaattttgctccccctggcccttggcgtcctgttctgcatccagggcaagaacaccatcaccatcactacggacatcctggaagatcaaatggtccatcaggctctggcaacaaaccaggctaccataaccccagctatggaaatggaccaggaggttgcaggccaccacaccaagctcaaggataa

SEQ ID NO: 24545 - DNA, 2983 bp, Oryza sativa
  Clone ID: PAT_MRT4530_29519C.1
atgtcgggccaaagtaattcccccgacatgatttttcaggtttatacgccaagaaaaagaaaatttttgaactctgttcactacagtgaatctaatagggccgtttctcatggatctgggttagtcactagtgctaaagatagtcatcaaggtgaagaatcatttctaaatggtccagctgggttgagctctattttgagtaactcacagggttttgctcctcaagatattctgtcaggaaccacagaactgagtggcattagatgtacaactagttcatgcaaaccaaatgaaaccatactgcacaccatttcaacaaataatggcacatcaaactgtcaggatactactcaatcgttctctctattgatggagtgtacaaatcatacaacaccaagcaaacctatgcatccacatattacttttcaactaatgcacactaaaatagagtctagtaatagttgtgctaagtatgcagattcaacagatcagagccagacagctgtggctcataagttacttttcagctgtgaaaagggtgatcagagtattgtagctatggttcacccttctcagagttcccttgaaaaaattcaacagaagcaagggatatcaagctatgaagctaaacatgatgtacaaggttctacaaaagcagatgatagttctagtatattgtctcctcattctttggatgatgaaatcatgtcagttgttggcctgctatctccttctgcttatgaaagcctatgtgatggtacaatccagttgagtagcactgtcaaggtgtctgtgatcgccttcttcaaaagcggagaaaaaaatcacgacattacttggccgaaaatcatagaaatcaaagggagagtgaaattagatgtgtttgaaaagtttgtccaggaactccgtcgatgtcaaacccgatctttgatggtaatttctctttgttggaagtttgggacatcaaaagctggcttactgggaatgaaagaggttgccgagaactttgaagcgagccagaaggttggttttgcagatgtatgtgatggttccaatctctatgtctgccccagaagtgatgctgtaattacaatcctagcgaaatgtggtttctttaaaggcatgtcagcagctgatacaaaccaagactcgttgatagggtgcattgtgtggcgccgaaatccactgtcaaaaattgtggatcatagcaggtctgaaactattggaaagggatctccttgtgtgcctcatgttggagcaaggcatccaacttcgttgccattttcagatggacatcaggcaacatcatgctccaacaatcctggcatggactctagaacaaacacaggcaatattcagaatgatattgatcaaatgcaagaaattcagagcaattctgtgaaaacgcatcctgtggcaactggtttgctatctcagtgtgggcatgctaagagtactggtgaaagagatcctacagaaaaagtagtgccccattctctattcaaacttgcatcaaagctaaccccgcagccaccgttcaaagcaccatcactaataggatgccagttgtcacaggtttcaccgttcgaattggcatcgcatgaagtcccagaaattcagcaacatgttcagtccatcatagattctcattctggatcttttggagtgtggcatcctacttcacattctcaaggattgtctctgaaatccttgcatgttcagcagagaactacccactatgatttagctgcacaaaagaatcatatggcggaggccttctcaggcagcataactcaagaatatgcatcaaatgctgttgagtcttcaaaacaacaggagactaatccatttttgctgcagcctgatacttatggtgctcatagagctaatgatatagatgaccttccaaaagttgacttcgctaatctccatagagttgagttgaaatttgatgtgcatccaatcaacagggaaactacaataacttctgatgtgctgatttgccctaggttatctgataagaagtcaaacagtccattccagcaatcatcgcaaccatcatttcaagttgaaggcatcaagaatcatgaaaaggttgaggtgaaagaaaatgtcacagacatgatttcaagggagataacgaatcaagtatctcatcgcaaggcagaaatagagaacttcaagagcaaagatgacattgatgctgaagacatgccagagtgtcacttccaggggttggataatgagaaactgcatcaaagcggttcaagtaaacatacatcaccatctttgaagaactccacagggtctaaagcaccatcacaagtgtttcctccaattactcagaaatcttatactccacttgaagtagaagacatctcttctggtcatgatccaaatatgccatctggatgtctgaacataccaagagatcaagtctcgtttcctcggcatcctccacctgcacaaggggatcaacggttagcagctcggcatcctcctgtactagcagatcaaggttatgttcctcggcttcctcctcctgtactagaagatcaaggccttgctcctcggtgtcctcctcctgcattagctggtcaaggcttcgttcctcggcatcctccacctgtactaccaaatcaaggcttctttcctcggcgttgtcctccatttgcaggtcaagacttatatccttggcgtcctccgttccatgcaaatcaaggcccatttcctcgtcatgctcctccacatccttgtcctccatttactccaggacacgtgaggccacctagcaattttgctccccctggcccttggcgtccagttctgcatccagggcaagaacaccatcaccatcactacggacatcctggaagatcaaatggtccatcaggctctggcaacaaaccaggctaccataaccccagctatggaaatggaccaggaggttgcaggccacaacaccaagctcaaggataacatt

SEQ ID NO: 24546 - DNA, 760 bp, Oryza sativa
  Clone ID: PAT_MRT4530_2951C.1
atggacctccaagcggacacggtgaggaagctcgccactgagcggtggaatggtcgtgtactccgaatgtgcattaaaatccccgtccaggaccagccggggtacacaaacgacaatgttgacatacagatccaccgggaacaccactccacaggcatcctcgatggcacggacgaagcctactcctcggggaaaccttcatctgacacatacccgacctctggggttgggaaaaggctgacgtcagcgagggggcgcggctcggcgccgacaggcggggcccaccggtcagcgaccgggagagagaggaagggggtggcggcgcgcgggcccaccggtcagcggcacgggggaaaggaggggcggcggcgccacgtggcggccgaaccgacggccccgatctacccaagggtagatcggatggcggcgtgggacctcgcggcgggggcgcgcgggcgcggcgcgagacggcggcgaccatggcgccggcggcgcggcgctcacacggcggcggcgcgcatgcggcagcggcgcaaggcggcgaccgaaggcgaccgaccggcggcggggagcggcggctagaggaggagcggcggctacgcggctaagcggcgcgcacgcggctacacggtacggggaaaaggagaaagaggagggggaagcctcaccgacaacggtcgacgacggcggccgacggaggacgacgacgacggcgggacgagctccggaacctcctaacgaacaaaaggagagggattag

SEQ ID NO: 24547 - DNA, 249 bp, Oryza sativa
  Clone ID: PAT_MRT4530_29520C.1
atggcgttcggcctgacgtgggagaagcaagagccgtccgatctgatagacggcgtggcacggtgcgacaaccgggatacgacggtcgtggcaaggcgcggcgcgggtgcaggctgcacggcaacgcggatatggaagcgacccgacgaggatgtgggcggtgtggtgcggcatggcgcggtggccggatgcggcacggcgaccgtgatgcagtggtcgcggcttaccgtgcgacgacgacgacggtga

SEQ ID NO: 24548 - DNA, 284 bp, Oryza sativa
  Clone ID: PAT_MRT4530_29521C.1
aacctcacggacaacatataataggaggaaataccacttttatattaaataaaaaaaaatcattttaaacaaaaacaaaagcaaagcactgcctgtaaaattaaaaaactattaagaaacttggaacacacaaaacaaggtgggaaacattatttaatcaaaaataaacaattaaacaaggttatatattaccataaccgtttaattgccaccaaaatttctcaaacctgggggcttttaggccataaaatttataaacttcaccttccttactttttcaaaac

SEQ ID NO: 24549 - DNA, 737 bp, Oryza sativa
  Clone ID: PAT_MRT4530_29522C.1
gtacccctttctacattactgcccaaactacaacacttatttgctggctggaaaatgaaaaaagcattaggccatattgaactagttaacgctgataatacgcgagcgatgttggttctccatataggaaaaataaatgctcaagatcagcacatgttgctcaattttgcaaaagcagaacagctttcgctttatttaatgtgtgatgagaatcacattgaacatctttgcggtgaagcaccttattaccaaattaacgggctaacattacatttttgcattcgtgattttattcaagttaatcagccgttaaatcaaaaaatggttaataaagcgttagaatggctagcaattacagcagaagatcgcattcttgatttattctgtggcataggcaatttcagtctaccgattgcacaacaagcgggtttcgtagttggggtagaaggtgtagaggaaatggtcaagcaagccaaaataaatcagcaaactagcgggttaaacaatatagcattttaccaaactaatttagcagaatcttttgttgatcaacattgggctacacaaccttttaataaagtattactcgatcccgctcgtcaaggtgccttgttttgtttagatcatttaatggcattaacaccagagcgaattatttatatttagtgtaatccaccgactttaatgccggacgctgaaaaactcattaggcatggctataaaatagcaaaatcagc

SEQ ID NO: 24550 - DNA, 298 bp, Oryza sativa
  Clone ID: PAT_MRT4530_29523C.1
gcacgcgccgtagcttgatcctctgagcgggcggccttccttttttttttttttccacatgaaacagacgcgtgactatctcacgataaggtcatcggctctagcactgtcattcgagacaaataaacacggggtttgtcttcgacaatgatctccttggcgaacagtgcggcatgtaaagagagctagctgcattcgacaaaaatgcatgagacgcatcacatccaccccacgctatgtacacctgtaagatgagactcgagacggtttgcttatttcacaccaggaccgagttctc

SEQ ID NO: 24551 - DNA, 263 bp, Oryza sativa
  Clone ID: PAT_MRT4530_29524C.1
caaaaacaggatcaggcctacaattatctattcttttcaccaaatggagcacgcatcattccctaataccatactatcacacatctacccttttcacacatcataccgggctcaattctttctttttacattgaacaacagttgacactcattacagcttttcatttctaataaaactagctgatactgtactccaattcattcctcttaatcggaatccattgggcatcatccatcatccacaggggccagttgatcaaaca

SEQ ID NO: 24552 - DNA, 1023 bp, Oryza sativa
  Clone ID: PAT_MRT4530_29525C.1
atgcaccatgcactgagcttctcttcggctctgcccacagctccaactgaaattcctggcagcggcggcggtttcgtcgacgacaagggcagcatgttctctcttcccaatgttgcgggctcggcgccgcctccctcctactactcttccctcccttccttctacatccacaggagcaccagctcgcactccctccttcaccaccggttgtctgacctcctcaacagtaatgccgcattctcttactcgtctgctccagcttgccaattgcagcccctcccacctgtttcttcctccacttcatcatcctccggcgatctcttggagttcagctccgggaccctgcgccgtgtcttcagcaccggcgacctgcaggcgatgaatgtaccgccatcgccaccgccaccgccgccgttttcaggtgacatctgcatccaggaggtcggcggcccgttttcgcagaaggtgggccgttacagcgccgaggaacgcaaggagaggatcgagaggtaccgcgtcaagcgccaacagaggaacttccacaagaagatcactgtactggcctacaaaaccgcatttccatttcccttgcaagcaattgaccatggcagctactgtagctcatcatcatcatcatcccctggccgtttccagtatgcctgcaggaagacgctggcagatagcaggccaagggtgcagggccgcttcgcgaggaacgccgaaaccgaggccgatgccgaggccgatgcggtggccggcctggacaccgaggtgtacggcaatggctatggatactgcgcctacagcggcctcaccaacagtatcagcagcaattgctacgacaaccagagccagagccagtggtggggaacgccagctggcgcggccaattggcagcaccagcagcagaagcagcagcttggtttcgacgtcgccgtcgacggcgacgacgaggactacgagctgtgctgtgggccagcatcgctgacatgtgctcagggacctgaccctgagctgatctga

SEQ ID NO: 24553 - DNA, 214 bp, Oryza sativa
  unsure (1)..(214): unsure at all n locations
  Clone ID: PAT_MRT4530_29526C.1
cgccctctccgcaccanctccccgcngccgcngctgcgagctgatccaatggcgccgacgtcgaagctgtngcagggcatcaagaaggcgttgcggtcgcacacgtaccaccgccgcgggctgtgggccatcaaggccaagcacggcggcgccttccccaaggccgagaagcccgctgcngcagctgcngnngctgcgcccaagttctaccccg

SEQ ID NO: 24554 - DNA, 432 bp, Oryza sativa
  Clone ID: PAT_MRT4530_29527C.1
cgacgctacaaagccagaagccaagacgccgcagatctcaacatcggagattagcctagccataccctatccggtacctacagaagccagcaagagggatctagcgccatatctgatctcgccgagtacggattcaaggaggaagactaccatgtcatcaattacgagttgagttcatgctgccaagtcgacaacggctagatgagttatcccaaatattgtatttgtgtgatccagatgaataaagagcaacaccggcatcagctaacaggatgtagggttattacctgtaagataagggacccgaacctgtataaaaaaccatgtctccatctcttttacctcgatctcgcatatatcctggtaccaatgatccccataccatcccaaatactctagtcgtgactatcaaacgtcgacagtggcgcgcca

SEQ ID NO: 24555 - DNA, 428 bp, Oryza sativa
  unsure (1)..(428): unsure at all n locations
  Clone ID: PAT_MRT4530_29528C.1
agcnattatnttcggcaaatcnaaatgtggncngaaanacctaccggctcaacaggganccatacaactacattgttcnncnctaccaggatnntgaaaaaagaaaaaagaaaattnggtnaaatttgtggggaanaaaggcgaaccaaatnaatnccnaganaatanttttccnttcctaatacaaatttgctacttgatgcttcnagtcccactgcagcccccnanccnaggnatccnccnnttnganataagtgagaacccnatnaatccccccccctgtnggtttacncttnaatcnngatgcngcaaacccnctcncgatagccaaccccnccggcaaaggtngttagaataacccccnnganattccaagggaaaaaaatntctgccacccngggnacntccctnanctttcnaacatttgc

SEQ ID NO: 24556 - DNA, 438 bp, Oryza sativa
  Clone ID: PAT_MRT4530_29529C.1
atgaggtatttgggctttccaattgataaagaaatacttctgaacaaagattggaagaagcctgaggaaacaattgaaaaaaaaagttggttgctggcaaggaaatcttcagtcaattggagggaggggtgcctattggggttagagagaacggatctttataggaggttcttatggcaggatgatcagggtattaggaagtatcatttggttaattggaatacggtttgttctcccagggagacagggcgtttgggcattttggacttagaaatcatgaacattgctttgctggggaaatggctctggaaccttgaaaattctgaaggtttatggcagcagatgtatcagacaaaagtatttatccaaaaacattttggctgctgcaaaaacaaaatctggggcctcccatttttggcaaggggtgatggaggttag

SEQ ID NO: 24557 - DNA, 4527 bp, Oryza sativa
  Clone ID: PAT_MRT4530_2952C.1
atgatgccgcgctgcaagcctgagtacttgtttggtgttgagggatttgtcaaggagttgcgtacgatgtcctttgccataggatttgggactgcccctttgtatgcccagattcctcgtgatcgtgatgaagagaagtgccgagtcaaagtcaccttgaacagtaatagtgaagatatactatccgtgatgttcgaagctggaggaggaaactacattcatgcatgtcaggaggtggcaaggatcgccataggagagctccgcgatcgctacagtgatcagttggccgacactgagtatcgctaccatcctcgccaaccccagggaagtgaccgtggcagctaccttgagactgaggggattgagaatgatgctaccacaaggcatctggtcgagatgctgtgggctatggataagacccgcgcggagattgtgttagcagctcaagatcgtgaagaccggaatcgtggaaagatttgcaaactagaagacaaggtggatcgtttggagaaggaactagccgcattgaagggagaagcaccaccgcagaaggccagggttcgtcttaccgccaggaagagagctttattcgtccctcgctaccaattggcgccaaaggttcgtgtggtagaaaaagaagctaccccaaccctagcggatcctccgatcgtcaacaacaagttagcagaatttcttcgtgcgaggccgcccactttctctagcaccactaatcctgttgaagctggtgattggctgcatgccatagagaagaagttggatttgcttcagtgcactgatcaggagaagaagacgcatataccatcgggagtggtgtctctcaagaagaaggaattcaggtcgctcacccagggatctcgcacggtcaccgagtatctgcacgagttcaatcgtctggctcgttatgctccggaagatgtgcgcactgatgaagagcgccaggagaggttcttggaaggacttaatgatgagctttcttacccactcatgactggggattatcatgattttcagaagttagtggataaggctattcgccaggaggacaagtacaaccgcatggagcagaagaaatgccggattgctcacttcaaggcacaacaggggaatagtcagaggccgcgtcttactttaggaccacagtccatgccacggggaggttcttcgtctgttgttcgtccgcagcgtcagttcttcaacaacaatgctggcaacaacatccgcaatcaagctccacaccctgttgcagctccaacacagcaacagcctgccaagagggagcaaggcatcaagcccggggtgtgcttcaactgtggtgaaccaggccattactctgacaagtgtccgaagcctcgacgcgtgaaggttgtccctgcccagagcaactctaccgcaccagcatcaaaggctcgtgtcaatcatgttgctgctgcagaagctcaaggtgctccagatgtgattttgggtacgttccttgttaactcagttcctgcaacagtgcttttcgattctggtgctacacattcatttttatctatgagttttgcgggaaatcatgggatggaagtagaagatcttagacgtcctttgatggttagtaccccgagtaatcaagcactctctttgcaacgtagcccctctgtcagaatagaaattcaaggagtaccatttctggccaatcttatcctgttagaatccaaagaccttgatgtcatcctagggatggactggttagccagatataaaggtgtgatagactgtgccaacagaaaagtaactctcaccaacaatgatggtcgagttgtaactgttcatgcattgtcttcggagtctttaaggtcaagtctgaaccaaatagctttggaagagattcgcatagtacaggaatacccggacgtgttcccggacgatttacctggtatgccgcctaaaagagatattgaattcagaatagatctggtaccaggaacaactccgatccataagagaccctatagaatggcagtcaatgaattagcagaagtcaagaggcaagtagatgatttgcttcagaaaggatacatcagaccaagttcgtctctatggggagctccagttatttttgtggaaaagaaagatcatacccagaggatgtgtgtggactatcgtgcactaaatgatgtgactatcaagaataagtacccgctgcccagaattgatgatttgtttgatcagcttaaaggtgccaccgttttctccaagatagatcttcgatcagggtatcaccagttgagaatcaaagaagaagatatacctaagacggcttttaccactaggtatggattgttcgaatgtactgttatgtcttttggacttaccaatgcccccactttcttcatgaacttgatgaataaggtgtttatggaatacctagacaagttcgtggtggtctttattgatgacattcttatctactctcgaacaaaagaagagcatgaagaacatcttcgtcttgcactagagaagctacgagaacatcaattgtatgtcaagtttagcaagtgtgaattttggttgtctgaagtgaagttccttggtcacgtcatctcagccggaggagttactgttgatcctagtaacgtggaatccgtaaccaactggaaacaaccaaagacagtttcagagattcacagtttcctaggtctcgcaggatattatcggaggtttatagagaatttttccaagattgctaagcccataacacgattacttcaaaaggatgtaaagtacaagtggtcagaagaatgtgagcagagttttcaagagttgaagaatcgcttaatatcagctcctattttgattttacctgatccaaagaagggtttccaagtgtattgcgatgcatccaaacttgggttaggttgtgttctgatgcaagatggcaaggtgattgcctatgcatctcgtcagttacgtccacatgagaagaactaccctactcatgatcttgagttagctgcagtggttcatgcattgaagatttggcgtcattatcttttcggtactcgtacagaggattatgacatgggaattcattatcacctgggaaaggttaatgttgtagcagatgcccttagcaggaaaggctattgcaatgctacggaaggacgacagttgccattggagttatgcaaggaatttgaaagattaaatttgggaattgtcagtagagatttcgttgcagccttacaagcaaagcccactctaattgatcaaattagagaagctcaaattaacgacccggatattcaagaaattaagaagaatatgagaagaggaaaagctatcggtttcttggaagatgagcaaggaactcgagtcaaggcagaacatcagaaacccaccgggttgttgcagcctttgaggataccagaatggaagtgggaggaaatcggtatggatttcatcactggtctacccagaacggcatcaggccatgactctatttgggtgatagtcgacagacttaccaaagtagctcatttcatcctagtaaagacaacatattccggaagtcggttggcggaattgtatatggcaaggattgtgtgtttgcatggcgtccctaagaaaatagtgtctgatcgaggtagtcagtttacttcaaagttttggaagaagcttcaggaagagatgggttctaagctgaactttagtactgcttatcatccgcagacagacggacaaaccgaaagggtaaatcagattttggaagacatgttgagagcttgtgctttagacttcggtggaagttgggataagaatttgccttacgccgaattctcgtacaacaacagttatcaagctagtctccaaatggctccttatgaagcactgtatggtcggaagtgccgcactccgcttttgtgggatcaaatgggagaacgtcaggttttcgggacggatatcctgagggaagcagaagaaaaggtgaaaatcattcaagaaagattgcgtgtggcccagtctcgtcataagagttatgccgacaatcgtcgtagagatataagttttgaagaaggagatcatgtgtaccttcgtgtcacgcctcttcgaggagttcatcgtttccacaccaaaggaaaattggcaccgcgtttcgtgggaccttacaagattgtcagtagaagaggagaggtcgcttgtcagttggagttacctcaatctttggcaggagtccataatgtgttctatgtatcgcaattgaaaaagtgtttaagggtacctaccgaagaagctaatcttgaacagatagaagtccaagaggatctgacctatgttgagaaaccaatccgtatcttggaaatagatgagagaagaaccagaaatcgagttatccgtttttgcaaagtccaatggagtaatcactcggaagaagaatcaacttgggaacgagaagatgaattaaagtcagctcatccgcatctgttcgccagttcttccgaatctcgaggacgagattctgtttaa

SEQ ID NO: 24558 - DNA, 561 bp, Oryza sativa
  Clone ID: PAT_MRT4530_29530C.1
atggagagttcgtctcgatctccctgcatttgcaagctgctgccgatgctgatgcttcacgtcgtcctgctcgctcctccgctgctccaagctcggccgctcgcgctcggacatggacatcgtctgctggagtcgtcgccgccggttataatgctgccgaccgacgacggcgaggccgtggccgccgcctcgccgggactggatgtgccgggacagctgggacgatccggcggggcgccgccgccgcctcagtcaaatcggccggtgacgccgctggccggggtcgacggcggcgtgtcgggggggagggcgccgaccaatactccgccgtcgcctcagccgggtgggtcgacgaagccgctctccgacgacgacgggaagccgccgctggggatcgctccgccgtcgccgcagggaaacaagccgcctatcacgtctccacgtctccgaacaagcacggatcccccgctccggccgccggcgccggcggatgatgccgccggtttgctccgcctgatccgcgacgccgtcgaatacgtgatcggcgaactcgaagcctga

SEQ ID NO: 24559 - DNA, 304 bp, Oryza sativa
  Clone ID: PAT_MRT4530_29531C.1
agaggtttcactttcgctagttgctaattgacaagtggctcacagaagtaccacaggatcttcccccccttgtaaccggtcgggtgaccgatgatgtctgaatgtgctgccggccacatgataggacccttctcaaactagcagagccaattggtacttccgctctgcgtgcgtaccaccggtgccccctggccaacgtcggactgcaagcagtcttgtggtgtccatcccagggcaaatgccccgagtgtcccttaccacctctgcacggaagcgcggaaagaagagagccaatgacggatat

SEQ ID NO: 24560 - DNA, 547 bp, Oryza sativa
  Clone ID: PAT_MRT4530_29532C.1
atggtctatggtagatctgaacgccgctgccttatgatgatgaaaacatcatcgcgagaagtagccactaaaaggatgagaagaaagtcggcatccgcccccttcaattgcagcctgccgtattaccttatcggtcccgaaatagatccctccaccaccatccacaacgaacagctagagggtcgcaggaacgaaaggatctacgaatcaggctgccgggttgtggcgacgagtgtactcttcacctcgaaaccccagaacacctttagcgatctgggaagcaagatgaagaaccacaaagaggagcgtttgggggagacgaggcttgccgtcgacgagtcttggtggaaccacgcgacgaggcctcggccggatcgccgatccgcgcgctaatcacggatcggtccgctcgcttctgaaacggctacctgaccgaataatgacaggccccgctgtaccatacaagtacagtacagcatggagtcagtcagaccgccatcctcccttgcgcctagttcggacgattgtaatgaacgaggatatcatt

SEQ ID NO: 24561 - DNA, 2780 bp, Oryza sativa
  Clone ID: PAT_MRT4530_29533C.1
aggtatgcactcactctcgttgttgttggtaagaggacgaagacgacgacgtcgaacacgaagacatcatgatggcatggaggagcttgtcgctggtggcgttcatggcggcggtggcggcggcggccgcggcggcgggcgatgaccggaggccgtacgtggtgcggatggacgtgtcggcgatgccggcgccgttcgcgacgcacgacgggtggtaccggtcggtgctctcgtcggcgtcggcgagggacgcggcggcggcgccggcggcggagcacctgtacacgtactcgcacgccatgaacgggttcagcgcggtgctgacggcgaggcaggtggaggagatccgccgggcggacgggcacgtcgccgtgttcccggagacgtacgcgcggctgcacaccacgcgcacgccggcgttcctcgggctcagcgccggcgccggcgcgtggccggcgtccaggtacggcgccgacgtggtcgtcgggatcgtggacaccggcgtgtggcccgagagcgccagcttcagcgacgccggcgtggcggcgccggtgccggcgaggtggaagggcgcgtgcgaggccggcgcgtcgttccggccgtccatgtgcaaccggaagctcgtcggcgcgaggtcgttcagcaaggggctgaggcagcgcggcctcaacatctccgacgacgactacgactcgccgcgggactactacggccacggctcgcacacgtcgtcgacggcggcgggcgccgccgtccccggggcgagctacttcggctacgccaacggcacggccacgggcgtcgcgcccatggcgagggtggccatgtacaaggccgtgttctccgccgacacgctggagtccgcgtccaccgacgtgctcgccgccatggaccaggccatcgccgacggcgtcgacgtcatgtcgctctcgctgggcttcccggagtccccctacgacaccaacgtcgtcgccatcggcgccttcgccgccgtgcggaggggcatcctcgtgacgtgctccgccggcaacgacggctccgacagctacaccgtcctcaacggcgcgccgtggatcaccaccgtcggcgcgtcgaccatcgacagggcgttcaccgccaccgtgacgctcggcgccggcgccggcggcgcgaggagcatcgtcggcaggtcggtgtacccggggcgcgtgccggccggcgccgccgcgctctactacggccgcggcaaccggaccaaggagcggtgcgagtccggcagcctcagccgcaaggacgtccgcggcaagtacgtcttctgcaacgccggcgagggcggcatccacgagcagatgtaccaggtgcagagcaacggcggccgcggcgtgatcgcggcgagcaacatgaaggagatcatggacccgtcggactacgtcacgccggtggtgctggtcacgccctccgacggcgccgccatccagaggtacgcgacggcggcggcggcgcccagggcgagcgtgcggttcgccgggacggagctcggcgtcaagccggcgcccgccgtcgcctacttctcgtcgcgcgggccgagcccggtgagcccggcgatcctcaagccggacgtggtggcgcccggcgtggacatcctcgcggcgtgggtgcccaacaaggaggtgatggagctcgacggcggggagacgaagctgtacaccaactacatgctcgtctccggcacgtccatggcgtcgccgcacgtcgccggcgtggcggcgctgctccggtcggcgcacccggactggagcccggccgccgtccggtcggccatgatgacgacggcctacgtgaaggacaacgccgacgacgccgacctcgtcagcatgcccggaggctcgccggggacgccgctggactacggcagcggccatgtcagccccaaccaggccaccgaccccggcctcgtctacgacatcaccgccgacgactacgtcgccttcctctgcggcgagctccgctacaccagccgccaggtcgccgccatcgccggacaccgcgccggctgccccgccggcgccggagcagcaagccaccgcgacctcaactatccgtcgttcatggtcatcctcaacaaaaccaactcggccacacggacgttcaccaggacgctgaccaacgtcgccggctcgccggcgaagtacgccgtgtcggtgacggcgccggcggggatggcggtgaaggtgacgccggcgacgctgtccttcgccggcaagggcagcacgcaggggttcagtgtgacggtgcaggtcagccaggtgaagagatcaagagatggtgacaattacattggcaactatgggttcttgagctggaatgaggtcggaggccagcatgttgtcaggagccctatagtgtcagcatttgcccaatgatgcagatccatgtagaagcgctgggttcagaagcagctcaccagatcgcatgggttcctgagctgacccgaaggtagtatttcagaagcacaaatccttgtaaagctacttgaaagagaagtgacataccatatgagaagaaaaaccttcagctgattagctgcatcttcaatactttctgcaatactcagtagtgattaatcaagacatcaagtatactggtacagtggaatataaatctgaaccagaacacactatgaagtatctagccgaattgatcattgctctgagtctgagatagatttctcaatggctctcacataaacagccttcggaagagtcccagtaatgctatgcgttttctctccatccttaaag

SEQ ID NO: 24562 - DNA, 418 bp, Oryza sativa
  Clone ID: PAT_MRT4530_29534C.1
ggagggagaggagggagcgggtcgacggcgccgagtgaggctaacgtaccttacccgcgactaccaccggagggctcgggagccaccgccacccatcctcgacgccatctgcggcgggaggtctctggagctgtcaccgtcgccatcctcgatgccatccgtgcggtagggctcgggagccgccgccgctgtcctcgatccgcgacgggaggtctcgggagctgccgcctctgccgccactgtcctctttgcagtcgcgccggatggaggaaaagatggggagatgaaactgacatatgggatgggaacggagacggcgtgagagaggagacggaaaaagggaggggagtggcatagttccaattttagaaatttccagtggcatatagccaatatgacgaataatattggcattttt

SEQ ID NO: 24563 - DNA, 390 bp, Oryza sativa
  Clone ID: PAT_MRT4530_29535C.1
atggacgatgccggtgacggacggacgccggcgcggctgacacgggcaccggcgcgggcggagaagacgacggagctatggacggaagagacggagtggcacggaacgaaggaaatttgtgctccgatggcgctcccgcgccgcgccctgaccctctgccgttgtgcgccttgctcatcggccgagtcgccgcctgccaatgcaacgcacagctgctgccccgtgtttcctctcctcgggtgtgcgcccccgtcggagccccgcaaccccggtgggggcggggatgggggaaagattgcccccgatgacggggatggggacagggggcgggggatttccaactgcccggggacggggacgggtggtcacaatccgtcgtgccatccctag

SEQ ID NO: 24564 - DNA, 141 bp, Oryza sativa
  Clone ID: PAT_MRT4530_29536C.1
gatgctctcaaattcttgcataagattcagaagcagctactagcatttatctttgaaatggagtaccaatgccattcctcaaaggatcaacgtgtcgcctccatgaagaacacatctacctctgaacccaaggctggatga

SEQ ID NO: 24565 - DNA, 120 bp, Oryza sativa
  Clone ID: PAT_MRT4530_29537C.1
atgggccctgagagttcagaactaccctatgggtccatgaagttctgggctgcccatcgaataacgaacaatgaaaaatttacaaggtctgctccccttgtccaacaactatttgcataa

SEQ ID NO: 24566 - DNA, 825 bp, Oryza sativa
  Clone ID: PAT_MRT4530_29538C.1
atgggcctgctcgcctgccagtcccaggcggtgacagtgcgcgccctgcgcgcccgcatctaccacgccgtcgcgccggcggagctcctcctagcggcgttccgccgcgtgtccgtgctcgccgaggaagctgcggcggcgctcccggcggacccggcggacgccgagtgcgtggcgggttctagtcccaggcggtggtgcgcgcgcatcgaccgcgccatcgcgccggcggagctcctcctagcggcgttccgccgcgtgtccgcgctcaccaaggaagccgcggaggcgctcccggcggaccctgcgtacgctgatggcgcggtggggttcgtcggccacgtggaccagctgtgcgacgccatcgaggaggcggtggcgcgtggggacgaggccgtgaggagggtggaggaggtcgtgggtttcctcggccaaaccaaggccatcggccgcagttgcgtgcggcggctgaccgatgcggtggcggcggcgctgcgcgcggtgtatgaggcggaggcggaggagatgcgcttcgagggccctctcgacgaggcgctgctcgacctccaggacctcttcgaggcggcgaggaggcggtcggagaggcccgccacgatggggaagaagagagcagctggtcacactcgacacccagctgcgttgctcgaccacgccctgcaggagaccaacgctagcatccacgctgcgctcgactgcgctcgaggttaccttgccggcaagctccctctccggcttgactccgggaagatgatgggagaaggaaggaagaagacggaaaagatgggggatggatggaaaatgtga

SEQ ID NO: 24567 - DNA, 871 bp, Oryza sativa
  Clone ID: PAT_MRT4530_29539C.1
atggagatggggattttttctcagaggctcgtcacacttgacagcattgatatatttactactcatgagtggttcccgagtaagccaactgtgtatttcctttgcaatggtgaggacaaggtgtatttgcctgacgtgaaggatgcaaacaatatatacacctttaagggcgaagaatcatggcagcccttaacagaacttccagaaaagaaatgcaagaggtgtggtttgtacgaagaggatacatttaaacatgatttgtatgatgaatgggagctgtgttctagtgatttcaaaaaaggaaaatacacccatttcaaggagggccagttcaatgctactttcctatgcccaaattgcactgcctctgcgggtgattctgcaaaccatgattctagctcagaagtggaaactaaaaagtcatccgttactgtaatcataatagtcagtgttctttcttctgtccttgttatcattgcattatttgggggctacaagtactggctgaagaagaagagggagcgggatcagttacgattcctcaaactcttcgaagagggagacgacattgaagacgaactgggccttggcaatgaactctgaacagcaccatatagttaggttcctgaagctctgtggagagggaggtgacactgaagatgagctgcccctgtcaaggaactctttcccaaacatcacgtacagtctgacctgggaccttttcagatggattctccatgtcatgtataaatggacagctttagcttagaaatttttgttatgtagtgatacaccatagtttctgaatgaatgattgacaaaaaaatgttcttcaattcatagaagttttccccagaaaaaaaaaaaaaaa

SEQ ID NO: 24568 - DNA, 1011 bp, Oryza sativa
  Clone ID: PAT_MRT4530_2953C.1
ctaccccggccaaaccctagctgtcaagccaagcaagaggagagaaagacgaagggaggggagaccacacctgcaccgctgccttcccccaacctcaggtgcacttgtgccgcctcccccgccatccgtgcgaccgccttccccaatcgcgctggtgcaacccacctcgttctctgccgccttccctgaccgtgccggctctaccaccacgagctcgatgacacgtgccttgatggcgccctcggagaaatcccaaagtggcgcaccctcctggcccgctgacgtgttcatctcccggtggccgggggcgaggacgacgtacactgccggcctcgcgatggcagcgtcctcggagaaaccttcatctgacccgaactcgaactctgggggttgggaaaagtagagcaagaccccgtccccagcgggccacgggcagtcccctctcgtgcctaggtgaatccggaagcgacagaggccgtcgcagggcccgccccgctccatcacgcccacccttgccggccgcggcgacggcgacggcgcgcgcgcgaacgcgttgccggcgacggcaaccggcggcgaaggcgacggcgcaaacggcgacgcgaaggcggctgcgctaagcggcggcgagggtggccggcgcggaggaagacgatggcgaacaacgacggcaagccacgggaggacgacgtcggcgggcggacgagcttcggggtgccccgagtgcgagggaacgagggctccggcgacgaacctcgacgaaggaggggtggacggggtggatctcggccacgcgaacccgacggtggcgacggcgcggcgcgcgggcgtggtcgacgtggcccgaaggaggcggagacgtgggcgcggcggcggttgcgggcgcggcggcgcgagcgagagcggcgggaggtgggggaaggacccgacaggtgggccccacctgtcggcgacctcggagaggagggcggcgggacggcctggctgggcctcggcccttctcatgtgcat

SEQ ID NO: 24569 - DNA, 521 bp, Oryza sativa
  Clone ID: PAT_MRT4530_29540C.1
ctaagaacgctcccggacggcacgttcgtggcaaagggcacacgggtgacctaccacgcgtacgccatgggccggatggagtccctctggggccccgactgcgccgtgttcagaccggagcggtggctcagcggcggccggttcgtgccggagagcccgtacaggtacccggtcttccagggcggggtgcgcgtctgcataggcaaggatctcgccatcatggagatgaaggccgtcatcgtcgccgtcgtccttagcttcgacgtggaggcggtcgaccggagctcgcgccggcccaagttcgcgcctggcctcaccgccacgttcgccgggggcgtgccggtcagagtgcgccggcgagcgcactgcgcgccaagttagctcaatcaaatacgtcgcgtcgccactcgcgatcgatgcccttattcattttaattttttttcctcttctttttttgaaacgggaaacattagtctatgtcagcattgcacatggaaagctgcactgatctactgtgtca

SEQ ID NO: 24570 - DNA, 130 bp, Oryza sativa
  Clone ID: PAT_MRT4530_29541C.1
aaataatgtaatgctcctgagatgaatttattaagttcaaaacgttgatttgaactacaggagaaaggaaagaatgatgagcaacatcccgagcctgactatataatacatacgaatacctatcaattac

SEQ ID NO: 24571 - DNA, 435 bp, Oryza sativa
  Clone ID: PAT_MRT4530_29542C.1
atggtgggttgtgagcacatggttttgaaggtcgtgttcatgacaattaaggaccggttcgcgagctaccgttgtgagacattaaccattgagaagtggcgagaagtctgtgggggtcgctggggagtccatgcctctggttatatttatagagggggtgattatgatccaggaatggtgcactgtgaaataccaacacatccccaccaccagatctgccgccgcgccttcccaccatcatgcctcaccactgccagatccgtggctgccgcacgtgaggagtgcagccgccgtcggatccgcgtgggcgacggccagcagatgatggccgccatcagatctgcgccgtcgcacgcctcctctacccttcctcgttgtcccgccgcaatcgccactgtcgccgtcggagtggggagaagtgggggagtggggtag

SEQ ID NO: 24572 - DNA, 266 bp, Oryza sativa
  Clone ID: PAT_MRT4530_29543C.1
ttgatggagagctggagccatgtcaactggaggtacccaattgatggccgaaggcttcaatgcagcacaaatattacttgttgtaaagttaactgtagatatctgttggctcctagttgccatagttggtaacttccagctataaacctagcgcaagatgaactgtactcgatggctatcaggcatccggatttgcaaaaatttcactttaccatggaaaggcaagccttgtttttcctgggttggatgtaaaaaaaaaaaaaaaa

SEQ ID NO: 24573 - DNA, 173 bp, Oryza sativa
  Clone ID: PAT_MRT4530_29544C.1
gtcatagtcttttgtgcgttagccaacgagttcagggcgggacatgatatagttgtcgacctggtcaaccaagacgacctcgacgatggccgacgccgtcgacaatggcgtagtcggcgactacttaaatttcggtggggcggagcgcgagccggagtcgcacgacaggcagg

SEQ ID NO: 24574 - DNA, 454 bp, Oryza sativa
  unsure (1)..(454): unsure at all n locations
  Clone ID: PAT_MRT4530_29545C.1
caaacagtaaactcgcatgtggtttgcgccttccaatgagcgccatatttcagcattacacggatcgatcagtgcctgcactccttacctcgtgtccaagcaaagtcgtctaaatagttttccttcccagcaatcatcgtaaaagcggttaggcatggcgggctatcgatcaggccgcccggccagacgaacaccgttggaacccgcctcagccatgcaaaccacagtggcgttcccctagctaagaatacatttttttccccaatcagaatgatgctaaataagctggtctttttgacaagttttccaaatgcaaaaattgaacggaaatggcggcaggtggcatgcgccgctcgccgttgggcaagcgcgcgacnggcggcggcggntaatgcgccgncgngcgcgcgcgcgagccgttagctagtagaactgcacgccggtggtgaatgtc

SEQ ID NO: 24575 - DNA, 147 bp, Oryza sativa
  Clone ID: PAT_MRT4530_29546C.1
atggcatgggtcgacgggaacggcgacgcaatccacggcaacactctagacaccgagggcgacgatgagcttagcaccaggattgagcttgttccaggcatcgaggatgcctgtggtttatggaggaagctatgcttttggtcgtga

SEQ ID NO: 24576 - DNA, 196 bp, Oryza sativa
  Clone ID: PAT_MRT4530_29547C.1
gggggaccaactgaattattggtcagtcaaacactagagggagacatcgcacccccgtgtagtgtgcagaggaacacaatcagggacgacggaccactaacacgagttgcaaggtaagggggagtggtaatacgcccgattccaccctagtataagccaccctagaggggggtaggggtgacaggaggggtgacag

SEQ ID NO: 24577 - DNA, 248 bp, Oryza sativa
  Clone ID: PAT_MRT4530_29548C.1
aaacagaactacattgacgtactagcgcatgcgaatatatatggattgctgcactatttcatacagcatgtcaacaaccgaagtgattccacaccacatgaacagacagggtttacgacatagactgctgaagtgtatgtatctacaggtcataaggagtcattgatgttacttttcctgggcccttgtttctctccatggctagataggctcaacgttatgaggaatcctggtttgtcatgcccaac

SEQ ID NO: 24578 - DNA, 3698 bp, Oryza sativa
  Clone ID: PAT_MRT4530_29549C.1
atggacgagccttcgccgcgcggaggtgggtgcgccggggagccgccccgcatccggaggttggaggagtcggtggtgaaccgcatcgcggcgggggaggtgatccagcggccgtcgtcggcggtgaaggagctcatcgagaacagcctcgacgctggcgcctccagcgtctccgttgcggtgaaggacggtggcctcaagctcatccaggtctccgatgacggccatggcatcaggtttgaggatttggcaatattgtgcgaaaggcatactacctcaaagttatctgcatacgaggatctgcagaccataaaatcgatggggttcagaggggaggctttggctagtatgacttatgttggccatgttaccgtgacaacgataacagaaggccaattgcacggctacagggtttcttacagagatggtgtaatggagaatgagcctaagccttgcgctgcggtgaaaggaactcaagtcatggttgaaaatctattttacaacatggtagcccgcaagaaaacattgcagaactccaatgatgactaccccaagatcgtagacttcatcagtcggtttgcagtccatcacatcaacgttaccttctcttgcagaaagcatggagccaatagagcagatgttcatagtgcaagtacatcctcaaggttagatgctatcaggagtgtctatggggcttctgtcgttcgtgatctcatagaaataaaggtttcatatgaggatgctgcagattcaatcttcaagatggatggttacatctcaaatgcaaattatgtggcaaagaagattacaatgattcttttcataaatgataggcttgtagactgtactgctttgaaaagagctattgaatttgtgtactctgcaacattgcctcaagcatccaaacctttcatatacatgtccatacatcttccatcagaacacgtggatgttaatatacacccaaccaagaaagaggttagccttttgaatcaagagcgtattattgaaacaataagaaatgctattgaggaaaaactgatgaattctaatacaaccaggatattccaaactcagataaactttatcttcatcatcaaaaatatttacaaatgcatttttcatgatgatgcgaactttgtccccatcaatgctgctccatgtacattgcaggcattaaacttatcagggattgctcaagctaacccacaaaaggataaggtttctgaggccagtatgggttctggaacaaaatctcaaaaaattcctgtgagccaaatggtcagaacagatccacgcaatccatctggaagattgcacacctactggcacgggcaatcttcaaatcttgaaaagaaatttgatcttgtatctgtaagaaatgttgtaagatcaaggagaaaccaaaaagatgctggtgatttgtcaagccgtcatgagctccttgtggaaatagattctagcttccatcctggccttttggacattgtcaagaactgcacatatgttggacttgccgatgaagcctttgctttgatacaacacaatacccgcttataccttgtaaatgtggtaaatattagtaaagaacttatgtaccagcaagctttgtgccgttttgggaacttcaatgctattcagctcagtgaaccagctccacttcaggagttgctggtgatggcactgaaagacgatgaattgatgagtgatgaaaaggatgatgagaaactggagattgcagaagtaaacactgagatactaaaagaaaatgctgagatgattaatgagtacttttctattcacattgatcaagatggcaaattgacaagacttcctgttgtactggaccagtacacccctgatatggaccgtcttccagaatttgtgttggctttaggaaatgatgttacttgggatgacgagaaagagtgcttcagaacagtagcttctgctgtaggaaacttctatgcacttcatcccccaatccttccaaatccatctgggaatggcattcatttatacaagaaaaatagagattcaatggctgatgaacatgctgagaatgatctaatatcagatgaaaatgacgttgatcaagaacttcttgcggaagcagaagcagcatgggcccaacgtgagtggaccattcagcatgtcttgtttccatccatgcgacttttcctcaagcccccgaagtcaatggcaacagatggaacgtttgtgcaggttgcttccttggagaaactctacaagatttttgaaaggtccctacaaaaatccaagcgaaaagcaaatacgcccacgaactttcttgagtcgctgcagacgacccccgaccaaaaccctagcccccaaacccgcccatcggtcgcctccgccgccggagacgatggcgaagccgcgccgcggccgctccgcctcgcgctcctcctcgggatcctcctctcgctcgccgtcccgctccgcctcctcgggctccggctcctcccggtcgcgctcccgctcccgctccttctcgtcgtcgtcgtccccttcacggagccgctccccacccgctgccaaggccagagctgcgaatgcacgctgccgctctcggtctgggggtgttttaggtttggatttttgttctgcgcaatcgatggtgccgtcaagaaagcatctcctgctcctgaatcagttgttctccacattgatcatttgtccaggaatgttaatgaagctcatttgaaagagatattcggaaactttggtgaagtggttaacgtggagctatccatggatcgaatggtcaaccttcctcgtgggtatggatatattgagttcaagaagagaactgatgctgagaaagctcttctttacatggacggcggtcaaattgatgggaatgttgtgaagttgagattcacacttgcaccacggcaaagggcttcttcaccaatgaaggcgcctccccctcccccaaaaagagatgttcctcataatgagaaaggcgctcctagtgctgaaaaggatgtgcagcagcgcagggaactccttcacctaggaggcttcgtggaagcccatcaccacgcagacgctcccctgggcccattagacggcggtcaccaccaccacccccaaggcggccaagaagccctcctggaagaaggctaccacctccacgtcgtcatagccgttctcccccgcctcgtcgtccccctcattcacgttccagatcaatttctcctcgaacgcatcgtagaggaagaagcatctctagcgacagccggagcagcagctcaccttccccgaggcgcaggtagaactcctgacattgcgttcctggcagaagactaccgcacacgcaagcggctgtgttcggaaggtgaggttgggaactcacctcccgcccatgcaaaacttagtggcacattttctaatgattaaggtaaaacttcttttgtttcttgactatcactatcgtttgcctgtgcttgtgtctttctgagagctcaagcggttggtttgagtggatacagagaactctgcttaaaagcttttcagttaatctagattaccagtggagtctagtctgtgatctgtagttgtctactcagactcttgttggcattggttatgtagctcttctagtattatctgttctaacttcgtgactcttgcattacgagcctgaatattctgtggtgacacttgttctt

SEQ ID NO: 24579 - DNA, 168 bp, Oryza sativa
  Clone ID: PAT_MRT4530_2954C.1
cggagatgtcgtagcgcattatgccatatctgcactacgagagggcggtggacacaatccattctcgccgcggatgagaccatacttatcatccgattgatgcacgactagcacgagacgcgcatacacatagaagatgtgctagcatcaacatctgagacaataaag

SEQ ID NO: 24580 - DNA, 483 bp, Oryza sativa
  Clone ID: PAT_MRT4530_29550C.1
caattcagaagtaaagccatctttctttcttcagtttctacagacactatcaaagtacataatacgggtgaaattatacacattttcaaaaacactccatgaatcatgatcttactctgccttcattttctcacttatgagctaacacctttcaaaaatcttgtagagtttctccaaggaagcaacctgcacaaacgttccatctgttgccattgacttcgggggcttgaggaaaagtcgcatggatggaaacaagacatgctgaatggtccactcacgttgggcccatgctgcttctgcttccgcaagaagttcttgatcaacgtcattttcatctgatattagatcattctcagcatgttcatcagccattgaatctctatttttcttgtataaatgaatgccattcccagatggatttggaaggattgggggatgaagtgcatagaagtttcctacagcagaagctactgttctgaagca

SEQ ID NO: 24581 - DNA, 407 bp, Oryza sativa
  Clone ID: PAT_MRT4530_29551C.1
ggaaaaaaacagggggggcattttattagggcttcaaaaacctaaaacagaccccccccaaaggttcacaacccggggggattttattttttttgggcccccccatcccttttcattaggccatcactcgggggccccgttccccgccccatttgaaaagcccagggggggctgggggtgatatctaggagggagggccccgggcccttctcccctattattttaaagggttcgggcctgcccccccgataggggggaagcattagcgaccacacccacgggcgggggccggaatattgggttcttccctgcgagggggccccccagggggtttgcatgggccttaaaagaaaaggatgggcaccccccaggcccgggttttttaaaaaaaccaagggggggggaag

SEQ ID NO: 24582 - DNA, 430 bp, Oryza sativa
  Clone ID: PAT_MRT4530_29552C.1
cggcggcggcaagaagaccgcagcgcggtagatatggcgacggctggggccagcaggtgggaggacgagatcatggagtctgacattgagttggaaggtgaagctgttgagccagataatgaccctcctcagaagatgggagatggagctgttgaagtctcctatgagaagcgtgaccaggcgcagctgtgcaaaaacaaaggcgtcgatgcattttcagaaggtaaattggatgaagctattgagcatctgacagaggctattgtactgaatccgacttcagctatcgcctatgcaactagggctgttatttttgtgaagtcaaagaaaccaaatgcagctattcgtgatgcagatgcagcattaaagattaatccagattctgctaaaggatataaatcacgagggatggcaaaagctatgcttggga

SEQ ID NO: 24583 - DNA, 1692 bp, Oryza sativa
  Clone ID: PAT_MRT4530_29553C.1
agaaagaaatctgaagagctctaaccatgccacaagagtctgagtagacaactacagatcacagactagactccactggtaatctagattaactggaaagcttttaagcagagttctctgtatcccctcaaaccaaccgcttgagctctcagaaagacacaagcacaggcaaacgatagtgatagtcaagaaacaaaagaagttttacctgccaggaacgcaatgtcaggagttctacctgcgcctcggggaaggtgagctgctgctccggctgtcgctagagatgcttcttcctctacgatgccttgggggggtgcggctccttgatacccttcttggtccctttcttggaggactgggtgatcgagaatacgatgaatcagaccttccacgcctcaatggaggtcctcgcctggttcgaggagaaattgatctggaacgtgaatgagggggacgacgaggcgggggagaacggctatgacgacgtggaggtggtagccttcttccaggagggcttcttggccgccttgggggtggtgggggggtgaccgccgtctaatgggcccaggggagcgtctgcgtggtgatgggcttccacgaagcctcctaggtgaaggacgcattggtgatctacgccttctaggtggtggagagggagaacgccttctcactggagatcctggtctccgacgaggaggtgtgtcaccacgcctgacaggcgaagcatctgctcgacgacgaataggtggagaatcaggacgacgcctaggagatggatcaggttgccgcctgggagattcaatccttcggtttgaaggagttcttttgcgtggaggtgaagctggcttccttcgtggggatggttccctgcgctgctgcacatccttttcagcactaggagcgcctttctcattatgaggaacatctctttttgggggagggggaggcgccttcattggtgaagaagccctttgccgtggtgcaagtgtgaatctcaacttcacaacattcccatcaatttgaccgccgtccatgtaaagaagagctttctcagcatcagttctcttcttgaactcaatatatccatacccacgaggaaggttgaccattcgatccatggatagctccacgttaaccacttcaccaaagtttccgaatatctctttcaaatgagcttcattaacattcctggacaaatgatcaatgtggagaacaactgattcaggagcaggagatgctttcctaggaggtgaagcctttttaggtggtggtggtgatggtgaacgccctttctttgatggcgatcctctcttagcaggggatgaaggagatcgacctctccgtgccccaggtgagctggccttggcagcgggtggggagcggctccgtgaaggggacgacgacgacgagaaggagcgggagcgggagcgcgaccgggaggagccggagcccgaggaggcggagcgggacggcgagcgagaggaggatcccgaggaggagcgcgaggcggagcggccgcggcgcggcttcgccatcgtctccggcggcggaggcgaccgatgggcggggacctgcttagaaaaagttggcgaggttgaattttgcgcaaaatttacaaagggcatgtttaattccttggcaaaaattttcaccctgtcacgttttgaatatttagatacatgcatgaagtat

SEQ ID NO: 24584 - DNA, 267 bp, Oryza sativa
  unsure (1)..(267): unsure at all n locations
  Clone ID: PAT_MRT4530_29554C.1
nccnggcgggatcacacgaganggtcgagcactacacaaatcgccttctcagacaactcatctgtcctgaaacaatcgaactatacattttctgacattgctctccttgctattgctgcatgcaccaccactgcgcaggttgatgttttcatctttttcacccagcaatagatggtgcaacctcttctactgctacagcaacaggtgcttagcccatataatgagttcgtaatgcagcagtatatcattgagccaataaccttcttg

SEQ ID NO: 24585 - DNA, 530 bp, Oryza sativa
  Clone ID: PAT_MRT4530_29555C.1
tggacgcgtggggcggcgacgccggcgagcccgcgactgcgaccttcgcctcgacgaccgctcatcgtcgcgcttcaactagccggggaaggcaaggcggagcagcggcggcggcaagaagaccgcagcaaggcggtagatatggcgacggctggggccagcagctttgaggacgagatcatggagtctgacattgagttggaaggtgaagctgttgagccagataatgaccctcctcagaagatgggagatccatctgttgaagtctccgatgagaagcgtgaccaggcgcagctgtgcaaaaacaaaggcgtcgatgcattttcagaagatgcagcattaaagattaatccagattctgctaaaggatataaatcacgagggatggcaaaagctatgcttgggaaatgggaagaggctgctcaggaccttcgcatggcagcaaaattggattatgatgaagagattggagcagaacttaagaggggtgaacccatgtactcaaaatgaggagcacaaggaaaaatatg

SEQ ID NO: 24586 - DNA, 437 bp, Oryza sativa
  Clone ID: PAT_MRT4530_29556C.1
aagagtaattaagtttctaattaatttaaacacgagggaacgatccattaattactaacttaaaattccaaaccggaatacatacaatgtcgtccttatttttaattggaccataatatggacttattcctttcttagagaatatggacttattcttcaatcccatcctcttactgccgagtcttctgtacattcaagagttgtttggtgagagtacgcagtttccaatctttggttgttgtgtgacaatggtagcagcgccgttaaaatcacatgacccactggcacgaccggtagtctgataatagtcgttgaatgcataggttgcatgcgctaccttggtgtcagggtcaaagcattgcgcaccacgctggatagcgctgcaatctgcgcagctaccgcatgcatagtctagcgcattctgcaaacgtgtgtcc

SEQ ID NO: 24587 - DNA, 4359 bp, Oryza sativa
  unsure (1)..(4359): unsure at all n locations
  Clone ID: PAT_MRT4530_29557C.1
cggcccgggcaacgatcatcaaaatatatccagcctccagcaaggcatagagcaacacagaaagtacacagaacagctaaaaagttctcgatgtgtatgtcaacttttatccataagcacttattccacgtcataaaacatacagcatagaagtaagacaagtaacaggactgctcacagtttaggatgatccatgctgagcaactttcctctcaaggccattcttgtcagcaccaacaactttatcgatctcctttccattcctcacaaagaagaatgatggaacactggagacgttccagcgatatgcgacactgtttagttcatcgatgtccaccttaaggaaaacaacattccggtgcttttcagctaagcttttgcaaacaggtccaataaaacgacatggcccacaccatgctgcagtgaaatagagaaccacaagcctagacaggcttgaggctgccttcagctttgtgtccagctcactggatgagtggatagcgatcacatcaccatccttcagagcagcagaagcagcagagacctcctctgcatgtttacgctgtttttccatttcagctttcttaatgtccctctctttacgtaatctttcatattttttcctgtgctcctcaattttgagtacattgggttcaaccttcttaagttctgctccaatctcttcatcataatccaattttgctgccatgcgaaggtcctgagcagcctcttcccatttcccaagcatagcttttgccatccctcgtgatttatatcctttagcagaatctggattaatctttaatgctgcatctgcatcacgaatagctgcatttggtttctttgacttcacaaaaataacagccctagttgcataggcgatagctgaagtcggattcagtacaatagcctctgtcagatgctcaatagcttcatccaatttacctgatatagagaaatgcttattgcacagaattacacaattcattttattatagtgcgagatttcaataagaacaggcaaataaaccttgccttctgaaaatgcatcgacgcctttgtttttgcacagctgcgcctggtcacgcttctcatcggagacttcaacagatggatctcccatcttctgaggagggtcattatctggctcaacagcttcaccttccaactcaatgtcagactccatgatctcgtcctcaaagctgctggccccagccgtcgccatatctaccgccttcgccgccgtcgtcgccgtcctctccggcctcggcggcttccacggcgcctgactctgcatgatgacgtggccattgcaccagagcagctcgacgagcccgtcgtcttcgtgcaaggagaagcacaacaactctgtcttgtttctacttgcaaagccaatgatcatatcagattgggagatcgaggcgtcatctggcttgggcgcgaggcagcaaggcgcattgcccgagaggagggaggccgccactccggcgcccacgcgccggcccccaaggtcgccgcgccggtgaccgcgcccgaggtcggcttccgcgccggcgccagtgcccaaggccgcctccaccccggctcccacgcgctgttccccaaggccgccgccactccggcgcccacgcaccagcccccaaggccgccgctgctccgcccgccccctccccccacccacgacctcgactcccgggggctctccgccgccgctttgcccacccgccgccgctccggccgccgtcgccactacttcctcggacgacctcgactcccgcgggctctccgctgccgcctcgccggcttcgcgcgctgccgctcgggccaccgtcgccccgccgacttcgcgcgccaccgctccggccttgtcttgcagacgtacccccgcggtaagcgcggtaaatgcaaccctggtaagaagtacccaatcattgttgtcattggcactccccattgtgtcgctgctctctagcgggctcttggccaatgggtatggcgccacggtcgtcactctttcctttcgcttctccaagaatcgggcaagggatgccttccgcgcttgagggacagctctcggcataatagctgcagcagtggtagtggctagtgtctcaggctgggccggaggaggcaaacttgtgggaggaacaaccaatggaccagaagattttgtcacgttggagtcgacattagagcttgaggcactccgtggaagacttgtagcttgtgacacaacggagataggtttggaaatggctggcacgggagacgaaacaagctgcggtttctgaagcatcatcggttttgtaggcgaaacctcaggtacagtgacttttgctgggggaaagacatgtgcctctggcatacgagcaacggtagtcggcgcacttggaagagatcctctgctagctaagaacatgagttcctgagccttctccggcgagacgttgttgaatacatttacagaaccagcataaaagatggtcaattgcgccgccttcgccttcggcatgtcccttgttccgtacacaccgaccgtagatccggcaaccgcattgcccatggcgaaaggcggctgcttgaacgcgccaccaccggcgccgacggcattcgggaggttgggcgagctctgaaccctgaacatcggattgttcgggttgaacggcgacgaggccggaatcactctagccccattcagaacatgcggtggctggccacggtgagcgccgtgcacggcggcggcggcggcgtactgcgggatgccgtggctctcggcaccaaacgatttctgtcttgcgaggacgtgcgaggcctgctgcatcttggcgccgtctaacgccgagaagtgtgggaacgcgagctccctcgtctcctccctcgccgccgccgccgccgccgacgacgacgacctgaacgacatcaacgcggccctgctcgcgaacgaccaatccatcgccgccgctgccgctcctcctcctgctccaaagtaatctgattccttcctctcctccgcatgcctccgctgctcctcgtccttcccgatcgcgcccaggaagtccctctccatatgcatcgacgcatttgtttttgcacagatgtgtttggtcaagttatttgcaacgatcatcaaaatatatccagcctccagcaaggcatagagcaacgacagaaagtacacagaacagctaaaaagttctcgatgtgtatgtcaacttttatccataagcacttattccacgtcataaaacatacagcatagaagtaagacaagtaacaggactgctcacagtttagggggttccacccggtgcaacctgcctctcgcggcctttcctggcgcacccacatctttatcatggccacgcccctcctcacaaacatcaacgatgggatcctccatcccctgccgcggtccccgacctggctcaacaccttcatcttccccctcagggcaacaatccgccggggcctcctcgatgcgccttggccaacccgtcccatcagatgccgcgctccgcacctcgtctgcccgccgccagagccccaccggcccctccccggctcgggcgaccgccaccttggtcgcccgctgactggaagggcgcagtccgtgcatcttttcttttttcaattctgagtacccaaaagcgatcttattaacttaatctcagacgttcttagtttcagcagtatgataacctggagtgaacactgaactgaccttggttcttacatcagggctgcacgcgcactgaatctagaaaagcctctggagtagtactaattaattaactaacgatatatagccaatgactactggtgcaaaccttatacattataggagtgtgtaattaattaactctgtgtgtgtgtgatgagttctatagctagcatttctcgtcggcgtcggcgacggcggtgtgctgctgctgctgctcccgcgaggtggcggcggcggtggcggcccacttggcgcagacgaggtaggcggcgaggttgaggacgctgaggacggcgaggagccagtagaagtagtcgaggcggctgcggtcgatggtgtcgccgagccaggtggtggcgcccttgacgagcgacacgagcacgctgctgaagaagaagccgagcgagagcgtcgtcaggaagagccccgtgctcatcgtcttcatccccttgggcgacctcgtgatgaagaaagtccagtggccccgtgtagatggagggttcgcaggtgcccaaccaagcaggaactggggcggtaagtaagacaccatgagaatggccgtggagttccggcggtggcggcaaccatatatagcaggnggtttttttgaagtgntggggtcttcttagagtcgtcga

SEQ ID NO: 24588 - DNA, 1824 bp, Oryza sativa
  Clone ID: PAT_MRT4530_29558C.1
ccgcccgtccctctctaccctgcggtccgcccccgcgcgaccgcctcggcccgcaggccccgagcccgtatggcgctcgctctcgctcacctcatccttgccgccgcattgccgctgctcttcctctcacgtgcagatgggggcgaggtgggcgtgtgctacgggagggatgggaataatctgatagatccaccgtccgtggttagccttctcaaggcaaagggtatcaccatggtgaggatctacgacgccgacccgaccgtgctaaacgcgctggccaaccaaaacatcaaggtgatggtggcgatgtccaatagagatctagtagctggctccgccaaggatttcaatagtgcgctcagttgggtgaaaaactacgtgttgccgtactaccgttcctcacaaattaacggcgtggccgtggggaacgaggtgtttcagcaagcacctgacctgacctcacagctggtatcggccatgaggaatgtgcaggcggcgctggcgaggctgggcctcgccgacgcaataaaggtatcaacacccattagttttgattcagtcaaggtgtcattcccgccatccgcaggtgtgttccaagataacatcgcccagtcggtgatgagtcccatgatcgacttcttgcaacaaaccaactcctatctcatggttaatttctacccatatattgcctgggctaattctaatggccaaatctctcgtgattatgctgtatttggccccaacgcctctcctgtggtcgatcaagcaagtggcatcacataccatagcctctttgatgctcagctagatgctgtttacttcgctatagaccatgtttcaggtggtagtgtgagagtctcaatggcccaagcaagacgggggcgcccgtctccaaggatacccgtgaaatgttcagaatgtgggcatccctctggtggtcggctccctcagttgtccacactagatgatgttcaagtagacgtggctacaaaagccaacgcccaagcttttaacaatggtcttatcagtcgtgcactattcggagccaccggtatgcctgatgtctccgtatacatctttgctcttttcaacgagaatttgaagggcggagcatctgtagaacaaaactttggcttattctacccagacgggacggaggtttaccaagttgactttcacaatggtggtggtggtaatgtttgccctacaaaagcaagttggtgtgtggcaaattcagcagttgggagcacccggctgcaagcagcgttggattgggcttgcagtaatggtgcagattgtggtgctatccaaccaggcaagacatgctttgcaccaaacaccttggtcgcacacgcatcttacgcgtttaatgactactaccaacgtaagagccaagctagcggtacatgtgacttctctggtgctgcttttattgtctacaagccttcaccaagtatctgcgacccgaacccaagctggtgcattgcgaaaccggaggttggggacacacgtttgcagaatgcgctagactatgcatgcggtagctgcgcagattgcagcgctatccagcgtggtgcgcaatgctttgaccctgacaccaaggtagcgcatgcaacctatgcattcaacgactattatcagactaccggtcgtgccagtgggtcatgtgattttaacggcgctgctaccattgtcacacaacaaccaataaatggttttcaccggtgctcatttaatcatattttgcagagattggaaactgcgtactctcaccaaacaactcttgaatgtacagaagactcggcagtaagaggatgggattga

SEQ ID NO: 24589 - DNA, 1680 bp, Oryza sativa
  Clone ID: PAT_MRT4530_29559C.1
gcgaatggtacccggccggcctctgatcccttccctccctgcaacagaacatggctcttccaacaccaagattggtagttcctatagatgtgagcaagaagccatgggagcaaaaagtccctctccataaccgctggcatccagatatccctcctgttgcagatgtaactgaaggggaattgttccgtgttgagatggtcgattggactggaggaagagtcagtgatgataactccgcagatgacatcaaattcctggatctcacaattactcattatcttagtgggcccttaagaatagttgatgctgaaggggttccagctgcacctggtgatcttcttgctgtagagatctgcaaccttggtccacttcccggtgacgaatggggatatactgccatatttgaaagggagaatggtggtggattcttaaccgaccacttccctagtgcaagaaaggcgatttggtattttgaaggaatttatgcatactcccctcaaataccaggtgtccgatttccaggattaactcatcctggtatagtggggactgcaccatctgctgagcttctcaatatatggaatgagagggaaaaaatattggctgagacaaatcatgagtcaatcaaaatctgtgaagttctacatcagaggcctcttgccaacttaccaacccctgagaactgtttacttggaaagattcaagaagggactgctgattggcagaaaatcgcaaatgaagcagcaagaactattcctggaagggagaatggagggaattgtgacatcaagaatctaagtagaggttccaaggtttatctcccggtatttgttgatggagcaaatctgagtactggtgacatgcatttttcccagggtgacggcgaagtctcattctgtggagcaatagaaatgagtggatttcttgagctcaagtgtgagatcataagaggtgggatgaaggaatacttgactccaataggtccaacaccacttcatgtgaatcctatctttgatataggtccagtggaaccacgtttctcagactggttagtctttgagggcatcagtgtagacgagtctgggaagcagcattttcttgatgcatcagttgcctacaagcgtgctgtcctcaatgccattgagtacctttccagatttgggtactccaaggagcaggtataccttttgctatcatgctgcccatgtgagggtaggatatctggaatagtagactcccctaatgcagtggcaactcttgccatccctacagcaatatttgaccaggatgtaaaaccaaaacgcctgagtgggaaacaaggaccaaagttgagaaggcttccagatgttttgagatgctcgtccgatggacaccttcctgttacacaggacccaagcggtacaaaggcaccttaactactgcaaaatgcgtggtcatattcacaatccactatatgattagtaattataaatctaaataatcatatttattattccaacatctatctagtgtaatccataatgtgggtcacatgttgtattttctgtattgtacgtgccgtattttctgtattgctaccaagcaccaactcgtgttatctgagttgtgcaagcaactaaatttccttattgtcccaaaaaaaaaaaaaaaaaaaaaaaaaaaaaaaaaaaaaaaaaaaaa

SEQ ID NO: 24590 - DNA, 2844 bp, Oryza sativa
  Clone ID: PAT_MRT4530_2955C.1
ttgagacagatagcgctggatagccgacaaagcccgttgcctgatttgatctatttcttcgatggcttggatgtcttgggcgttggttccagggatgatcttgagagatttagtcgtgtcagccacattcttgatagccgatctcagtctggacttctgttcttcaacggcacttggaagattggctagcttttgtttttcatgatccagttcagcgttgcattcctcaagttgagctattagattaattttgcgagcttcaagccaatctatattcaactgaatcggcccaacagagagttgatctaacttggctttctcttcatgcatgagctgccgattggattgaatagtgacttcgatattcatccgctctcgccgatcgtctatatgttgcttagccttttccagctcaaattggtgttgctcaaggaatactgctagagtaatggtgtttgccaaatcgtcttcaagtgttttcttgatatgtcatccaagggggctagagccttgcttgtggtttcttcttctacctcatcaaagtagtccttgatgtcaaaagagaatagatcggctaaaacttggatagcaggggcagctggttgttcttcttcttcaacataatggctccctgtagccgatggagtttggttacttggtgattgttgtacaggggaagaaggaggagcaggaggtggtggagccggtttgagagttgttgttgccgatttcttcttcacggcaattctttttttcctagagaagtgagctggagcagagggagtcagaggaatttgtttaggtgaagccgatggagttctttctgtatcacttacctcagctgcagcttcatcaacatcctctttgatctctcgttcatccaaagcttgctcaatggatggatctagggcagacagatcatcagttgacttggtcttctttgacttggttttcttctttggagccagagtcgatgtgtctacaaatgatgctctggtttttctctttttgccagcatcggctagttctctaatgagcccttggagaagagttgaagtcttgggggcatgatagccgatgacagggggagatggtccacctccatttggaattagacttggggcatatttgatatctttgccgctattgctttggtgtggaggggaagattctgttgtctcaggtataacatcaagaaagagatctgtcatatacattgaggccggttggtggaacagatgcagcttccattcaccccatcatctgtcaaagtttctgctcctaaatcttgccagctctatattttcaatgctgcccagaggaggtccttggagattgagcagctgatccatcatcaaggttgatgaaatttcctctcggcattggattttatcagcaaagaacaagccgattggtagttgacccatcccaagttgtctggcagagctcatcgggtgataaaattcataagaaacctgaatattcctcccttgatgtatgccgataggaagaatgcatgggctaattgcagctgagaagacttctctagatttttgaaatttttcatggttgatatcttcaaatctgaagtctgatgggaggtcaagatgcattgaatcttcataaggaaaccaaactcgagcatcgttttgaaagtcctcataaaaactacagaaccaatctttgagcaattcagccaataattttgctccagcatcggctggtgtggatgcatattctccatatgacatgcatctacgatgggtgcgctcttcttcatcatcttctacaatcggctctagcctagggaatacagcttctgtcatagatagccgattgacgactttcatgaccatcaggttgagccaagattttagcagctaccatggtccacctgctccaaccgctgagccgacatctatcttggccgatgcattgttcagcatttggtataagtagccgaggaggatcttgcctaaaggaaattctctttttgattccagagcctcggctgcaaactgccagttggttgcaggaccacaactggatccacagaaaaggaacttttctagtcacatgagcaagaaggccacatgttctcgaggagtaatggatccctggcccatatatgccgccacataactagaccaaccacctatactcttggtcctgaagtcgtactgattcttggtgttcagattcatgggattagctgacgaggacacgtccagaccagtaatcatggtgatatctattagggttggtgtcatcggcccttgattgaacaaaaaggcattgatggtattagacagaagtatgtggcagcggccattaagtgttcatctttggctgaattcgctgtggtgagggcaagtgcttcgccgattccaatctcgtcccaatgagtttgcttgctagccaatacacgcttgtaccatgtaatctagcttttctcgggtgaagttttttcaagagatggccaagacttgaaggtgctcttccaatgacctagattagggttggccaatttgaaagggattctattggtttcgccaatgatgaaatcagtagggtcgagattgccgatcagaccaaggaaataatgtctctcatgcgatagacttggaattgcaactagattggaaatgtgctcagcgtattcggctgatggcgcggtagacgggctggtggaggtcgacatcgccgcgggcggaaatttggccggagaagagatcacctagaaatcgctttgtgcaccgaggggatcaccggagagagataggacggagtttgcttcggcggtgaaaacagaggaaacggtgtgagatttctcggggacaacgg

SEQ ID NO: 24591 - DNA, 190 bp, Oryza sativa
  unsure (1)..(190): unsure at all n locations
  Clone ID: PAT_MRT4530_29560C.1
gcagaaatagcgatatntctgtgtattgactagtaggcaaatgtttgggccttnttttgagtacatatttaagttttttatttgttgtagaagttcgncaggtgaaggatgccacactcttatctnttcttatttattgcatattaatgcagattaaatttggtattgttncctgaaaaaaaaaaaaaaa

SEQ ID NO: 24592 - DNA, 303 bp, Oryza sativa
  Clone ID: PAT_MRT4530_29561C.1
atggatgcggctacacggattgtgccgacggaggagatcatgcatccaacatctgggcacgggatagcagatggcaagccgtcctccaatgataggttttacgccccgcctcacctccggcgcctcctgcggcagcagcagcagatgcaggggcagccgccgtcttctccatcgccggcaacgcacaaggaagcggaggatggacgggtggaggccggtgtctccccgtcgaagccgtcggtgtcggcgccgccggcggaggtggttactgctccggtgatgtcggcacaccgagagatatga

SEQ ID NO: 24593 - DNA, 513 bp, Oryza sativa
  unsure (1)..(513): unsure at all n locations
  Clone ID: PAT_MRT4530_29562C.1
ggatccnatttgggtgatgagaatctgagatatccaccactccactttatgggantgaccgctgggcttctctcccgcctggtgaggtggggacacacgcgtgtttccttgcgtgatgcagccaccctcaaccccccctgatgagtntttgtggcaaagccacgggagcccctggaatttattttctcgaacccctctcttcttcttctgccgcctaaagccaatggaagtaagaactaagaagaaaagccaaatggttcataggaaaaagaaagggagtactgtatgctgtgtatgaagtgctgagtgactagtccaacttttttttaaagagtaccagtatagaacccataagagtacggtttgagttttttttttttttttttgcgggggagtacggtttgagtctatataaggttattccaaatttctccaatttaactttgagagtgaactttagaataaagttatgaacggcttgaatctcgatcccaaaaaaaaaaaaaaaaaaaa

SEQ ID NO: 24594 - DNA, 184 bp, Oryza sativa
  Clone ID: PAT_MRT4530_29563C.1
gtatcgcggtactcactacttagaaaaccattttgcaaagcacgcggattgccatttcgcatgcggttggcctggaccgatgcgcgagaaggtctgcaaagatcatgatcttcgcatgcgaaaatgagaaatcacgaaagaaataaaaatccaaaaaaaaacccctagccctaggcgcccgagc

SEQ ID NO: 24595 - DNA, 579 bp, Oryza sativa
  Clone ID: PAT_MRT4530_29564C.1
ggaattcggcacgaggattacctttttcctactgtggtcattatcatttcttatacccagacatttttaggaggttcaaattagcgggctgcgggcatttctgttatatttaaacctacaatttatataaatatcagcaaaattactttctatcatgacagcctaaaagatgattacttcaatgcaagctgtgtagagaattctgaacaatgttttagccaattagttcataggtgaatctgtctgtggtcctagaaactttctactcgcgctgtatggaacacatgaagttcgtgagacacatcaaacagttcactcatcacatatttattggaaataacttagttatactcaggctgcataagtagtttcaaaaatgctgagaatggcttggctcttgtctctaggataatgtagtgatggagttttcttgtactggtgttattatacacaaactatctgcacccctatcaatattgaaatactcataaggtgaaacatctacctttatataaagtataaatgtaaaccaaccactgtaaattcgatgtgaagcgtttacttagtttataatgaatt

SEQ ID NO: 24596 - DNA, 445 bp, Oryza sativa
  Clone ID: PAT_MRT4530_29565C.1
ggaagcagcagtcctccacactgccacaggagtaggcgtcgacggcggtggcgttggcggcggggaggaggagtcactgccaggggtggcggcgtcggtggcaggtgggcggaaggagaaaaggcggggggatcctgggcagcaggggcggcggcggcgctacgcgccggcggcggggcctcacgccttccatcggctcgagcggcggcggcgggtgttggggaggagctcgtcgggagggcgcggcgggccaggcgcgggggaggggctcgccgggatgccgcagccggccggacgcgggagaggagctcatcgggaggccacggccggccagccgccggggagctcatcgggtggttgcggcccaccgagcgcagaggaggagctcgctgggatgagaagggcgccactgccaccgggcacgctgctcaagagcctcgcctag

SEQ ID NO: 24597 - DNA, 408 bp, Oryza sativa
  Clone ID: PAT_MRT4530_29566C.1
ttttcacctccccggagccgccgcgccgccgccggagcgagccagtgagcgatggccgggacgggcggaagaaccggcgagccggaggccaccggagtggaggcagcctccgccccagagcgctccgaatccagccgatgcatgccgttcgaggactgcgtcgccggcatcaagtggtctctcaaaaagttcctcattcgcgccgtgaacgaatccagatccgacggtgcggttcctgatggagcggatggataaggccggctgcccgatgccgtcggggatgatcacggcgaggaactgcgggactgccgattagaatggttcctacggttcccggatcgggataacggattgctgtgaagaaatacgatataaagatgagataactgaactattaattcacgaatt

SEQ ID NO: 24598 - DNA, 1180 bp, Oryza sativa
  unsure (1)..(1180): unsure at all n locations
  Clone ID: PAT_MRT4530_29567C.1
atggggacatgtggtcaacctaacaaattggtcctccacactgccacaggagtaggcgtcgacggcggtggcgttggcggcggggaggaggagtcactgccaggggtggcggcgtcggtggcaggtgggcggaaggagaaaaggcggggggatcctgggcagcaggggcggcggcggcgctacgcgccggcggcgggggttagggttgggaatcgcgagggggcccctccgtcctggggaaaaannnnnnnnnnggccccgcgcngccggggcggggcggcggcccgggccggcgccgggcccggccccgcggcgcgcgcgggnccggcgcccgcgccgggngcggggcgcccccgcccccggcccgcggcgccnggcgcccncccgcgccgcgcgccgcggcgccccggccgggcgccgcgccgcgcccgcgcccgggggcccgccgccgccccggccgggccggccgcgccggcgcgcgggcggccggcgcggccccggcccgcccgcccgcccccccgcccgccnccgccgcgccgcggcgcccgcgcgcccgcccgccccggggcggcgggngggccngccgggccnccggnggccgccgcnccnncgccccgcgcgcccgcccgcggggcggcgnggcgccgcgccccccctccctcgtcgcgcctcccccacatcgccgcgccggcgcccatcgccgcgcctcccctccctagtccggagaaggagcgcgtcgattcaatgaaaaatccggcgcacggcggcgagggagcgagggggaggcgcacggcggcgagggggcgagagagcgctaggacgccgaggaggagatgcggcgctgatgcctcacgccttccatcggctcgagcggcggcggcgggtgttggggaggagctcgtcgggagggcgcggcgggccaggcgcgggggaggggctcgccgggatgccgcagccggccggacgcgggagaggagctcatcgggaggccacggccggccagccgccggggagctcatcgggtggttgcggcccaccgagcgcagaggaggagctcgctgggatgagaagggcgccactgccaccgggcacgctgctcaagagcctcgcctacctccgcgcgtgcggctacgagaaagagatagaagggacatgggaagaagaagataagaaaaaatag

SEQ ID NO: 24599 - DNA, 234 bp, Oryza sativa
  Clone ID: PAT_MRT4530_29568C.1
atgtcggataaatatgtaaacataggcatatcattaacatcgacctcgtcgttcatggaggctatgcccaccttcaccaacgctcggcgacagcgcgaggcggaggcggaggagctccgaaatggcgacgcgacggcggtggcagaggggggtggaggcggcggtggtggcgcgatggtgacggggatgacgatggcgatggcgcttggcggcggtggcggcgtgagagggtga

SEQ ID NO: 24600 - DNA, 2049 bp, Oryza sativa
  Clone ID: PAT_MRT4530_29569C.1
atggctggcggcgacagggagagggatgtcgaggaggagacgaggaaccagatgatgcagaacctcttcggcgaccagtcggaggacgaagaggatgacgacgaggccgtcgaggtcgtcgacgaggacgaccacccgcatccgcagcagcagcagctgcttcgccaccaggtggtggacgacgacgacgacgaagacgacgtccgtagcgaaggccatgcccgctccggctaccactcggaagaagtggaaggtgaggctgataatggaggggaaggtgaagcggaaggagaaggtgaaagtgaggggcaagttgggatggaagaagaaagcgaagctgaagctcatcaagctgatcttgatcaaggagaaagtgatggggaaaaggtccagagctccccagaaagagaatttagtgaccgggtgatgcaaaatgatgcagcaggcatggatagtgaagacggaggctatcagcagtggccagtagctagcggaagaagaggagttgttgcctctgaatctgaagggtctgaagatgactattatgctggccgaggtcatgaagatgaggaacctcatcaaacaaggaaaacaccaagctcgccagttgaggaggagagagatcatgaagttgtccgtgatgtatttggtgaaagcgatgaagatggacctgctccatatcgtgatcaacatgaaattgatgaagattcccatagttaccatatgatgcttaactatgtaacaaatttactaatgcagagatcacctatggaagatgaaggtcactatgagaaggatttgcagcctgaggatgtagtagctgatgaagatatgagatatgaatcagatgaaaatcgtgaattgaaaccaaaagagaaaccagttggtccaccgttgaacctggtggttccacttaagcagccgccagctcaaccggacagaatgaatgtgatcaaggtatcaaacattatggggattgacccgaagccttttgatcctaaaacatatgtggaggaggatgtatttgttacagatgaatctgggactaaaaaaaggatacgactggaggacaatattgtgcggtggagaaccgttaagaatgctaatggcactacatcttgtgaaagtaatgcgcgcattgtaaaatggaaagatggaacgatgcagctgctgattggtaatgaagttcttgatatatctgtacatgaagcacatcatgatcagtcccatctgtttctgaggaatgggaagggagtccttcaatcacaaggaaggctcttacggaaaatgagattcatgccatcttccttgtcttcgaaatcacatcgtttattaactgctcttgttgattctcagaataagaaaactgttaagatgcaaaaatggatcgaatctaaggatcctgagaaagtgaagcaggaaaaagaaagggccttgggccaaaatattcgagcccattcaattcttcaacgcaaaaaagaaaaggttagccgcaagtacacacagcctgccaggcaaagaaggcagctttctcctggatttttggaagatgcattagatgaggacgaggaacctgaccatcaatatggttctcgccgaatgccagcacgtagtcgttttgaggatgaactggaggctgaagccctagctgagaggcgcatagttagtgcaaagaagtcaagtatgggcagaaacattcctcgcaaaccatcatttcctgctcgtccgcctagacgacaggcaaatgaatattctgagagtgaaagggaggagtcagagtatgaaactgaaggagaggatattgagcactcaccaacccaggggagggaagatgagcttgatgaagaagatgaatatgaggaagatgtggaagaagaagcagccatgtcagatgaagaaattgaggaaccaaaacggaggagagaatctgggggtggcagtgccagccaaaggcgcaaggagatcgactcggacgatgattctccaccaagaaaacagcaggcagttcatcgtcggaaggcggtcgtttttgacagtgatgacgaatga

SEQ ID NO: 24601 - DNA, 645 bp, Oryza sativa
  Clone ID: PAT_MRT4530_2956C.1
atgacggacagagcaacaccgctctgtccgcctccatcaatgctcgaccattcaaaaatttcacagaaatttacccaagcattcaaaaatccacagaaatttacatcaacaatttacagtaaaaaatttccattcacccaagcattcaagcaacacagaaataaacaaaaatttgaagtcgtcgtcgcggcgctgcccccgtcgacgtcggcggcggcgggggatccggtcacttcagtcgtcgcggcggtggatccggcctcccccgttgttgggacggtcggatccggccggtcccgagcccgcggcggtggtggcgacgacagctggcggcggtggaggagggagtgggagaaggagagcccgctgctggacccgtcgcccgcgccgtcgtcgtcaccgagacacaccgccgagcccgccggatccgtcgcccaggccatcatcatcgccgagcccgctggatgcgtcgcccaccaccggatccaaccccaccctgtcgcccgcggcccgagactccccgcgccgctggatccaccgccgcgacacaagcttcgccgcagccgagccctgccggatgcgtcgcccaccgccggatccaacccctccccgtcgcccgcggcccaagactccctgcgccgctag

SEQ ID NO: 24602 - DNA, 2559 bp, Oryza sativa
  Clone ID: PAT_MRT4530_29570C.1
acaagatcatctgtatttttttttagaaaataatactactagcatcaaaacattacgcactggtgatggtttaccagatcatctgtatttttttttagaaaataatactactatatcatctatattagtgtaggaaaactggtagcacagctaacatttgatttcaagacagcatcccgaatacattaacaattgacaacatttttttttgttatttctaaacaacaatcctcaagcaaatattggtgtttgcaacctttttcttctcatcattcgtcatcactgtcaaaaacgactgccttccgacgatgaactgcctgttgttttcttggaggagaatcatcatccgagtcgatctccttgcgcctttggctggcactggcacccccagattctctcctccgttttggttcctcgatttcttcatctgacatagctgcttcttcttccacatcttcctcatattcatcctcttcatcaagctcatcttccctcccctgggttggtgagtgctcaatatcctctccttcagtttcatactctgactcctccctttcactctcagaatattcattttcctgtcgtctaggcggacgagcaggaaaggatggtttgcgaggaatgtttctgcccatacttgacttctttgcactaactatgcgcctctcagctagtgcttcagcctccagttcatccccaaaacgactacgtgctggcattcggcgagaaccatattgatggtcaggttcctcatccaaaaggacaagttgcaaatcattacagcacattttacaactacaaaaacagctattgaacatgtgcatctcatctaatgcatcttccaaaaatccgggagaaagctgccttctttgcctggcgggctgtgtgtacttgcggctaaccttttctcttttgcgttgaagaattgaatgggctcgaatattttggcccaaggccctttctttttcctgcttcactctctctggatccttagattcgatccatttttgcatcttaaccgttttcttattctgagaatcaacaagagcagttaataaacgatgtgatttcgaagacaaggaagatggcatgaatctcattttccgtaagagccttccttgtgattgaaggactcccttcccattcctcagaaacagatgggactgatcatgatgtgcttcatgaacagatatatcaagaacttcattgccaatcagcagctgcatggtcccatctttccattttacaatgcgcgcattactttcacaagatgtagtgccattagcattcttaacggttctccaccgcacaatattgtcctccagtcgtatcctttttttggtcccagattcatctgtaacaaatacatcctcctccacatatgttttaggatcaaaaggctttgggtcaatccccataatatttgataccttgatcacattcattctctcgggttgagctggtggctgcttaagtggaaccaccaggttcagcggtggaccaactggtttctcttttggtttcagttcacgattttcatctgattcatatctcatatcttcatcagccactacatcgtcgggctgcaaatccttctcatagtgaccttcatcttccatgggtgatctctgcattaataaatttgttacatagttaagcatcaaatggtaactatgggaatcttcatcaatttcttgttgatcacgatatggagcaggttcatcttcatcgctttcaccaaatacatcacggacaacttcctgatctctctcctcctcaactggcgagcttgatgctttccttgtttgacgaggttcctcatcttcatgagctcgaccagcataatagtcatcttcagacccctcagattcagaggcaacaactcctcttcttctgctagctactggccgctgttgataggcttcatcttcactatccatgcctgctgcatcattttgcatcacccggtcactaagttctcctggggagctctggaccttttccccatcactttctccttgatcaagatcagcacgatgagcttcagcttcactttcttcttccatcccaacttgcccctcactttcaccttctccttccgcttcaccttcccctccattatcagcctcaccttccacttcttccgagtggtagccggagcgggcgtgggcgtcgtcgtcgtcgtcgtcatccaccacctggtggcgaagctgctgctgctgctgatgcggatgcgggtggtcgtcctcgtcgacgaaatcgacggcctcgtcgtcgtcctcctcctcctcctccgactggtcgccgaagagattctgcatcatctggttcctcgtctcctcctcgacatccctctccctgtcgccgcccgccatcgccgctggttgagcgagctcggagcaccgaacggcgacggaccggaccggaccggcgcgtggagaggagcggcggcgcggcctgtctcagcgtcggcggcgagaagacggccgcggcgcggtggcgcaaggggagccgccgggaaccctagcctcccagcagttcgtgagactaaaatcggat

SEQ ID NO: 24603 - DNA, 160 bp, Oryza sativa
  Clone ID: PAT_MRT4530_29571C.1
ctgcaggaattcggcacgaggcagaagagcctgaagggagatcaatgcgggatatctggttctgaatatctgacaacaacaaggcctgcggcaacagggcaatgttattcagaagagcctagcatctgtcactgacggacggttgacgacggcttactac

SEQ ID NO: 24604 - DNA, 300 bp, Oryza sativa
  Clone ID: PAT_MRT4530_29572C.1
atggcaaggcgctcggaagacggatccggcgacagggaggagcacgggcgaagctcgtggcggtcgaccgcaaggggagcagcgacaaagctcgtggtacggcggcaaggggagctacggcgacttgggccacgggcggcggatctggtggcccggaagtcgtgggcggtaggcgacggggaggggacggatccggcggtgggcggtgaaggagagggcggtcgcggtggaagaggtggatttggcagcggggagcggcgtggtgggcagagccgtggcagagaggggcacgtgcggtga

SEQ ID NO: 24605 - DNA, 369 bp, Oryza sativa
  Clone ID: PAT_MRT4530_29573C.1
aaaaaaaaaaaaaaaaaacaaaaaaaaaaaaaaaaaaaaaaaaaaaaaaaaaaaaaataaaaaaaaaaataaaaaaaaaaaaaaaaaaaaaaaattaaaaaaaaaaaaaaggggcggccaattttaaaggaacccaagctaacaaacacaatgcttgcgggcgtctttagcttttttatagttgtcaccttaagtgaatttcactgggcccgtcgttttaaaacgtgggcccctggaaaaaaccctggggtcccccatttaaatcgcttggcaggagatacccctttcgcccgctggcttaattccgttgaggcccaacccgttttcccttcccagctttttcccaccctggttggcaattgggccccc

SEQ ID NO: 24606 - DNA, 1809 bp, Oryza sativa
  Clone ID: PAT_MRT4530_29574C.1
atggtgggcactgcatccagcgcgatggaagcagcggccgcccgcgtcgagtccacggcggcagcggtgaccgaggagacggcggcggcgatggcgatgagggttgcccctagcttcttccatggcgcggacagctcgctgtgcaggaagcactttattctgaaagtggagaacctgaaggtggtgaacagccagcaaatccagatttcagtggaggattgcaccgacgtgaagatgtctcgcctgtcgatcacagcaccagaaactgccccaaacaccgatggcatccacatcacacgcagcagagatgttcaggtgacagactgcacgatcaagaccggggatgactgcatgtcgatcgaggacggaaccaagaacctgcatgtcaagaacatggtgtgtggaccgggacacggcatcagcatcggcagcttgggggatcataattctgaagctcatgtcaacaatgtcaccgtggacaatgtcaggctgtatggcacaacgaatggagctcgcatcaagacatggcagggaggaaagggttcagcgaagaacatcgtgttccaaaacatggtcatggacaatgtctggaaccccatcatcatcgaccaaaactactgtgactcttctacaccctgcaagcaacagaaatctgcagtggaggtgagcaatttgctgttcaagaacatcaggggcacaagtgcatcagaggaggccatcgtgctgcattgcagcaacagtgtgccttgccatggcataaccttggagaatgtcaatctcactgtcaagggaggtagcagtaatgccaagagcacctgccagaatgcagaatggaagaaatctgtcataaaactatcaaatagatccaccgagaagttctccgatgctttgcaactaggaggaacaaaagttggagctgacaagtttgttcatgccaaggtcaacatgaatgcatcctctttgactaatggagatgatagtctgagaggaaagtcgtctctcgagtcgaagaaggctgtgttcgatgcattgtcaaaggcatgggctgcggcttgctcctctttgcaaccttctattgttcttgttccaaagggcaagagatacctcaccaagcacattacactatctggcccatgcaaatccagcatcacgttcatgatagagggtactttggtggctcctccaaagaggtcagattggagcaaggaaactattaggcactggattatgttcaatggtgtaattggtcttactgtcgctggcggctgcacaatcaagaccggggacgattgcatgtcgatcgaggatggaactgagaacctccatgtcaagaacatggtgtgcggaccaggacacggcatcagcatcgggagcctaggcgatcacaactctgaagctcatgtcaacaatgtcaccatcggcactgtcaggctatatggcacaaccaacggagctcgcatcaagacatggcagggtggtcgggggtacgcgaagtacattgttttccagaacatgatcatggaaaatgtttggaaccccgtcattatcgatcaaaactactgtgactctgcaacaccatgcaagaaacagacatctgcagttcagattagcaatgtggtcttcaagaacatcaggggcacaagtgcttccaaggaggctatcaagctggactgcagcagaaatgtaccttgccaaggcataaccttgaatgatgtcaagctcactgtcaagggaggtggtgactggctggatccaaggaagatgaccgagaccgcctccgacctcatgcagcagctgcagtatcgctga

SEQ ID NO: 24607 - DNA, 1182 bp, Oryza sativa
  Clone ID: PAT_MRT4530_29575C.1
atggcctccactgtgctcattgtctctgcatctctccttgcactcttcttcttcttgcatagtgctgatgcagatgttggcagtaatgtgttcagcatacagagctacggggctcatggagacggacgacatgatgacaccaaagcattgggagatacatgggctgcagcttgctcctctgcaaaacctgcagttttgctcatccccaagggcaagaaatacctgatcaagcacacaacactgtctggtccatgcaaatcaagcatctcattgatggtgaagggtagtttggtggcttctccagagaggtcagactggagcaaggagaccataaggcactggattctgatcagtggtgtcactggtcttactgtcactggtggtgggaccatagatggaaatggcaagatttggtggcaaaattcatgcaaaaccaactcaaagcttccatgcacagaagctccaacggcactgacattctactcctgcaagaatctgaaggtagagtatctgaaggtggtgaacagccagcaaatccagatttcagtggaggattgcaccgatgtgatggtgtctcgcctgtcgatcacagcaccagaaacagccccaaacactgatggaatccatatcacacgcagcagagatgttgaggtgacagactgcatgatcaagaccggggatgactgcatgtcaatcgaggacggaaccgagaacctgcatgtcaagaacatggtgtgtggaccgggacacggcatcagcatcggtagcttgggtgatcataattctgaagctcatgtcaacaatgtcaccgtcgacaatgtcaggttgtatggcacagccaacggagctcgcatcaagacatggcagggaggaaagggttcagcgaagaacatcgtgttccagaacatggtcatggacaatgtctggaaccccatcatcatcgaccaaaactactgcgactcttctacaccctgcaagcaacagaaatctgcagtggaggtgagcaatgtgctgttcaagaacatcaggggcacaagtgcatcagaggaggccatcatgctgcattgcagcagcagtgtaccttgccatggcataaccttggagaatgtcaatctcactgtcaagggaggaattgatctgaaacatgaacatccttggaccttggaagatgtagagaagtag

SEQ ID NO: 24608 - DNA, 1359 bp, Oryza sativa
  Clone ID: PAT_MRT4530_29576C.1
atggcttgcaatgtgctcattttctctgcatatgtcgtcgtcatgtcgttcttcttgtgtagtgttcatgccaaggtcaacatgaatgcatcattccatttaactagtggagatgatagtctcagaggcaggtctcttgagtcaaagaaggtggtgttcgatgtgcgcaaacatggcgcttacggagatggacaacatgatgacacgaaggcattggcaaaggcatgggctgcagcttgctcctcttcgcaaccttccattgttctcatcccaaagggcaagagatacctcaccaagcacattacactatctggtccatgcaaatcaagcatcacgttcatgatagagggtacgttggtggctcctccaaagaggtcagattggagcaaggaaactattaggcactggattatgttcaatggtgtgagtggccttactgtcgctggtggtgggactgtcgatgaaaacggcaagatttggtggcaaaattcctgcaaaacgaatgcaaaacttccatgcactgaagctccaacggccttgacattctactcctgttcaaatctgaaagtggagaacttgaagctactaaacagccaacaaatccacatgtcagttgaggattgcactgatgttaggatctctagcctgacaatcacagcaccaggcactagcccaaacaccgacggcatccatatcacaagaagtaaaaatgtacaagtgacaggctgcataatcaagaccggggatgactgcatgtcgattgaggatggaactgagaacttacatgtcaagaacatggtgtgtggaccgggacacggcatcagcatcgggagcttaggcgatcacaactctgaagctcatgtcaacaatgtcaccgtcgacaccgtcaggctatatggcacaaccaacggagctcgcatcaagacatggcagggcggttggggctacgcgaagaacatcgtgttccagaacatgatcatggaaaatgtttggaacccaatcattatcgaccagaactactgtgattctgctacaccctgcaaggaacagacatctgcggtgcaagttagcaatgtggtcttcaagaacatcaggggcacaagtgcttccaaggaggctatcaaactggactgtagcagaaatgtaccttgtcaaggaataaccttgaaggacgtcaagctcactatcaagggaggtgcgcagcacggcgcggggcagagggcagggacgagcgcggacccgacgaggccgagcatgccgagctgggaaaaaacgccagcggcggcgatggtccagagacggccggcgaaggaatctaccgtgcaccagcggcaggtgcagctgctgcatcaggattga

SEQ ID NO: 24609 - DNA, 480 bp, Oryza sativa
  Clone ID: PAT_MRT4530_29577C.1
atggcggagaggggaggaggagggggacgatggaaagtggaggagagggagtcgacggagaggtcagaagcaccactgcaagataaacaaaagtctgaagaagagattggcttgggaatggtccttcgaaaacgagcctctaggaaggtcgcgacatcaagaacgttcccgtcgcccactccggacctcacccgcacatcatcggagcaaaagacccatgagctctactgctgccaacccacaccactgccccgtgccatcccaccgtctccacgtcaccaccatctcacgccagtcgtcgttgccgccaccctcccttgctggcatgtgcccgccgtcgtcgcctcgccggatccgagcagtggcggtctggatctaggtggcacagagccaccaccacttgagacgccctggtgtcccactcacgccagccagcgtcttcgggtttctgatcgacggccgctggaggctggacgctag

SEQ ID NO: 24610 - DNA, 210 bp, Oryza sativa
  Clone ID: PAT_MRT4530_29578C.1
gaaaccttcactgttactgtatcactggcaggtcagaagaatctgcaggaggtaccgacaaaatttcggtggccaataggaaaccccgacgcaaactttctaccttctgtacacctgtacaactgtttcgagatccaattaggccttattcggttacaaaaggattcaatccgggccgggaatgacaagtatagtataaatttattgtag

SEQ ID NO: 24611 - DNA, 171 bp, Oryza sativa
  Clone ID: PAT_MRT4530_29579C.1
atgccgcccggctatcttcccggtggtgtttatcctgtcatggtctcgggtcatgacaacttggtatcaaaggcactcaccatagcttccgatgccgaacaagttctccatgaaaagttggtgaatgaggaggagaggcgcaccagggaggcggggctgcccttccggtga

SEQ ID NO: 24612 - DNA, 554 bp, Oryza sativa
  Clone ID: PAT_MRT4530_2957C.1
ttatttatttttccaaaggaaaagagggttgctgacgtcatcaaaggggaggggcggcgccggcaagcgggccccaccggtcagcgggacaagggcgccggtccaccgtggaccgggaccaccaaggcggtccaccgccggtccacgggaaccgatggcccggatcggcccaaaccgatcgagcggccaggggcggcgcggctggggcacagcacggcacaaagccagctggccaaacgacggcgcgcggcggcgcggccacccgcggcgacggccggcgacagcgcggggaggagaggagggatgctcaccaagggcggcgacggcgagactacaacgaggaagccggcggcgggctcctcggggaggcaacggtggtccggtggcgtaccacgggcgcgaggcggcggacggtgaccgggacgaccggggcgcggagagggcgatttcagtggttcccggaggcgagaagcggtggccggggtgcggctcggagttgccgatccgagggaggaaacggcgcagtccggcgtcgaccggggaggcgaggcgac

SEQ ID NO: 24613 - DNA, 1872 bp, Oryza sativa
  Clone ID: PAT_MRT4530_29580C.1
atggacaaccacgagctcgcctccacctcctcccccaagcgcaagcccggccgccgccctggccggaagccgaagccgccgcccgccccctcacccgccgccgcccccgcccccgccgccgaaaacgggacccacgaccccgcctctggccagaagcgcaagcgcggccgcaagccgaagcctccggccgccgccgccgccgccgcttcctccgacgggcaccaccacccctcctctcccctcgccgcggctgtctccgcctccgactcgcccgatcccgcttcctcccccgcccctcgtggccgcggccgcaagtctcggcggggccgtcccgagcccccctccgatgccggcgccgcaccccacgcgcccccgtccccgccgcggcgcggcgcgaagaagggggcggcggccaacgccaagaaggcggcggcggaggtccccgtggtggagccgttgcggtgggagcaggtggcgaaggtgatgccgtcgatggacgccgtggtgaaggtgttctgcgtgcacacggagcccaacttctcgctgccgtggcagcgcaagcggcaatatagctccagcagcagcgggttcatcattggtgggcacagggtgcttaccaacgctcactccgtcgagcactacacccaggtcaagcttaagaagaggggatcggataccaaataccttgccaccgttctcgctattggcaccgagtgtgacattgcaatgttaactgtagaggatgatgaattctggaaaggggtttcacccctagagtttggatctttgcctgcacttcaagatgctgtgactgttgttggttacccaattggaggagacacgatctcagtcacaagtggtgttgtatctagaatagagatactttcatatgttcatggttcaacggagcttctaggattgcagatagatgcagctataaattcaggaaactctgggggccctgcttttaatgataagggcaagtgtgtgggcatagcttttcaatctcttaaacacgaagatgtagaaaacataggctacgtcatacccaccccagtgattaatcacttcattcaagactacgaaaaatctggggagtacacaggttttcctatacttggaatagaatggcagaaaatggaaaatcctgatctccgaaaggcaatgggaatgaaatctgaccaaaagggtgttcgtgtcagaagggttgagccaaccgctcctgaatctggatgcctgcaaccttctgatataattctaagctttgatggcattgacattgccaatgacggtacagttcctttcagacatggggagcgtattggcttcagctacctcatttcgcagaagtacactggcgagaaggcccatgtcaaaattctgcggaattcgaaagttcttgaatttaacattaagctggcaactcacaaaagactcattccagctcatataaagggcaggccaccatcatattacattgttgcaggcttcgtttttatggttgtttctgttccatatctccgatctgagtatggaaaagactatgagtatgatgcccctgtcaagttgttggacaagcacttacatgcaatggctcaatcacctgacgagcagcttgtggtggtgtcacaggttcttgtagcagatatcaacattggttatgaagaaattgtcaatattcaggttctttctttcaatggcaaaccagtaaaaaatttaaagcacttggcaaccatggtggaagattgtaacgaggaatacttaaaatttgatatggactacgatcaggtcgtttgtgcgattcatatccctttcgttccagtagcattgatccaaattgtactagtgttgacaggtgctatctctgtttga

SEQ ID NO: 24614 - DNA, 504 bp, Oryza sativa
  Clone ID: PAT_MRT4530_29581C.1
gcacgaggtggtagtagcagtagtagccagggcaggaatatctatcgatcgatgagcagcagcggcggcgatgggggtgggtacgattactcggaggattgggtggtgaattcgcgagggatgcggctcttcacctgcgcgtggattcccaaggagagcagtagaggcgtggtttgcctgtgccatgggtacgcggtggagtgcagcgtgacgatgcgcggcacggcggagcggctggccagggcgggctacgccgtccacggcatcgactacgagggccacggccactccgacggcctccagggctacgtccccgacctcgacgccctcgtccgcgactgcgactccttcttctccaccgccaccgcctccttcccccgccgcagattcctcctcggcgagtccatgggcggcgccgtcgcccttcttctccaccgattgcgccccgacttctggaccggcgccattctcgtcgcccccatgtgcaagatcgcggaggagatg

SEQ ID NO: 24615 - DNA, 1521 bp, Oryza sativa
  Clone ID: PAT_MRT4530_29582C.1
atggggaaggggacggtagtggggacggcggtggtggtgtgcgctgcagcggccgcggcggttggggtggcggtggtggtgtcgcggaggaggaggagcaagcgggaggcggaggaggagcggcggaggagggccgccgctgtgatcgaggaggtggagcagaggttctcgacgcccacggcgctgctgcgcggcatcgcggacgccatggtggaggagatggagcgcggcctccgcgccgaccctcacgccccgctcaagatgctcatcagctacgtcgacaacctccccaccggggatgagcacggactgttctatgctctcgatcttgggggcaccaatttccgtgttatacgtgttcagcttggaggaagggaaaagcgtgttgttagtcaacagtacgaagaggttgccattccacctcacctgatggttgggacttctatggaactgtttgacttcattgcggctgagttggaaagttttgtcaagaccgagggagaggatttccacttgccagagggcaggcagagagagttaggcttcaccttttctttcccagtgcaccaaacatcaatatcatcaggcactcttattaagtggacaaagggattttccatcaatggcacggtgggggaagatgttgtggctgaattgagcagggctatggaaaggcaagggcttgatatgaaagttacagctcttgttaatgacactgtaggcacattggctggcggaagatatgttgataatgacgttgctgctgctgtaatattaggcactggcacaaacgcagcctacgtggagcatgcaaatgcaattccaaaatggactggattactacctagatcaggaaatatggtgattaacatggaatggggaaacttcaagtcagaaaggcttcctcgttcagattacgataatgccttggactttgaaagtttaaacccaggcgagcagatatatgaaaagatgatttccggcatgtatcttggagagattgtgcgcagaatcttgcttaagcttgctcatgatgcttccttgtttggagatgttgttccaacaaagctggagcagcgctttatactgaggacgccggacatgtcagcgatgcatcatgatacctcacatgatctgaaacacctgggagctaagctgaaggatatcctgggggtcgctgatacttccctggaagcacgatacatcacccttcatgtctgcgacctcgttgcagagagaggtgcacgcttagctgctgctggtatatatggcattctaaagaagctgggcagggacagagtgccaagtgacggtagtcaaaagcagaggactgtcattgctctggatggtggtctctatgagcattacaagaagttcagaacctgcctagaagcaacgcttgcagacctgcttggagaggaggctgcctcatcagttgttgtcaagttggcaaacgatggctctggcatcggagctgcacttcttgcagcatctcactcccagtatgctagcgtcgagtag

SEQ ID NO: 24616 - DNA, 199 bp, Oryza sativa
  Clone ID: PAT_MRT4530_29583C.1
gcctagcagcttcacggcagacgcaccacgtctgccggccgccaccgccggagagggagggcctccccgaccctccccgccaagaaggatcctatggcggtgggggcgcacgcttcgcgcgcttcggctcctatcattgcaggtctcacaagtgctcttattgcatcttataaagtttttcaactttcatgctttcagt

SEQ ID NO: 24617 - DNA, 1101 bp, Oryza sativa
  Clone ID: PAT_MRT4530_29584C.1
caattcattcccccgagctgagctgagctctcattccttccttctcctttccgccggcctcgcctctcgtctcctcctctcccctaccgatacgcacgctcgcttgcttgcacctcgcgcgcgagagacgagagagagacggcgagccctggcacgcacgagaagcgaatcgaagtggcggcgacaggagcagctgctgctggtggattatccgtcgtcaacatggctcaggaggacgtcggtcacctgagcgacgccggcctggcgctgggcctgtccctcggcgggggaggaggagggacgaccgacgcggcggcggcgcaccgtggcggctgccggcggccgtcgccgtcgtcgcagtgcccgccgctggagccgtcgctgaccctgagcttgcccgacgacgcggcggccggcgcggccgcgaccgcgaccgcgaccgcgtccggcgggggcggccctgcgcacagcgtgtcgtcgctgtccgtcggcgcggcggcggcggcggccgtgaagagggagcgcgcggaggaggccgacggcgagagggtgtcgtcgacggcggccgggcgtgacgacgacgacgacgggagcacccgcaagaagctccggctgaccaaggagcagtccgcgctcctggaggaccgcttccgggagcacagcacgctcaacccgaagcagaaagtcgctttagcgaagcaactgaacctcaggccaaggcaggtggaggtctggttccaaaacagaagagcaaggacaaagctgaagcagacggaggtggactgcgagttcctgaagcgctgctgcgagacgctcaccgaggagaaccgtcggctgcagcgcgagctgcaggagctccgcgcgctcaagttcgccccgccgccgccgtcctcggcggcccaccagccgtcgccggcgccaccggcgccgttctacatgcaactcccggccgccacgctcaccatctgcccgtcctgcgagcgcgtcggcgggcccgcgtccgccgccaaggtcgtcgccgccgacgggaccaaggccggccccggccggaccaccacccaccacttcttcaaccccttcacccactccgccgcctgctga

SEQ ID NO: 24618 - DNA, 2401 bp, Oryza sativa
  Clone ID: PAT_MRT4530_29585C.1
tttttttttttttttttttttttttttttttttttttttttttttttttttttgaacaattctcagatagctaagattttaggcattggagacatttatgtacaaggggaaagcaacagtctgtttgattcactcagacaacagtagtactcataaacaagatacataagttagcagcaacagaaaatgatctaaaaacaccgtgatcatggtccaacaagaaatgataagcacatcaaaaaatgcaaaatgcacaaagcacacagctcttggtcctattttcaggaaacaggaaacattgggtcagtcatctacttcacaacaacaatttgcggcaacttctgatttcatcgccacgcttcgatccgttcaacctttgagtttatcctgctcacaatgctcgcaccttttgatttctcagatgctggagcagcacgtgttccaaactgcaccttgccctttctagtcctcctactattcaggctacggctccctttgccttgaagtaagttcatagctgtagcacggggagcagcggcagctgctgccagagcaggttgggagcaactagtagagccctctgtctccatgctcgttagggctacattttccgggcaactggaatccgcaaattttccttcagcaagattggtcttattaggtttctcttcagtgctgtgcacgggactgttcagaaggggctcctcgctgacgaaagagggacgcctggatccttcgtcagggtgagaatcaagcgagaggccggtggtctggtgtccattttcatcagacgggtccttctgaggaagagacaaatcatccagatcagactcttctctatccttgagggttttttgtattagcatcttaagaaaattcatcacttgtactgcatacatcaatgcagtcaagggatctgccatctgagtcatatttggtgcaaaaaccatggcaatattgcgcgcattcatcttgtttatttgctcttcttggacaacatcagccatcaaattaacagcccagtctagtaaggctgcttcagttggtggaaggcatttggcaacacgagcacagtcctcttcagactggcattgcatcacctgttcaggtgggattgagtccagcaccccactcgggagttccctaaaccaggctttgattagacctgccaaacagtggacatcaataccctctggcacgatcccaccatttaattggtctctcacaagctcttcttggctattctctgcatttatgcgaaaaataccttctgcccgaagaccgccttgttcataaagacgtctttgcatcatcaagagaattgttgggacactgtttcctctggaatcataggagcactgcatcgattctgttgaaactccaaagacacttgcactcgcactgggagcgcggcggggcacctcgggctcgaactccacggggagcccgaggaatccatggaacctatcgaaggtgacgtgcgccacgtgctgcacgtccgtcggccaccctatctccatcccttcgccgccgccgccgtcctccgcgctgcacccgagcagcgacttccgcagcagcgcgagcagcagcgccaagaacgaccactcctcctcctcctcctccgattctcctccctcttcctcgcgccgttcttggattcccaagcttcctgtagatcccaggctgctgccgctaccgctgctgcttcttcttgggagcacgtcgccatcggaggtggctaaataacgcagtgaggaggaggaggaggaggaggaggagcggcttgcgggtgaagcgaggttggtcgggccccggaagagcgccacctccgccattgcttttcttccacctttttttctcttctcttggctctaatcctccgctaatgatgcgctataatctggtggggatttctcgcgatttctttcttcggattggtggagtgggccaagaaatgatggattcctctcctggtggtggagttcttggtggcgaattgctccaattcagggtcgatttctatcgatttctcccttgtattcttgcttccgattgggatttgtcgtgggaagggggattggttgcggtggtgcgcgtggtccaaatccactccaccacgaacgaagtggacagaaaagaaaaaaaaaagaaagaaagggtttttagcacccgaaaaagatccaaattttttaagtgggaaaagaacaaaatcggtgcagctgtttggtgcgagcgagagaatggaattggattgaggtggagttggattgaagggagggttagttagtgctgggctgggtgtgatgggttcatcatctcctcttcctcttcctcttaggctatagccatggatgcatcgttgatgatcctcgtcccgaattcctcagcccggggatccact

SEQ ID NO: 24619 - DNA, 228 bp, Oryza sativa
  Clone ID: PAT_MRT4530_29586C.1
cctactccctcgccgttggccaccggattgtcgttgtacgccgccgacagggacagtgtttcagtcatggacaagggcgccctgatgccgctgcccgactagacgtgctgtgtttgtggaggcggtggcttgtcgttctcgagcctgcgcgcgtacgggatgcgcgctggtgcatactctgaggaggctggtggcgcgggcgtgcgcctgcggtcttacctcggtgag

SEQ ID NO: 24620 - DNA, 246 bp, Oryza sativa
  Clone ID: PAT_MRT4530_29587C.1
ggacatgaaaaggataatctcactgctatgtagagaacttctgtacagcagcaacagtacagaaaactctgaaacttgctgctatgctgtaatttgattgtgtgatttcttcagaaaactctgaatatctctttgatatcacttccattttctatggcaatgcagataccaaagggggctcgttttgtcggaattcccggaaccgagtcggaggatcacccaagaggcgtgatggttgaagttact

SEQ ID NO: 24621 - DNA, 125 bp, Oryza sativa
  Clone ID: PAT_MRT4530_29588C.1
gtagaatacagcgatgaaggtaaaaagatgggggagtatttatgcctaaagagcggtggagggctggccattggtggattgctataacgtggtagatgagcaacagagagataaggatggagcaa

SEQ ID NO: 24622 - DNA, 492 bp, Oryza sativa
  Clone ID: PAT_MRT4530_29589C.1
atgaactcgggcggcggtgtacggcttcggcgagtgacgcgggccggctccggttggtggtggctgcagcagcatcctcaaggcggcgcattgggcacggtgttggtttccgtgggcgtcggtgtgaggcggcagcgagcttccgggatacggcggcgattccccatcgacgggaccggcacagcggcagagagggagagggatacagagaggaggggatcgagagaaggggatcgggaaggggaggcagagcgtgtgcgctcccgtcctgtcgccgcgccgtcttcctgtcgccgcgccgcctactcgccgggcgccgccaccagcctccccatcgccctgcccctgctgcctccagtcctctctccagtcccgtcgccaccagcctcctcgccgggcgccgccggccagcctccttgccccgccgccggctggcctccgtcgcctaccgccctctggaggcgtcgccctcccagagggcggcgaaaatga

SEQ ID NO: 24623 - DNA, 555 bp, Oryza sativa
  Clone ID: PAT_MRT4530_2958C.1
atggagcgtcaccgaccggctaatccggtcgcagcctcctccgccgccgccgacgccgccgccgccgtcgaactcccgccgtcgcctagggacaccagcggcggtagcggcgggcgggtggcgtggcggcaagggccacaggcaacggtggggaccggcgccggcgggacgggcggcggcatcggcagtgcatgggctgagcagcagcagcgacacctatcaggcctagggatggcctcctgtgccgccggcgctggccgtccgggggagcccgccggcgccaatggctgcccagggggtcgccatcctcgccgcccggctgattcgccgtcctcgccgccggccatgggggccgcccgggcgctggcctcccgtgccgccggcgctgccctcccatgccgcgacgggctggcttcccgtgccgccggcgatggccgtccaggggagcccgccggcgccaatggccgcccggggggtcgccatcctcgccgcatggctgattcgccgtcctcgccgcccagggggtcgccatccatgggggcggcggcaatgtag

SEQ ID NO: 24624 - DNA, 3999 bp, Oryza sativa
  Clone ID: PAT_MRT4530_29590C.1
gggccactctgcgcgcgagggatatatggttggatctgcaatctggatttgaacacacaggaaagggagatgggcgaccaacttcgaacttgttcccatggcttattgctccgttcttctcagagctggcatcttatttttaatacgtttaagtgccttaggagatatggaggatctataaaaggcagatgtgatgttaaattattaactatggaatatcctgtgacagaacaactggagcacactctcgaggaatcctgtttttgtggaaaacctaccagctgagtttatacagaccactgattcgaggctacgtagtcgatttcccatgtgtgacacttgttttggttccgggatcttcgggctgctgttgttcttgtcagctggtcaaatcttgatggaggcaagaaaggccttaagcctcgcctcaaattgattgtgcaaaatgatgagagggaatggaagtcggtatttgtgtctaaggcccatcctagcaatgaccaagcatctaagatggcaaagagagtatatgctaggcttgagagcgatttcaacactaaaaaaagagaaagatgctgtaaatttgatctccatggacctgatgcggaattctgggatgattttgactccaaaatggtggactgcattagaaacacattggataggcgggttcaattttatgaagaggaaattcgcaggttaagtgagcagagattcactccgatatggaacttctgcaacttttttattcttaaggaaagcttggctttcatgtttgagatgactaatcttcatgaagattcactccgtgaatacgacgagcttgaactatgctactcagaatcagttaattctcctggaaaacatcgagaatttggaggattggatactggtgatgatcaagcggcgctgctaaatccaggatttaaagcattgacccaaattgtccaggatgatgtgttcagagaatttgagtttagccaatacatatttgcttgccaggctaagttattgtttaaattgcatcgcccaattgaggttgctgcaagaggatatgcttttgtggttagcttttccaagacgctagccttgcaggagaatggtctaccattttgttttcgtgaagtatgggtgataactgcatgtatggatttaataaaagcaacaacctcacactatgatggtacagctgttgctatcgactcagagagggagttctgtcgtattcagggtgacctctattctctgtgccgtattaagtttctgaggcttgcttatttgattggttatggagttgagatagaaaaaagtccagtcaacagtgcatctttaagcatgctaccatggccaaagccagctacatggccttctattccaccggattcatcagcagaaacaatggcaaaggagaaggcaagcagttttcagcattactttttgacatttaatcttctagtgatgcttcatatgattctccaagcaaaatcaagagaaaagatcttcaatattcacaggaaaccactgccattagaaccttctttgcttcttcgtgaggctaataggcgtagggcttttctttctgttggaaatatatctgaattatatgattcaggtgatggttcaggtctggatgcaaattcaaaaccttcgcccaacaaatctgcttcgaactacatggccaggacaatgtcagggccagcgacatctgagacgtctctgccagttgatcgccccatgaggttgtcagaaattcatgttgcagctgagcatgcactgaagcagacagtatctgaccctaattttatgacatcactttcatcactagaagaatttgagaaaagatatatggagcttactaaaggcgcagctgacaattatcatcactcttggtggaaaagacatggagttgtgctagatggagaaattgcagctctattctttaagcatgaaaattatgatttggctgcaaagtcctatgagaaagtttgtgctctctattctgcagaaggctgggaagagctgttggcagatgttcttcctgatcttgcagaatgccagaagattctcaatgatgaagctggttatttgacttcctgtgtgaagttactttctctagagagtggcttattttcatctaaagagcggcaagctttccagtcagaggttgttcggcttgctcacagtgaaatgaagcatcctgtgccccttgatgtctcatcacttattacatttgctggaaatcctgctccaccactagagttgtgtgatggagatcctggtacactatctgtagctgtttggagtgccttcccggatgacatcacactcgagtctctcagcttaagattgtcggcttcctctagtgcagatgaaggtcttaaggcgataaagagttcagatgctcgagttcttgtacccggtagaaatatcatcaccttcgacattcctcctcaaaagcctggatcctatgtgttgggtgctctgacgggccagattggcaagctatcattcagatcgcatggattttctcaagatggtccagtggacactgatgaattcatgagctttgagaagccaacaaggcctgttttgaaggtgagaaaaccaagggctttagttgatattactcctgctgtgtcctctgcattgcttatgaatgaacttcagtggattgggttaattgtcaagccaatagactattctttgaaagatggcatattgcatatagatgcgggtgctggactgaaaattgaggagtcccagatgattgagatagaaacttatggaagtgatgtggagcatgttggtggtactgatgcttccaagacatcatcaagctccactgatactcgtaaggttgagaaggtccctattgaagatgggaagataaaaataccagactgggctagtgatgtgactactcttgtatggtttcctgttcgtgctattgatgatacaattgcaaggggtgcatcgccagcatcccctcagaaacagagcatagtagatgggatgagaatgattgctctcaagcttgaatttggagtttttcttaatcaagtgtttgaaaggactatcgcagtacatttcactaacccattccatgtgagcacacgcgtagtagataagtgctatgatggaactctactactgcaggtgatattgcattctgaagtgaaggccactctgcatgtaaaggatatatggttggatctgcaatctggatttgaacacacaggaaagggagatggacgaccaacttcgaacttgttccctctggttattgctccttcttcgagagctggaatcttatttgtaatacgtttaagtgccttaggagttcgtgttaaacctgatgattctgaggagcttgtattcaagattgcggtgaagatgaagcgccctgtcctggacccatgtgtggcagttgggttccttccgttttcttcggactgcttgagggttggccagctggtcaacatgagatggagggttgaaaggctgaagaacccggagcatgcctctctgttagccgacaaaatactttatcaagtcgacgccaccccacagacctggatggttggtgggaggaaatgcggtcacgtatcgctgtcaaacaaacaaggttcaaggatagagatcacggtgacgtgcgtgccgctggtgtccggctacgtccatccgccgcagctgggcctgccgcacgtcggcgaggccaacatgctgcaacccggcaggccctcacctggtgtgcgtccttcctccgacactgagcacctcatactgcataccggcttgatccatccatcatacacagattatgagttctttttcgtcagtaacattcagaacgtgttccattgtttcatgtaccataagataagtaacataattctccgtgtatatcaaatcaagtgacctaatctccatatgagccttgtttaaaatcacattcattaattttaccagtactttaatggttatgatcttgtgagtaca

SEQ ID NO: 24625 - DNA, 183 bp, Oryza sativa
  Clone ID: PAT_MRT4530_29591C.1
atggctccatgggcacgctccggcgcaacggcgtcgacgatagtgttctgcggcaacggcgcacgggggcagcgactagcggcggcatcggtccaaagattgatgaggtgtgggcatgccagtcagtttgatcttgcaactgacaagacatgtgaacatcatatcaataagccgatcggctga

SEQ ID NO: 24626 - DNA, 363 bp, Oryza sativa
  Clone ID: PAT_MRT4530_29592C.1
tttctgaggcttgcttatttgattggttatggagttgagatagaaaaaagtccagtcaacagtgcatctttaagcatgctaccatggccaaagccagctacatggccttctattccaccggattcatcagcagaaacaatggcaaaggagaaggcaagcagttttcagcattactttttgacatttaatcttctagtgatgcttcatatgattctccaagcaaaatcaagagaaaagatcttcaatattcacaggaaaccactgccattagaaccttctttgcttcttcgtgaggtcaggactggatgcaaattcaaaaccttcgcccaacaaatatgcttcgaactacatggccaggccaat

SEQ ID NO: 24627 - DNA, 1869 bp, Oryza sativa
  Clone ID: PAT_MRT4530_29593C.1
ccccgggctgcaggaattcggccgaggctcccgccacactctagagagagagaccaagccaaggccaccatggacagcacaagcaacaagatgaagaagatggagccgacgagcggcggccgccatgggactccggggcaggtggtgggcctgtgcgccgccctcgtcaccgccatggctgcctcactgctctgctccacctccatggccctcaccccggacgggcaggcactgctggagctcaagctctccttcaatggcagcagccagcggctgacgacctggaagcccaccgaccctaacccctgcggctgggagggcatctcctgctccttccccgacctcagggtccaatccataaatctcccttacatgcagcttgggggcatcatttcacctagcattgggaagctcgacaagctgcagagaatagcattgcaccagaacagcttgcatggcccaatcccttctgagatcaagaactgcaccgagctcagagcgatttacttgagagccaactacctacaaggaggcatcccttcagagattggcgagctcattcacctcacaatcttggacttgtccagcaacctgttgaggggcacaataccggcgtccattggaagccttactcaccttcgtttcctgaatctgtccaccaatttcttttctggagaaatcccaaatgttggtgtccttggaaccttcaaaagcagctcgttcgttgggaatttggagctttgtggactgcccatccagaaggcttgccgtggaaccctcgggtttcctgccgtgttgccgcattctgatcccctctcctcagctggcaagcgtttcaccaatcaacaacaacaaaacatcgcacttcctgaatggcattgtgattggctcaatgtcaaccatggctcttgcattgatcgcggtgcgaagctcgtgacataccagtggaaccttccgtactcatcaggtgagatcatcagaaggttggagctgcttgatgaagaggatgtggtcggttgtggcggttttggtaccgtgtacaagatggtgatggatgatggcacggcatttgctgtcaagaggattgatctcaaccgtgaagggcgcgataggaccttcgagaaggagcttgagattctgggcagcattaggcacattaaccttgtcaatctgcgaggatactgccgtcttcctacagccaaactactcatatatgatttcttggagctgggcagtttggattgctaccttcatggagatgctcaggatgatcaaccattgaactggaatgcacgtatgaagattgccctgggctctgctcgagggctggcgtatttgcaccacgattgctcacccgtgattgtgcacagggacatcaaagccagtaacatccttctggacagaagcttggaaccccgcgtatcagattttggccttgcaaggctgcttgtagataatgatgcccacgttaccactgttgtcgcgggtacttttggatacctagcaccagaatacctgcaaaatggccatgctactgaaaaatctgatgtgtatagctttggagtgcttttgctcgagttggtgaccggaaagaggcctacagatgcatgcttcctcaagaagggactgaacattgttggctggctcaacaccctgacgggggagcatcggctggaggagatcattgatgagaactgcggtgatgtggaagtggaagcagtcgaggcgatcctcgacattgctgcgatgtgcaccgatgcagacccaggccagcgtccatcgatgagcgctgtcctgaagatgctggaggaggagatcctgtctccctgcatgagtgagctctactacgagcagcacctggaactctga

SEQ ID NO: 24628 - DNA, 671 bp, Oryza sativa
  Clone ID: PAT_MRT4530_29594C.1
gggccggaattctggtagacttcaaaatccagtctatcacttgatttgatatacccggagaattttgttacttatcttatggtacctgaaacaatggaacacgttctgaatgttactgacgaaaaagaactcatctgcacaaaagaatgtctcggcaaaaacagcatacatctcatccggtgcaaatggcgatacatctcaagccgaccagtgtaaggggcatttcttttttactacaggctacaagcctaacatacaatctgtgtatgatggatggatcaagccggtatgcagtatgaggtgctcagtgtcggaggaaggacgcacaccaggtgagggcctgccgggttgcagctgatgttggcctcgccgacgtgcggcaggcccagctgcggcggatggacgtagccggacaccagcggcacgcacgtcaccgtgatctctatccttgaaccttgtttgtttgacagcgatacgtgaccgcatttcctcccagcaaccatccagttctgtgggttggcgtcgacttgataaagtatttcgtcggctaacagagaggcatcctccgggttcttcagcctttcaaccctccatctcatgttgaccagctggccaaccctcaagcagtccgaagaaaacggaaggaacccaactgccacacatggggtcca

SEQ ID NO: 24629 - DNA, 402 bp, Oryza sativa
  Clone ID: PAT_MRT4530_29595C.1
atgattccggcaatctaccagctcgacgagctccacaacttcatctacatgaaggcaatgacatcctccgacccagcgactggcgatttcaccatcatgctcatccacaatccttacatgcagctagatcatcagacaagcaatggaataagatcaccttccacaacaacatccgcttctccgactgcatcttcgatgacggcctctttctacaccatcacttaccacagagtggttcatctcatcgacatcaatccggattcttcctacgtgacaggagtgattgttcaggagactttacccatgatgtttgttgactatgatttaggggacaatgatgtgttcatcggccgcaattacaccgcctgcctttctacaaaggattatccggggtactcctag

SEQ ID NO: 24630 - DNA, 636 bp, Oryza sativa
  Clone ID: PAT_MRT4530_29597C.1
atgacatcctccgacccagcgactggcgatttcaccatcatgctcatccacaatccttacatgcagctagatcatcagacaagcaatggaataagatcaccttccacaacaacatccgcttctccgactgcatcttcgatgacggcctctttctacaccatcacttaccacagagtggttcatctcatcgacatcaatccggattcttcctacgtgacaggagtgattgttcaggagactttacccatgatgtatctcattgtctaccttgctcgatccccgaatcatggtgattttatacaaatattcagattcacaagctcgttggagacggatcaaacggacaggtttgttgactatgatttaggggacaatgatgtgttcatcggccgcaattacaccgcctgcctttctacaaaggattatccggggttgatgccaaatcacatctatttcactgatgatgatgagtgctcgcttcaggcctttaaaggtactcctagggatattggtgtgtacaactacgaggacgatactttgagtgaggttgtgtctcctcagccatggttgaaatggccgcctcccttttggattactcccagcttcaaagacttcccaaacacgtatagacaatga

SEQ ID NO: 24631 - DNA, 2823 bp, Oryza sativa
  Clone ID: PAT_MRT4530_29598C.1
atggctgctctgcgagaatggagcatcaatgtgtttggttcagttactcaagagttaaaagagattaaggctaaagtggaagaactgtcaatagcggaccccttgttgcataatgcagaaattagaatgttatatgcgagaatggatgagctgctctaccgagaggaaataatgtggcttcaaagatcccgggtggcctggctgaaggagggagatcgtaacacaaagtttttccatcgccaggcggcttggcgatcgaagaaaaacaagatcacccggctgaaagctgaggacagtcggtttgtagaaaataaagaagaaatggagcatatggcgcgtgagttctttcaaactctctatctgaaggacaactcggtggatcctagagaactgattgatgccctaactccccgagtggatgacggtatgaatgcaggcttatgcaaacctttttcatatgatgaaattgcagatgctcttttccaaatagggccgctgaaagctccgggacccgatggctttccggcaagatttttccagcgcaattgggcggtcctgaaaaaggaagtcacgactgcggttcggaattttttcctgcaaggagttatgctggcaggggtaaatgacacctcaattgttttgatcccgaaagtctccaagccggaacagttgaaggagttccgtccgattagcttatgcaatgtcatctataaagttgtttcaaagtgtatggttaacagactaaggcctatacttaaggatatcatctcggtcacccaaagcgcgttcattcctgagaggttgataacggataatgccctgatagctttcgagtgtatccatcacattcagaaagagacctcggccggtaagcagttctgcgcctataaattggatctggctaaagcatatgaccgagtcgattgggactttctgagaggtgctctaactaaggttgggttctgctcaacatgggtggaatgggttatggcttgtgttaccaccgtcaaatactcggtatcttttaatgggaacctgctggaaccgttctcgccgagtcggggcctgaggcagggcgaccctttgtcgccgtatctgtttttgttcgtggcagatgggctctccactattctgagtcaagatgtgcaggcaggacggctggaagaactgaaagtctgccggcgtgctccaggggtttctcacctcctatttgcagatgacagtcttttgttttttagagcatgccctcaacaagcctcagttgtccgacaagcgcttgccctgtaccagcggtgtactggacagcttttaagctcgtcaaaatgctccctgctggccagcgcccattgcccgacagatgtgttggaggacattaaaattgtcttgcaagtagaaacatcaacttttgagagcaagtatctgggtttgccaactccggagggtaggatgtcagctgagaggtttaaagctatcaaggaacgactggtgaagaggttaaacagctgggtcgagaagtttatgtcgttgggtgcgaaagacactctcattaaatcagttgcgcaggccatcccaacttatgtgttgggtctcttccggttgccggtttcgacctgcgaggcctacaccaaattgataagagacttctggtggggagatgaggagaacaaacgcaagattcactggacagcctgggatatcattactcgccctaaaggtttgggtgggttgggctttagagacctcaaactctttaaccaggccttgctggggaaacaggcatggaggctaattcaattccctggcagcttatgtgcgcgtattcttaaggccaagtattttcccaactgtgaattagtggatgcagttttccctggtgatacctcgcctacatggaaaggtatagaatatggattggagcttctgaaaaaaggcctagtttggcgcatttgtgatgggaataaggttaagatttggagagatcaatgggttcagagggaatcgtcttttaacctaattgggaagaaaaatcgctgccgtctccgttgggtatcccaactgataagacaggaggacaagagctggaacgaagatctgatcaggcatgtgtgccaccctattgatgcggcggaaatcctaaagattaagctcccacaatttcctgctgaagattttctcgcctggcatttcgggaagtcgggagtctacactgtgcgaagtggttatcgtttagctatgaaagcccagctaggcaatgacgcgagctcatccagtaactctctaaatggtgaacgttgcatatggcgcgacttttggaagatcccagcaccgcctaaggtgaagatttttgcctggcgattggctacgaacggattagctactcaggagaaccggaggaagagcaaattggtgatagatgatacgtgccgcatcagtggttctgaacaggaaaatgcattccacgccgtggtatcttgtcctaagtctgtggctctacgacaggagatcggccagacctggaacacgcctgatgacaccttgcttcggtatgatggaccggattggttgctgctgctcctcctggacaaattgagtggggaggatagagttaaatttcttctggtcctgtggcgttcctggcatttgaggaatgattcgttgtttgggcagggtaaggcgtcagttcggagctcggtcctgtttcttcaaagtttctgggaaactctttcccaaattaaggttggtggtgcagtggatgtgaaggggaaatctcctgtgggggtgcataataagttgatctgttccattgaaagatatggattttga

SEQ ID NO: 24632 - DNA, 936 bp, Oryza sativa
  Clone ID: PAT_MRT4530_29599C.1
atggcgagaaaaatgagcagcacgttgcaggttttggtcgtttcctgctgcagcttgctgcttctgtgtgctccggcggcctccgccggcgattacccgccgacggcgaagggcttgtcgtacggtttctaccagaggagctgtcccaaggcggagaccatcggttgcgacgcgtcggtgctgttggcgcgcacggcgacggaggcgagcgagctggacgctccacccaacgagaccatccgcccgtcggcgttgatggccgtcgcccaactccgcgccctgctcgacgacgcgtgcagcggggccgtcgtctcctgcgctgacatcctcaccctcgccgcgcgcgactccgtccgcctggtcggcgggccggagtacagggtccccctgggccggcgcgacggcgcgacgatcgcggcgagggagcgcgtcgtcgccgcgttcccgccgccgagctccaacgtgacggcgctcctcgccgccgtggccaagatcggcctcgacgccgccgacctcgtggcgctctccggcgcgcacacgctcggcgtctcccgctgcatctccttcgacgaccgcctcttcccgcaggtggacgccaccatggacgcgcggttcgccgcccacctcaggctctcctgcccggccaagaacaccaccaacaccaccgccatcgacgtacggacgcccaacgccttcgacaacaagtactacgtcgacctgctcagccggcaggggctcctgacctccgatcaggtgctgttcagcgacggcaggacgaggggcctcgtcggcaggttcgccgtcgaccagccggagttcttccgccgcttcgccttctccatggtgaagatgtcgcagatccaggtgatgacgggagtgcagggggagatccgcaccaactgctcggtgcgcaacgccgccggcggtggcacctag

SEQ ID NO: 24633 - DNA, 1685 bp, Oryza sativa
  Clone ID: PAT_MRT4530_2959C.1
aaggtgcgctgcaatggattgtgttgtgcaaggggtattgtcacaactcctttccgagctcctggtttggaatggtatattcctggtttggagatagaactgtgcagccggatgccgcgttacaagcctgagtacttgtttgtccaggagttgcgtacgatgtcctttgccataggatttgggactgcccctttttatgcccagattcctcatgatcgtcatgaagagaagtgccgagtcaaagtcaccttgaacagtaatagtgaagatatcccctcagtgatgttcgaagctggaggaagaaactatatccatgcatgtcaggaggtggcaaggattgccataggagagctccgcgatcgctacagtgatcagttggccgacactgagtatcgctaccatcctcgtcaaccacagggaagtgaccgtggcagctaccttgagactgaaggaattgagaatgatgctaccaccaggcatatggttgagatgctgtgggctatggatgaaacccgtgcagagactgtgttagcagctcaagatcgtgaagatcagaatcgtggtaagatttgcaagctagaaggcaaagtggatcgtttggagaaggaactagccgcattgaagggagaagcaccaccgctgaaggccagggttcgtcttaccgcaaggaagagagctctatttgtccctcgctatcaattggcgccaaaggtccgtgtggtggagaaagaagttaccccagccgtagcagatcctccggtcatcattatggtgctcactcgcagtaacgggaatggccccaacaacaacaataacaataacaacaatggagagaatcccacacttgcccaagtcctggcccaacaggcacagcttatgaacatgatgatgcagcaactccagaaccagcagaaccagggaaataaccaggcacctccccagaacaagttagtagaatttcttcgtgtgaggccgcctactttctctagcaccactaatcctgttgaagctggtgattggctgcatgccatagaaaagaagttggatttgcttcagtgcaccgatcaggagaaggtctcatttgcatcacatcagttgcatggccctacctctgaatggtgggatcacttccgtctgaataggactactgctgaacctatcacttggcttgagttcaccgctgctttccggaagacgcatataccatcgggagtggtgtctctcaagaaaaaggaattcaggtcgctcacccaaggatctcgctctgttacggagtatctgcacgagttcaatcgtctagctcgttatgctccagaagatgtacgcaatgatgaagagcgccaggagaagttcttggaaggacttaatgatgagctttcttgcccactcatgactggagattatcctgatttccagaagttagtggataaggctattcgccaggaggacaagtacaaccgcatggagcaaaagaaacgccagattgctcaattcaaggcacaacaggggaatagtcagaggccgcgtcttactttaggaccccagtccatgccacagggagggtcttcgtctgttggtcgtccgcagcgtcagttcttcaacaacaatgctggcaacaacatccgcaatcaagcctcacgtcctgttgcagcctcgacacagcaacaacctgccaagagggagca

SEQ ID NO: 24634 - DNA, 2406 bp, Oryza sativa
  Clone ID: PAT_MRT4530_295C.1
ccggcccttaaacgccgccgccgccgccgctctcttcgggctcgcttcccttctccgggagattcagtcgctgttgtggtgtttgcttcatccaccgccaccatgcagaacgaggagggtcagatggtggacctctacgtccccaggaagtgctcggccacgaacaggatcatcaccgccaaggaccacgctctcggtgccagatcaacattgggcatgtggatgagaatgggctgtacgatggccgcttcaccacctttgctctctctgggttcatccgtgctcagggagatgctgacagtgctctggataggctgtggcagaagaggaaggctgaggtcaagcagcagtagatcttgctactagttttacctggaagaactcgtttcaatttcatgtctctctagctacttcatgcaatgcctgtgttatcagttcgtactccgaaaaaattcgtgtgacttgatcggtttatcctgataatgttttatccatgttgaagctttattaaaaaaaaaaaaaaaactaagccgagacaacgcagagaaaggcgtcttcgtactcgcctctctccgcgcctccgcgcttttcctcctcctctcccctctctcccttctccgccgccgtcgcagcatcaacccaatccgccgccatgagggagtgcatctcgatccacatcggccaggccggtatccaggtcgggaacgcgtgctgggagctctactgcctcgagcatggcatccaggctgatggtcagatgcccagtgacaggactgttggtggaggtgatgatgctttcaacaccttcttcagtgagactggtgctgggaagcatgttccccgtgctgtatttgttgatcttgagcctactgtgattgatgaggtgaggactggttgctaccgccagctcttccaccctgagcagctcatcaatggcaaggaggatgcagctaacaactttgcccgtggtcactacaccattggcaaggagattgttgatctgtgccttgaccgcatcaggaagcttgctgacaactgcactggtctccaaggtttccttgtgttcaacgctgttggaggtggaacgggctctggtcttggttcccttctcctggagcgcctttctgtggactatggcaagaagtccaagcttgggttcactgtgtacccatcccctcaggtctccacctctgtggttgagccatacaacagtgtcctctctacccactccctccttgagcacactgatgttgctgttctgcgttgataatgaggccatctatgacatctgccgccgctcccttgacattgagcgcccaacctacaccaacctcaacaggcttgtgtctcaggttatctcatccctgaccgcctccctgaggtttgatggtgctctgaacgtggatgtcaatgagttccagaccaaccttgtgccctacccaaggatccacttcatgctttcgtcctacgctccagtgatctctgcggagaaggcctaccatgagcaactctctgttgccgagatcaccaacagtgccttcgagccatcctccatgatggccaagtgcgaccctcgccacggcaagtacatggcctgctgcctcatgtaccgcggcgatgtcgtgcccaaggacgtgaacgccgccgtcgccaccatcaagaccaagcgcaccatccagttcgtggactggtgcccgacggggttcaagtgcggcatcaactaccagccgcccagcgtcgtccccagcggcgacctcgccaaggtgcagagggccgtgtgcatgatctccaactccaccagcgtcgtggaggtgttctcccgcatcgaccacaagttcgacctcatgtactccaagcgcgccttcgtccactggtacgtgggtgagggcatggaggagggtgagttctctgaggcccgcgaggatctcgcccgcgttggagaaggactacgaggaggttggcgctgagtccgacgagaatgaggatggcgatgatggtgacgagtactagaggagtcgtcgtcgtctgggggcttgatgttctgtgtgtcaaggcctgattgataactgctgctatcccatgatctgccagtgtggagttatcctgttgccgtgtgcgtgtgtcttcgagacatttgcttgtggtgatctgatgtttggggcttaatgggcttacaaccctcgttgttgtaacctgtgtgccctgttttatgtgagaccgcttcgtcacttataatatgcgcgtttgttcaattttatgtttgtttcttgtgttgattacggtttactctcgactgtggaacttggtatgtttcaaggtttacgtgcttctcctgctgacaacccattactggctccgatcttaagaaaagaacagttcgttattagtgcaaaaaaaaaaaaaaaa

SEQ ID NO: 24635 - DNA, 1561 bp, Oryza sativa
  Clone ID: PAT_MRT4530_29600C.1
aagtgcacagccctctatatatgccttgtacaagcaccaaatccgtgcctcaaaccgctcaaagtgtactagctctgcgtctccgctgttttctaatcgcgtctctgcactgcttgcgccgcgctggtgccaccactacatgatgcagttcacgcacaccgcgccacctccaccgcctctgcaccctaatgggcatggactagggttagggttgtaccttgacgtcggcgcgacgaggggaggaggaggagcgcggccgtggtcgtcgtcgtcgtcgacgacgacgttgggtgggagcggctacttcccgtcgtcggcggcggcgtcgaagatctcgttggggaacctcaacagcacgggctgcatggagcagctgctggtgcactgcgccaacgccatcgaggccaacgacgccacgctgacgcagcagatcctgtgggtgctcaacaacatcgcgccggcggacggggactccaaccagcggctcacagcggcgttcctgtgcgcgctcgtgtcgcgggcgtccaggaccggggcgtgcaaggcggtgaccgcggcggtagcggacgccgtcgagtcggcggcgctccacgtgcaccggttcacggccgtcgagctcgccagcttcatcgacctcacgccgtggcaccggttcgggtacacggcggccaacgccgccatcgtcgaggccgtcgaggggttccccgtcgtgcacatcgtcgacctcagcacgacgcactgcatgcagatcccgacgctcatcgacatgctcgccggccgcgccgaggggcccccgatcctccgcctcaccgtcgccgacgtcgcgcccagcgcgccgccgccggcgctcgacatgccctacgaggagctgggcgcgaagctggtcaacttcgcgcggtcccgcaacatgtccatggacttccgggtggtgcccacctcgccggccgacgcgctcacgtccctcgtcgaccagctccgggtgcagcagctcgtctccgacggcggcgaggcgctggtcgtgaactgccacatgctcctccacaccgtcccggacgagacggccggctcggtcagcctgacgacggcgcagccgccggtgtccctccgtaccatgctcctcaaatctctccgggcgctcgacccgacgctggtggtggtggtggacgaggacgccgacttcaccgcgggcgacgtggtggggcggctgcgtgcggcgttcaacttcctgtggatcccgtacgacgccgtggacacgttcctccccaaggggagcgagcagcggcggtggtatgaggcggaggtggggtggaaggtggagaacgtgctggcgcaggaaggggtggagagggtggagcggcaggaggacaggacgaggtggggccagcggatgcgcgccgccgggttccgcgcggcggcgttcggcgaggaggccgccggcgaggtgaaggcgatgctgaacgaccacgcggccgggtgggggatgaagcgggaggacgacgacctcgtgctcacgtggaaggggcacaacgtcgtgttcgcctcggcatgggcgccgtcctga

SEQ ID NO: 24636 - DNA, 777 bp, Oryza sativa
  Clone ID: PAT_MRT4530_29601C.1
atggccgattcatttgttcttatttatggaactagcaagctgttatcacacaaactagagcatctactctcgcgtcacctcctctcaggtgacacgggaggcgccccgttcgccgtcgcccaccgccctccctcctccacctcgtcgccgcccgagcagctgccggcaaagccgtacggccacaaggacagcggtggcggggcttcgctccgtctcaccgcacaagggcagggggattgcccggcgttgggaggcggaaaccgcccaaatccgcgccgaccggccagacctggcggggaagggcgttcaggcggctgcgtttggcgggggtggcggcggagtttggaggcgctggctgcggaggacaaggccgccagattcgcgctggatctggcgaggacaagtgctagcacacttcccaccgcacttgttgtgggatggcgacggcggcgccgacgccacggcggccggatctggcggtggtggagcgggatgacgactggtggcggtggtagcatcttgtggatgcggtggttgcgggcgccagtgacggagggtgtggctggcggcggcaggcgcaacagcgcggaggcgctggagacggaggcggaggccgcgacggcggcggaggggcaggagcaggaggcgaagccgatggagacggagcccggcaaggtagctgcacgcgaagactggctggcggggggcgccggtgcgatgtgcccacacgccggcggaagtttagttggcggtggagcagtggtgcatgtatggtag

SEQ ID NO: 24637 - DNA, 458 bp, Oryza sativa
  unsure (1)..(458): unsure at all n locations
  Clone ID: PAT_MRT4530_29602C.1
cgtatgattagtttgctatcttcatttctgcatactctctggagattttgctgtcaattgagccttccacttggatgatttggaaggaacgaagtgcgcggatctttgaaaatatgagccggccactggtattgctcttttcagctacatacttctatacttggttttgagccaagaactatgtaataaggggctttagcttgtgtgttgaagcaaaggccagattttatccattgtctaagaaaaaagaactgtgggtgtggcgtgtcatgaagctgcattctccctcctagcttgagccttggtatcttttgtcggatttgtaacagtttggtcgtaaagttgccgtgaccgtacgtagtagtcaatggctacaataaactttgttgtaccgtggtttccatgttatgggctctttctcttaataaaattttatcgcccggtttttaaaanaaaaa

SEQ ID NO: 24638 - DNA, 378 bp, Oryza sativa
  Clone ID: PAT_MRT4530_29603C.1
ctgatctgtcaataaggaatgcttgcttgacaaccatggggggcgcttttgtcttgcatttggaaattaagggaatttttgtgtttgtcagccagactgtcactaactaatttttgcaaaaatgtccttatttcccagaattttgagggtgctgccaatagaacaaatctccaaatagagcaatcattgtactccccttaccagttggggccagacagtttcgcctgatggatttgtcttgtcaatattatttagagaaacctaattcagtttcaggaactcgcccaagttcagagtaccattgagattggttgttttcagctgtaacttcagattctgagataccaccaaaatgatattgatcttattctttcaaaa

SEQ ID NO: 24639 - DNA, 2663 bp, Oryza sativa
  Clone ID: PAT_MRT4530_29604C.1
ggaggaaagccgatgcaagcaagcaagcagccctccttaccatatgagtcgcgagttctcacagacacaacgcccactggctaaaaccggcataagttcaagctaaaggagatactaccatgttgcaattcactaatataatatggataacccaaaaggggcaacctagctacttggcaggctgctcctatatgctaataatcacctttcttcctctttggtatgggggcgatctcgaacacatcgtcatcgctatccgagtcgctttgaagctcctcgactggcctcttgcctcgcggaaccactacctcctccttcaatacttgaaagttcagccccttcttgtcatcagtagcgtcaatggaaatagttgacccctgtccagcatctcctgtaataagcatctcagagagctttgtcatcacattcttctgcacccacctccttactggtcttgccccatacattgggttgtatgattcagacaagatgacgtccaaggcatcatcacttgcaagtagagatacgcccttgtgagccacactggtaacgacactcttcatctgaattttgacgacctccttaagattgtcgtgcgaaagcggctcaaatatcacaatctcactcagcctgttgagaagttcaggcctgaaatacttctgaacttgtttcataacaaggtcccgtgcagcttccattgttctttcaccagtcactccttcagttaggtgctcagctcccagatttgaggtcataatgatgatggtgttcttgaaatctactgtccttcctttgccatcagtcaacatgccatcatcgaggagctgaaggaacacgttgaacaccgagggatctgccttctccacctcatcaaaaaggatgacactgtaaggacgcgtcctaactttttctgtcaattgtccgccatcttgatggccatgatagcttggaggtgctccaatgagacgcaacacagatccactcccaacaaattcagacatgtcaaagcggatcaacatcttctcgctgtcaaatagctgctcagcaagggcttttgcaagctccgtctttccaacaccggttgagcccagaaagaggaaagagcctataggttggccaggttgttcaaggcctgccctagaacgtaaaactgcctgtgcaaccagtttgacagcttcatcctggccaacaactcgctcgtgcaatctgtctgccaggtggattaacttctccttctcctcttgatcaagtgtagtgaccgggatgccagtccatcggctcacaacttgagcaacatgatctgggccaacaattgcttcgttcactccattcactgacgtatttccattgttattttgcattcctgtggtgttcacccctttttgactatcaatcttcagccttacggtggagcaagcctcatcaatcagatcaatcgccttgtcaggaaattgacgaccggtaatgtagcggtccgcaagctgtgcagcagcgacaatggcagcatcctgaatcttcaagccatggtgctcttcgtacctctgcttcagcccctgcagaatagcaatggtcgcctgcgtggtcggctcctcgacgatcaccttctggaaccggcgctcgaacgcggcgtccctctcgatgtgcttgcggtactcgtcgaaggtggtggcgccgacgcagcggatgcggccacgggccagcgccggcttgagcaggttggcgccgtccatgctgccgcccttgcacgcgccggcgccgagcagcatgtgcatctcgtcgatgaagaggatcaccttgcccgccgcgccctccgcctcctggatcaccttcttgacgcgctcctcgaacatgccgcggtactgggtgcccgccaccagggagccgacgtcgagctccacgacgcgcgcgccggcgagcgcggcggggacgtccccggccgcgacgcggcgcgcaaggccctcggcgatggccgtcttgccgacccccggcgcgccgacgagcacggcgctgttcttggtccggcggcacaggatgcacaccacgcggtcgacctcgtcgtcgcggcctatcaccgggtcggcggcggcggcggaccccgtcatgtcccgcccgtacgtgcgcagtgcggtctccttcggaggagcgaccggcttggccttggtcacgtaggcggcggctgcggcggcggcggcagcggggacgccaccactcggcttcggcttcggcttcgtactccgccttccgatgacgtcttcgccggcgagaagcacccggccggtggatcccactacggccgacgacgaggtgtcccccttgatgacggcgttggtggaagacgccgggccccacaccgaccactgcgaggaggagaggtggccagcgcggaggtgcttgccgccgctgcgcggccgcgacgacgcccggccgtgcgagcggtgcaccagcggggcggcggcggcggaggagggcccgctgccgacctcgtcgccgtagaggagggccttgcgtcgccacgcgtcgccgccgccatcgccgtcgtcgtcgtcgtcgcattcgtacttcaccttcaccataccgctggaccacttcgcgtggacgggagggcgatcggcggcgtcggcgtcgaggatgccgtagcggtacttcttgcggtggatcgacat

SEQ ID NO: 24640 - DNA, 354 bp, Oryza sativa
  unsure (1)..(354): unsure at all n locations
  Clone ID: PAT_MRT4530_29605C.1
ccggaatgaatggcnggaccgacgcgtgcggagcaagacgctcaggtcctcctcctctcgcatggcagccatggccaccaccgcgtccagcctgctcaagacctccttcgctggcgcgcgcctccccgccgccgtccgcaaccccaccgtctccgtcgcgccgcgcaccggcggcgccatctgcaactccatctcgtcgtcgtcgtccactctcccctacgacctcaacgccatcaggttcagccccatcaaggaggacatcgtgtctcgcgagatgacgccggggcacatgacctagatgatcacctacgcggacacatacttcgtgggagcacgggcggactcctccgggat

SEQ ID NO: 24641 - DNA, 2295 bp, Oryza sativa
  Clone ID: PAT_MRT4530_29606C.1
atggagggcggcgtcgcaggcggcggcgcaggcttcggcgccggagcagggcggcggcgcaggcgaaggcggcggagcaaggcggcggcggagcaggccgtcgatgttagggtgcaaccctatgcgacagtagatgctgatggtaggaaaatcatcagtaaaggaggcactgggcattgggtaatcgattcagagagtttttcgtttgatttcctaatggaaagtttgagggttgagtttaagtggggctcgaaccaatctcccttagtgtggtattttaacaaaaatttgggtgaggatgttaggctcataggggacactgatttgccagatattttcgagatgtatgcaaccgaggccagtttccacctacttgtagcagttcttgaggaaagcatggatgttgcttctgtgtgttgtgtgcatgagcccattgctatcatcccacctgagaacccttcccacaatgatggttctggacaagctgctactaatgttggaggttctgcacagcctacaacagtggaagcagatgttagagagcctgacatgtttgataatgaggaagaatatgttggtccacctgacacctctggccaatcctctcagcctgctgccataggggttggtggccaatcctctcagactgctgccacaggggttgaagctcctgaggtagaagtcactgatgaagaccctcaggttgttcgagtgttgcatgatccagagaatccaaatatagtgaagaatgctctattccctgacatgatatcttttagaaaagcagttaggcattatgcaattaagaaaggttttgagtttgctgatttgaagacagctaaaacaagattcattgcaacctgtcgcgctgaaggctgtccatggagaatacgtgcttccctaatccatgataagaaaacaattaagattacagttcttccctttgaacacaaatgtgcatctaccaaactaagagagggcaagatggctacacagggctgggttgctgataggcttggtgattggttgaagaacaatccaaagaagggtgctaaggatgcaagggggaagctgcaagaacagtatgagatcaagttgaagtattcaaaggcatggtcagggtgtaggccatatgttggtgtagactcaactaagttgactggaaaatacactggacagttagcttcagccacctctgtagatggtcacaactggctgttttatgtatcatatgcaatttttgatttggcaactgatgacaattggttgtggtttatgaaacaattgaatagagctattggttgtcctgaagggttagttatctcaaccgatgcatgcaaggggttagaaaaggctgttagtgctgcatttagtgatcctgttgagcatagagaatgcattaggcacctctatgttaacttcctaaagaagtaccatggttctgttatcactgagcatttgtatccagctgctaggagctacaccgaggagggtttcaaatgtggctttggagaaagcagcaaatgtgactatctgacaaacaatgtttctgagagctttaatgctcagatcagaaatctgaaaggactgcttcctcatgaacttgttgacagcatacgagagttaataatggagaagatggccactagaagagatgttggcaagaaaatggatgatggaatcattccaggtgttatgaagcagcttaatgatgccacatctcttcttaaagtggtgaagattgccagaagtgatgatgggtttgcagaggtcacacttgtggatactgacaacaagacaagaaggcatattgttgacctagacaaccaaaaatgctcttgtagggcttggcaaataacagggaagccatgcaggcatgcattggcctggatatgcagcagtggaggaaggatacaagattttgtgagcccatattatagtgtgcaaatgttcaggatagcttatgcaggcagagtaccacctatgactgacaggacacagtggccagtagttgatttgggcttcaaggtgcatgtccctaagcagaagagaggtgctgggaggcctagagtacagagaataaggggatttcttgagcctggaagaaagagagtgaaatgcaagagatgtaaaagatttggacattttgagaaaacatgcaagctggctgaacctgcagatgcagatgatatgagcagccactgcaccccccaaaaacggtatattgctgtcattgtgcttctattcttaattagtctttgtgcaagcggtttgtattctttaactccaacttga

SEQ ID NO: 24642 - DNA, 1917 bp, Oryza sativa
  Clone ID: PAT_MRT4530_29607C.1
atggagggcggcgtcgcaggcggcggcgcaggcttcggcgccggagcagggcggcggcgcaggcgaaggcggcggagcaaggcggcggcggagcaggccgtcgatgttagggtgcaaccctatgcgacagtagatgctgatggtaggaaaatcatcagtaaaggaggcactgggcattgggtaatcgattcagagagtttttcgtttgatttcctaatggaaagtttgagggttgagtttaagtggggctcgaaccaatctcccttagtgtggtattttaacaaaaatttgggtgaggatgttaggctcataggggacactgatttgccagatattttcgagatgtatgcaaccgaggccagtttccacctacttgtagcagttcttgaggaaagcatggatgttgcttctgtgtgttgtgtgcatgagcccattgctatcatcccacctgagaacccttcccacaatgatggttctggacaagctgctactaatgttggaggttctgcacagcctacaacagtggaagcagatgttagagagcctgacatgtttgataatgaggaagaatatgttggtccacctgacacctctggccaatcctctcagcctgctgccataggggttggtggccaatcctctcagactgctgccacaggggttgaagctcctgaggtagaagtcactgatgaagaccctcaggttgttcgagtgttgcatgatccagagaatccaaatatagtgaagaatgctctattccctgacatgatatcttttagaaaagcagttaggcattatgcaattaagaaaggttttgagtttgctgatttgaagacagctaaaacaagattcattgcaacctgtcgcgctgaaggctgtccatggagaatacgtgcttccctaatccatgataagaaaacaattaagattacagttcttccctttgaacacaaatgtgcatctaccaaactaagagagggcaagatggctacacagggctgggttgctgataggcttggtgattggttgaagaacaatccaaagaagggtgctaaggatgcaagggggaagctgcaagaacagtatgagatcaagttgaagtattcaaaggcatggtcagggtgtaggccatatgttggtgtagactcaactaagttgactggaaaatacactggacagttagcttcagccacctctgtagatggtcacaactggctgttttatgtatcatatgcaatttttgatttggcaactcaggacaattggttgtggtttatgaaacaattgaatagagctattggttgtcctgaagggtgttatgaaacagctaatgatgccacatctcttcttaaagtggtgaagattgccagaagtgatgatgggtttgcagaggtcacacttgtggatactgacaacaagacaagaaggcatattgttgacctagacaaccaaaaatgctcttgtagggcttggcaaataacagggaagccatgcaggcatgcattggcctggatatgcagcagtggaggaaggatacaagattttgtgagcccatattatagtgtgcaaatgttcaggatagcttatgcaggcagagtaccacctatgactgacaggacacagtggccagtagttgatttgggcttcaaggtgcatgtccctaagcagaagagaggtgctgggaggcctagagtacagagaataaggggatttcttgagcctggaagaaagagagtgaaatgcaagagatgtaaaagatttggacattttgagaaaacatgcaagctggctgaacctgcagatgcagatgatatgagcagccactgcaccccccaaaaacggtatattgctgtcattgtgcttctattcttaattagtctttgtgcaagcggtttgtattctttaactccaacttga

SEQ ID NO: 24643 - DNA, 3542 bp, Oryza sativa
  Clone ID: PAT_MRT4530_29608C.1
tctttttcaattcatcatcgatatgtatatatagagaagggttaattggatccatgccacgcgaattgtggcaaatcaaaaaaaaaaatgctacacctattccggaatccgggtgcaggccacaactgtttcctcgtgttcacgtgtgcttagaccagctccggtccggctcgaacaacccggtcgccattcgttccccacaccgaaaccctagcttcttggaggcggcgcaggcgacggcgccggcgcaatcgacggcggcggagcaggcttcggtgccggagcagggcggtggcgcaggcgaaggcggcggcggagcagggcggcagcggagcagggcggcggcggaggctacgacggccgaaggggaggacctccaccgatgggaggatgacattcgttggtaggcattggttttcagtcgatgttagggtgcaaccctatgcgacagtagatgctgatggtaggaaaatcatcagtaaaggaggcactgggcattgggtaatcgattcagagagtttttcgtttgatttcctaatggaaagtttgagggttgagtttaagtggggctcgaaccagtctccctcagtgtggtattttaacaaaaatttgggtgaggatgttaggctcataggggacactgatttgccagatattttcgagatgtatgcaaccgaggccagtttccacttacttgtagcagttcttgaggaaagcatggatgttgcttctgtgtgttgtgtgcatgagcccattgctatcatcccacctgagaacccttcccacaatgatggttctagacaagctgctactaatgatggttctgcacagcctacaacagtggaagcagatgttagagagcctgacatgtttgataattaggaagaatatgttggtgttaatgatgagcagttgtatctgcctccaaaacctactcagccacctgacacctctagccaatcctctcagcctgctgccacagggtttgtgtcacgaccggaattaacccaacgggcctgctgccacaggggttgaagctcctgaggtagaagtcactgatgaagctcaggttgttagagtgttgcatgatccagagaatccaaatatagtgaagaatgctctattccctgacatgatatcttttagaaaagcagttaggcattatgcaattaagaaaggttttgagtttgctgatttgaagacagataaaacaagattcattgcaacctgtcgcgctgaaggctgtccatggagaatacgtgcttccctaatccatgataagaaaacaattaagattacagttcttccctttgaacacaaatatgcatctaccaaactaagagagggcaagatggctacacagggctgggttgctgataggcttggtgattggttgaagaacaatccaaagaagggtgctaaggatgcaagagggaagctgcaagaacagtatgagatcaagttgaagtattcaaaggcatggtcaggtatgaagttagcactagaacaggtacatggtaaatatgaggaaagttttcagttgcttttcaactggaaggctgaaattgagaggaagtgtccaggtagtatagttgaaattgaattggagaagttaggaaataaaatgtgcttcaagcgtttgtttgtagctctaaaaccatgtatagatggctttttgcaagggtgtaggccatatgtgggtgtagactcaactaagttgactagaaaatacactggacagttagcttcagccacctctgtagatggtcacaactggcttttttatgtatcatatgcaatttttgatttggaaactaataacaactggttgtggtttatgaaacaattgaatagagctattggttgtcctgaagggttagttatctcaaccgatgcatgcaaggggttagaaaaggctgttagtgctgcatttagtgatcatgttgagcatagagaatgcattaggcacctctatgctaacttcctaaagaagtaccatggttctgttatcactgagcatttgtatccagctgctaggagctacactgaggagggtttcaagtaccatatgcagcaaatatatgcagtgaaaccagatgcaatagagtttcttgagcaacatcattcaagaatttggtacagatgtggctttggagaaagcagcaaatgtgactatctgacaaacaatgtttctgagtgctttaatgctcagatcagaaatctgaaaggactgcttcctcatgaacttgttgacagcatacgagagttaataatggagaagatggccactagaagagatgttggcaagaaaatggatgatggaatcattccaggtgttatgaagcagcttaatgatgccacatctcttcttaaagtggtgaagattaccagaagtgatgatgggtttgcagaggtcacacttgtggatactgacaacaagactagaaggcatattgttgacctagacaaccaaaaatgcttcaaggtgcatgtccctaagcagaagagaggtgctgggaggcctagagtacagagaataaggggatttcttgagcctggaagaaagagagtgaaatgcaagagatgtaaaagatttggacattttgagaaaacatgcaagctagctgaacctgtagatgcagatgatatgagcagccactgcaccccccaaaaacggtatatgtcaacaagtgaagcaagctgctctgcaccaaagaagaaaaaaacacctaggaaaaaaaagacaccaaaaaataagaagactccccagaagaggaaagacctagcatcctcaagtgcaccaccaactagagtagttaggagcctatctacctatcttcgactgtaatgccagctgcctcctttctaagtattttgctaattgccaatggctgtgatgaacttgtaatgcatgtgtgcctgtgaacttgtagtaacctatttgcagtgacaatgtagcctgccccatctcttaagtattttgctagtaaggctgctatgaaccagtaatgttgctcatgtatgtctgtactgttgtatgcatatgttgagcctgaaaacattaagcaagcaaataagacagtgatcactaaggtaaggtatagaagtctagcacggctaaatttaacttcttccaactgcttcttcatcgctaaacactccagcctacactggttgagcgtctcaattgttgacttcaactcattttcctttgcatcaaggacctcacaaatcttcgctttttcattcttctcatcatctaaatattggcgaagaatgtcgattgtttcttgcatatgatcgtactcgccggcgtgacagtacgcaaccatctcctcagcatactcattcagcagatcttcccatatccataagaagcaacagcccgaattgccgcattgtagccaccggcgtcgaggattccttggcgtgttcgaaatctgcacagtggcggaggcaccgcaagcacacttcagcgtggggatggaagaaggtgattccatcgtcgccttgccgtcgcgccaggaaggaggtgattccat

SEQ ID NO: 24644 - DNA, 1802 bp, Oryza sativa
  Clone ID: PAT_MRT4530_29609C.1
ggggggggggggtttttttttttttttttttttttttttgaaaaattgcaatggaattatcagctgagtagatcaactactatttggttcacttcgtttttacatgttacaatctcatctgtgtttcccagtgaggaggtagtatacaaacattaccaagaaaagctggtaaaacctacaatctaacaaaattcatttgcccgcatgcaaaatctttgatgacgtgtatttcttttctgtgtgttcagtgtttgcttagtgtgggcagggcaccaagatggcacaagcaactgcccacactgggaaatgctttccaccactgtgttatcaccaattctgcaactgcgatgccacgcttttcaccactgggtgatacttcgtgtgtagatacttctttgcgttttctgaaccaggttgcccaagccattcatcatataatcttttcgcaatagggttctcgaaggggttggataccgatacatcttggatgtacacatcctctagtagttggataagatccttcgcagactggcctttggcaggttttatttgacctcccccattcaggcagcctgaaggacatgccataacttcaataaagtgatattcgcattttcccatcttaatcttcctaataatgttctgcagatttctgaatccataacaaagtgcaaacttaagaacaggtttgccctccacctccagtgtaacctcacgaaaatctgaatttcgtaagattctgaaatcaactgatccttcaatttttctatcgaagagaacatgtgccgcatgtcgaaagactgtttctgcataaccccctgagccaccagaaaccccatatagttgaccgtcatcatcaacattggttaataatctgtccatgggagactcctctagggtcttgaaatcaacagatctggactgtatcaaatctaacacttcaccagtggttaatacggaatctacctctgtaacatctttatcttccactgagaaaacaaaatcatccctaacagcttctagttttttatcataacagggcatcacagtaacatgataaacatcatgtggcttcagaccaagttttccaaccatatgatgcttgatagcagcaccaatggcctgttgggggctcttcacagctgagatgtaaggcaagataaatgaaccgagagtcttttctgcatagcatatccaacctgggcatgcagatgaaagcatgggaagattttttccagcttctttgccactagataactggttttgatgataacgagtaacaaattcactgcatgcttcaattagggacagatctcgactggaacttgtgtcgtaaactgcctttacgcccatcgacttgaacagcgcagtgagttttctgaaaacctgtgattgagaaagaccaaagaatgcagctagcgatgctcttgactgtggagagaccgatactatgacagctttgtcagagttgatgcgagtaatgaagtcacccaagctttgcttctcaagcataactgtttctgctgatgttatgcaaccactgcaagccaaacagtccttcagtgaaatcttgactgcttcctctggaggatttgtgctcactgcaatttccttttgtttgatcggaaggcggcgggcggaggggcccttgttgagggagatgatgcagtcctgcgagggggcgatgaagtcgttgagatccgacgcctgcagcgccggcgagaacctgctcgacgccgacgacgacgacgacgccatcgccgccgctctcctctctctccccccccgtctgcctccactcc

SEQ ID NO: 24645 - DNA, 1034 bp, Oryza sativa
  Clone ID: PAT_MRT4530_2960C.1
ttgcgaatttcttcatttaaattttaattaaaaactcatttattgcgtcagccgggagagaggacgcgcggactgggtccacgggagtggggcccacgcgtcagcctctcggtccacggtggaccgggagcacgcggctggcagccgcggggcgcgcccgaaggcggcctcgccggcacggccgacgggagcggcgcgcccgcgccccgatggtcaccgccggcgaccaccggcgcggcggagcggcgcccgagagagcggagaggagagggaagcgaaagggcggtcctcggctcaccccgggactacaacgacgacggaaacggcggccgaagcggaggaaggcggcggcgcggttcgggacggcgaggacgacggtgctccggcgttcggcgggcgaagcggaggggcggacggggtcggcgacaacgcggcgaagccgatggaggtgacgccgagtcaggaggaagcccggagcgacggcggcggcgaaccggaggtcggcggcgacggcggagagagaggagcacggcgcgagcacgaatccgacggaaagagcgagcggcgagcggcggaaacggaagagcggggctcgggggacgattatatagggtcgggagggagagagggtggccggggaagaaagaaaccggccgcggagatctcggccgccattgatgacgccggcgaggattgcgggcgcgattcggacgaatccgagggagagagagaggggaaaacgggggaaacgggagagggaatcacggggagtgatttccccctctttattgcgcgcggggagggcgggatgcggcggattcggcggcggcggcggcgctagggcacgggcgggcggcgggcgcggcgcgaggagggagatgacaggtgggccccacccgtcagcgagggtggcgggcgggcccgcccgtcagcggcgcgcgcgcggggagggagccgatgggccgcgggggagaggagagagggggagggagttgggccgagccggcccaagaaggaaaaggggggggaaagaa

SEQ ID NO: 24646 - DNA, 939 bp, Oryza sativa
  Clone ID: PAT_MRT4530_29610C.1
atggcgccggcgcaatcgatggcggcggaaggcggcggagcagggcggcggcgcaggctacggcgacggagggcggcgtcgcagacggcggcgcaggcttcggcggcggagcagggcggcggcgcaggtgaaggcgacggcggagcagggcggcggcggaggctacgccggccgaaggcggtggcgccggagctcctagcgacggcgcaggcgaccggcggcgagtacgacctggcgcgacggcaaggcgacgatggaatcacctccttcctggcgcgacggcaaggcgatgatggaatcaccttcttccatccccacgctgaagtgtgcttgcggtgcctccgccactgtgcagatttcgaacacaccaaggaatcctcgacgctggtggctacaatgcggcaattcgacctgctgaatgagtatgctgaggagatggttgcgtactgtcacgccggcgagtacgatcatatgcaagaaacaatcgacattcttcgccaatatttagatgatgagaagaatgaaaaagcgaagatttgtgaggtccttgatgcaaaggaaaatgagttgaagtcaacaattgagacactcaaccagtgtaggctggagtgtttagcgatgaagaagcagttggaagaagttaaatttagccgtgctagacttctataccttaccttagtgatcactgtcttatttgcttgcttaatgttttcaggctcaacatatgcatacaacagtatagacatacatgagcaacattactggttcatagcagccttactagcaaaatacttaagagatggggcaggctacattgtcactgcaaataggttactacaagttcacaggcacacgtgcattacaagttcatcacagccattggcaattagcaaaatacttagagaggaggcagctggcattacagtagaagataggtag

SEQ ID NO: 24647 - DNA, 261 bp, Oryza sativa
  Clone ID: PAT_MRT4530_29611C.1
atggggtcctttcgtctttgtagagactttcacaatataccagtggataataccatccaagagagaaggctcataaaaagaagcaggcaacaaaacatcttgatttataggaatcaacgacctcgccactgcaaaggaggaagtcaaatgatttggattcggacaggctgtctcgacagtaagaaatcgacatcatcatctgtctttcatgatggtgggaggcaagatttcgtggtcaagcacaaaccaagcataagtgga

SEQ ID NO: 24648 - DNA, 887 bp, Oryza sativa
  Clone ID: PAT_MRT4530_29612C.1
ggatcaccataaatgaactgtgaggtcagattattctctctgtttttttttactaggatacatcaagtaagaagcttcaggtctactccacattgacatggaagaatccaaccaatgctgagacaacataacatagcatagaaaagcaagttccaaacaaacagcatgaaatttagcgagagatttcgctagcttacatcttggatgtacacatcctctagtagttggataagatccttcgcagactggcctttggcaggttttatttgacctcccccattcaggcagcctgcaagcgaacaattaaggtcatagaatcaagatcctatggctcagaaccatttacttaaagcgggcaagccacactgtatcataaatgggagtacctgaaggacatgccataacttcaataaagtgatattcgcattttcccatcttaatcttcctaataatgtttggaaaattgcatggaattatcagctgagtagatcaactactatttggtccacttcgttttgacatgttacaatctcatctgtgtttcccagtgaggaggtagtatacaaacattaccaagaaaagctggtaaaacctacaatctaacaaaatgcatttgcccgcatgcaaaatctttgatgacgtgtatttcttttctgtgtgttcagtgtttgcttagtgtgggcagggcaccaagatggcacaagcaactgcccacactgggaaatgctttccaccactgtgttatcaccaattctgcaactgcgatgccacgcttttcaccactgggtgatacttcgtgtgtagatacttctttgcgttttctgaaccaggttgcccaagccattcatcatataatcttttcgcaatagggttctcgaaggggttgg

SEQ ID NO: 24649 - DNA, 1659 bp, Oryza sativa
  Clone ID: PAT_MRT4530_29613C.1
aggtctgcttcaagttttcttcctcgagggcaggagtagatcttggatccttcgagtagtaatacacatagtagtaggagtaggtgggctgtagtcatctctgctgccaccgtcgtctcgtgccttgcatgtttccgaatctctctgttactctcctacgcgtttgcttcaagctttgaccgagaagcaccaatccagctacatgttcttgacctgttcttcttcttcctgcctctgtatggtgttttgaatggtcagatttggtcttcgtcatgaacagaagctgagatctttggtgcaggatcctcacctccggttctgaaagaacccctgtttcccagttttgaagatacctgaacaatgaagccacctttggagaggaaccctaccaagaagcgccactcgtggtggtgggatagtcacattagccctaagaactctaaatggcttgcagaaaatcttgaagaaatggacaagcaagtgaaggaaatgctgcagcttattgaggaggatggcgattccttcgcgaagaaagcgcagatgtactaccagaggcgtccaatgctcatcacccatgttgaaaatttctaccggatgtaccgtgctctagctgagcgatacgacaatgtcactggtgaattgcgcaagaacatccctacaaggctgcagtatcagggatccttggcaggttcagactctgagctgcagaggtcaccctcaccatctcctgaaccacagaagtcctggacaagggagcagagcccaagggccgccggtttcgacgtcttcctgtccaacaagagcaatggctcaccctcaccggcctcaaggaaggagcctgaggatttggcttcacagtcagaatctgatgcaaagtctgaagatggtgaggatgatggcattgcctacacattgcaccagagagttcttgagcttgaggatgagctcaacaccgtgaaccagaaactgcacgacgcaaatgaaaaacttgaggttctggaagagaagagcttgaggtgccattgtgattctaaagaaaatggaaacggtgctgatcaaagtgcaataaatgagaagctacagtcttcacaagaggagattaacaatatcaaaaacagccttgaagttttgtcggaagagcactctaggctgttgggacagaacaagaaactggaggctgaaattgtcaatctgaaggaagaaattgcttcagatagacagcaatatgaagagaagctctctcgtagtgatgctgaaattgacaagtgcaggcaagaacttgctgatgcttctgagaagttgctgcaagagaagttgagcaacagttcggtgacagctgagctgcaagaaacgattgaaagcatcaggatcaaacttgaagaagtttctgaggagaaattacttgttgagaacaagtttaagcagctggaggaagcaaactctgaagctgaaaagtacaaccaagaactgtcacatgctaccgagaagctttcagaggagaagttcagacacgaggctgagattcttgcattgaatcaggccattgaaaatctgaaatccaaactggagagcattgctaaggagaaatcgttgcttaaatcatggtttgctgacctagagcaagtcgtggagcgaggaaggagaattttccccgaatag

SEQ ID NO: 24650 - DNA, 1851 bp, Oryza sativa
  Clone ID: PAT_MRT4530_29614C.1
atgcccactaccacccacaccatcaggtacagcacacccaggaagggccatgccaatgctcaccagctgttggccaaattcgaggacctctacggattcatggtggagggcaatgtcgacgacgtcaatgtgctgaacgatgtgagggagaggatgagggagcaagggagggtgtggtgggcgctcgaggccagcaagggcgcaaactggtatctccaaccaaggatctcctccaatggtggcagtgagggggtaatcagcgtcacgtcgctcaagctgtcggtgctcaccaacacgattacactaaggaggctgatcaggaagggtgtgccaccagtgctgaggccgaaggtgtggctgtcagtgtcgggggctgccaagaagcggtcaacggtgcctgagacgtactatgatgagttgatccgggctactgaggggaagaccacgccagccacgctacaaatcgaccatgatctccctcgcacatttccatgtcattcttggctgaacagtgaggaaggtcaggcatctcttcggcgtgtgcttgttggttactcatttcgtgactcagaagttggatattgccagacagaggaagatgcattctggatgcttgctgtactactggaaaatgtacttgtcaatgattgctatactgataatctttctggatgccatgtcgagcagagagttttcaaagacctcctagctaaaaagtgccccaggattgctgctcatcttgaagcaatggggtttgatgtttctcttgttgccacagaatggttcttgtgcctcttctccaagaccttgccttcagagacaaccctccgggtatgggatgttctattcaatgaaggagcaaaagtattgttccatgttgctctggcaattttcaagatgagagaagatgatctactacgtattcaacatattggtgatgtaattgatattttgcagacaactgctcatcatctatacgaccctgatgaactcctcacgttcgcttttgataagattggttcgatgacaacaaacacaatcacaaaggaaaggaaaaagcaagagacggttgtaatggctgagcttgaccaaagaatcagacggttaagttcactcaagatggatggataatgtataagaaagggaaaaatgctctgcagtgttgtagcctttgtaggtttggaaacagtgaaatgggtagtcatttggtacttggcaccagttcagactgcggttcgatgagtgaaatcgtggaagaaccaagaatatgggggagttgcgaaaactgcaatgtgggtttctcatgaacaagtcatattgtgtgtttttgtgtgtgcatcacatcttcatatttgaaagagaattccatgatgccatatgagcagattgtgctaatggtggaaacttgtacaggtttggtgtttgttgaaattcatttggcaacccagcaaggatatatttttggagagcgcttttgcagttttgctttactttttttaagataatgaaaatgtattacatcgccgccggcctctgccataaaaggacacatagccaacaagttgtttaactactccatccgtcccagaatataagaagttttaaagttggacacggttattaaaaaaattggtagaagtaaatggtagagggttgtgattagatgagtagtggaggtaggtagaaaaagtgaatggtggagagttgtgattggttgggaagaaaatgttgatcgagaagttgttatattttgtgacaaatcctttaggctaataattgttgtattttgggacggagggagtaaataatagccaacggtactctctctaagaaaaaaaaaaaaaaaaaaaa

SEQ ID NO: 24651 - DNA, 408 bp, Oryza sativa
  Clone ID: PAT_MRT4530_29615C.1
tcagtaatggacatccctttgcctggcgaaacggacccaggccgacttcctactgaaaaaaaaacttttctcgttaaaggcgccattgacgggctcaagagtcaagagctcgaaacgactcgattcatccatggcgcttttgcctttccgtcgccatcgtcggcggcttgggtgtatggtgacgtatgcgccggcgagctccgcgtgccgtatcaacaccaccttgcagactgctactgtgaagagcgacgtagtgtgctcgtcggaatcgccgtgggacccatcatcgtccgcgtccgggtgggggcgcgcgttggcatgcgctccagatgttcgtcgaaatgccgcgccgcaagtctgcacaggagagacagggtttccaccccgcgtgaggcactgaggcgacat

SEQ ID NO: 24652 - DNA, 330 bp, Oryza sativa
  Clone ID: PAT_MRT4530_29616C.1
acctcctctatcctatgtttatttttgcgatactttgccctagatttgtggacttccagaataggtatttaaaatttatatattgtcattccttgtaaattatgtttagaggctcattaacatttggatgagaactctataacatttgtttatactttgggtaccaaaaacttagatttttaacaagcttcttaacatgttgtgtctgctatttttttcaatgtagtaactgtatacaactttacatatccattctagcttatattcaagtgcattttttaatacatgctgctaattcgtcaactttttctcctaattattacttttaac

SEQ ID NO: 24653 - DNA, 341 bp, Oryza sativa
  Clone ID: PAT_MRT4530_29617C.1
aggccagaaaaaaactttattggccataacaagccttttttaacaaattttcaaacaagttttaatagcgccacgggttgccacaaattattttaggcccgaaaggccttaaaaataaatccattttttacgggaaacaaaacccaaatttccaaaattgcccgacattttatgcaatttcactgggccagcccatggtcaaacaatgggctaaccaagaccccaaaagggggggcaaaactggaacatcatgatccttgcgataagggagaataatatccagtattggtcaaaaccaaaaaatctttggtgattcccaaactagcccgaccccgggggct

SEQ ID NO: 24654 - DNA, 384 bp, Oryza sativa
  Clone ID: PAT_MRT4530_29618C.1
atgccgacgacccgtcaggggagctacggcaagccggccagcagcagccggcggcggcgccggcatcatcagcgtggccgcggcggcttccggctgggcctgctgctccgcctccgcgtgcggctctccggcctcctcggcctgctcgcccggagcgtggaggagctccggtgctgccccggcgtcagcaggatcagctgctcgacggtggcggcggcggcgagatcagcgcgtagcagagcgccgtcgtcgtcgtcgtcggcggcggcggcgctttgcggcgggccgcacggccgccgagccgcgccggcggtgagggaccagagctcgttctacgcggaggccatcgccgactgcctcgagttcatcaagagcagatcataa

SEQ ID NO: 24655 - DNA, 288 bp, Oryza sativa
  Clone ID: PAT_MRT4530_29619C.1
atggctggtcagaccgcagcagagttgccggtcaaaccggccacggctcggtcagaccgccatcggctcggtctgaccggctgcgtctctggcggctctggatcggccatccagaggcgcccaactggcatccagccggccagtcagaccgggctacctggccggtcaaatcggcgccatgcctgcagtcagaccggcgggagaggcccgcgcaggagcctggcgagccgcttctgccgagcggtccagaaattcttcatgtcgttgtccgtcctgccctgcaagtag

SEQ ID NO: 24656 - DNA, 352 bp, Oryza sativa
  Clone ID: PAT_MRT4530_2961C.1
gggcgtgacagctaggaggcgacgacgaaggcccatggcggccggcgacgagatggaaagctcgagctcgaagagagaaaaaccgatccaattcgaactcgaatccaccgatttccaaaccgatttagccgatgtttccaaaggagaaaaggtagaggagatcccgaagatcatttcccctctatcaattcggccggagaaggaaatgggcggtggggcccacctgtcagcgggagagagagagaggagagcggcggctcggactgggccggctgggccgaggagagagagaagggttttgggccaactttcggcccaaagccaaaagaggacttttaaaacctttttcaat

SEQ ID NO: 24657 - DNA, 1140 bp, Oryza sativa
  Clone ID: PAT_MRT4530_29620C.1
atggcaagtgaacataagttggatatgattttgaggcgaatggaggagttcgaacggaggcgggtggaggcagagcagacaaggagagctgatttccaatctctcaagaatagcactgaagactcacattttttagttgggaacaagcagtacaagatgacgcccaccatgtgttcgacaaaatgcttcagccccgatgtcgagcccaatctcactgttgatgtggttgttacatgtgccaccactgctatgacctttgttgatctggtagctgctgaggacgcaatcggtgcaacctacatctacaatcctatacagcccatggtaacgcccgccaagtgtttgacaaattgctccaaccccaatgacatcccagacctcatcgtggtagcagtggttacgtgcacctccacttctctggcctccatggacctagaagttggtgaggacgtcgcctgcaccactgaaattgatggccctgactgtcacaaggagacgcacaccaaatgttcgatgttaggccttgatgtcaagggtggcgcagaccacgtcggggacgtgttcctgacaatgacgggtgtggccaaggctgttccaatatctatcgagtcaattgacatcttctcggcaaggagaatatggtccactaaggctaaaatgaagatgttgaatggttgggattctaaacagtacctgagcattatgcggcctattccaggattgtttgttaaacttatccaagatatatctccaaagagccatcatcaagcttatgtagaagctcaagttgttaaaaattcttggaaaactttggtgaaaataagccatgctgcatattgtgagaccacttcccatgtagcaaagaaatgggctacagacttgaaaggccaaaccaagttggaagatgccaagtttgattggaatacactgggtacattggttcaagaggaacagtatgctaactgtgaacccattggaactcatgcaagttatgttagtgccattagtgtgggatccagatgcgttgaaatgggtcagattggcagctatgctttacaaccagaaaattgtcaattaactacctgcatgagagcacattgcattaagccaagtgattatgagatcatcactgcctattga

SEQ ID NO: 24658 - DNA, 713 bp, Oryza sativa
  Clone ID: PAT_MRT4530_29621C.1
ttccgagatataattgccacgtgagcgccacgtcaatgccacgtgggacgaagaccaagtcaaacaagccacgtaggcgccacatcagccaaaaccgccttcaaccgccgggggaccacgtttacccgtttttccagcagcacttcgaggaaggggcgaacagatcattggccaagacggcgaacggcggcggcagcgacctggaggcctagccaccaatccctactgagttcaccaagcaagttgccatggcaagtgaacataagttggatatgattttgaggcgaatggaggagttcgaacggaggcgggtggaggcagagcagacaaggagagctgatttccaatctctcaagtacaagatgacgcccaccatgtgttcgacaaaatgcttcagccccgatgtcgagcccaatctcactgttgatgtggttgttacatgtgccaccactgctatgacctttgttgatctggtagctgctgaggacgcaatcggtgcaacctacatctacaatcctatacagcccatggtaacgcccgccaagtgtttgacaaattgctccaaccccaatgacatcccagacctcatcgtgggtggcgcagaccacgtcggggacgtgttcctgacaatgacgggtgtggccaaggctgttccaatatctatcgagtcaattgacatcttctcggcaaggttagtcagcgacctcaagtag

SEQ ID NO: 24659 - DNA, 2427 bp, Oryza sativa
  Clone ID: PAT_MRT4530_29622C.1
atggcaagtgaacataagttggatatgattttgaggcgaatggaggagtttgaacgaaggcgggtggaggcagagcagacaaggagagctgatttccaatctctcaaggcagcgttagcatcatggattccccatgtacagaataacactgaagactcacattttttggttggaaacaagcagtacaagatgacgcccactatgtgttcgacagaatgcttcagccccaatgtcgagcccaatctcgctgttgatgtggttgttacgtgtgccaccacttctatgacctctgttgatctggtatctgctgaggacgcaatcggtgcaacctacatctacaatcctgtacagcccatggtaacgcccgccaagtgtttgacaaattgctccaaccccaataacatcccagacctcaccgtggcagcagtggttacgtgcacctccacttctctggcctccatggacctggaagttggtaaggacgtcgcctgcaccactgaaattgatggccctgactgtcacaaggagacgcacaccaaatgttcgatgttaggccttgatgtcaagggtggcgcagaccacgtcgggggcgtgttcctgacaatgtcaggtgtggccaagtctgttccaatatctatcgagtcaattgacatcttctcagcaaggttggtcagcgacctcaagcaggacataccaacacccaccgggtgtttgttgagaatccctcgatatgacagcaagacacagttcaataaaaagctaaggctggaggggattgaattgaagccatggccacctccaacctacagtggagtgattagcggactggagttccgaccaatgccctggccagcattcatctattgttggcttgaagaacatctacttgatccttggccaccaccaactgaatgggctgagttggaactgtggcccccaccacatgagaatgacatcctgcccttattgatcaatggcttcacccatatcctggtggatcgaaaagcaatttcaaaattctggaaagcgatttggagtgagttaggtgaagaatggtcattgtttgttcctaagctatatgagctgcacttgagtggtctccttcagcattcagtaagcatgatatcacaacagcttatgtcaaggaggatatggtccactaaggctaaaatgaagatgttgaatggttgggattctaaacagtacctgagcattatgcggcctattccaggattgtttgttaaacttatccaagatatatctccaaagagccatcatcaagcttatatagaagctcaagttgctaaaaaattcttggaaaactttggtgaagataaggtacactttttggctcaatcaattgctgtacctgacactcaccttggacaaggctgtattggctgttgttggttgtatggcccaaatgcaattagcacattccatttactaatagccatactgcatattgtgagaccactttacatggaaaatattttcactaggacttcacatgtagcaaagaaatgggctaaagacttgaaaggtgttgtgtttgattggaatacactgggtatagtggttcaagaggtcaattacattgaattgatctgtgaccgggattcgtatggttgtagtgttcagaagtgctatcctcagtctattctattcatgcacaatggttggtcttttggtggattgcttgattggaactctaaacaatacaagaacagtatgctaattgtgaacccattggaactcatgcaagtactgttagtgccattagtgtgggatccagatgctgagatgggtcagattggtagctacgctctacaaccagaaaattgtcaattaactacctgcatgagagcacattgcattaagccaagtgattatgagatcatcactgccaaagaaaaccatgctgctgatgctcctagactgcttattgttgtaatggaggatgaaggcaatacagtttggactttagaattttcagtcagtggagtggtacagaagaagcgtgatctttggttgtgtgcatttgctgttaacaaggacatgaaggttgttatgttcctgcagcaatatggttatgcaaacttagtaattgtcaatttattgagtgttccatgggatccaggcggctctcatttggcattagctattaaacaaggaactaggctttcactgtgggctattacaagcattggctggttgtgtttcctatggtcatattggctacattacaagagaaatagtaacaggggagatcaagtgggtgaagcttgcacagcttcgagtcatcggcttggggacaagccgaatttcaagggaaggagaatgttaggagccatgtgggctgcaatatgggctggatcagctactttccaagaagtccaagcaagcccaagaggcaaccatatataa

SEQ ID NO: 24660 - DNA, 157 bp, Oryza sativa
  Clone ID: PAT_MRT4530_29623C.1
tagattgcgagtcaggcacgctctttgggtgggtgttgacgataaattttaggcgcgtttattccaacttaattgcgccaattctaagacataggagctattaataatgcttgaattctaagggtgaattaatagggaatcatgaccttgagagcga

SEQ ID NO: 24661 - DNA, 822 bp, Oryza sativa
  Clone ID: PAT_MRT4530_29624C.1
atgctctcgcgcgacgcggcggagcacgagctcgtcgtctgggaccccatgacggggcgccggtggcggctcgacttcccgggctacctcgaggacttcaactggtccgcgtcggtgctctgcgccgccgacggctgcgaccaccgccactgccacggcgcccccttcctcgtcgcggtcgtgtccaccggccgctactgcaacacctccgcggccatctactcctcggagaccggcgcctggggcgacgcgatcgcgctcgagcgcgagcaccccgatcccgatgatgccgtcaaggtcgggaagcccggcgtccaagtggggaacgcgatctacttcccctgcgtccggagcgcccaaatcctcgagtgcgacatgagcggccacacgctggcgatgttcgactcgccggcggccggccggggatggccggacaacggcctcctcatgacggcggaaagcggcggcggcggcgggctggggttcgctttcgtgcggcggtccatgctccacctctggtcgagggagcccaccggcgacggcgccatggcatggtcgccgctccgaggcatcaacctggagccgctgctcaccgtgctgatccggagaccacctgagcaccactccgtcacgcctaatctggtcggcttcgccgacggcgtcggcgtcatcttcgccgagatcgatggcgacgtcttcaccattgaggtgagctctcgacgaggcaagaaggtgtacaggagggaagacatccacaccatcttcccttacacgagcttctacactcctcgcggtggtatcaactttgatccattgccatga

SEQ ID NO: 24662 - DNA, 555 bp, Oryza sativa
  Clone ID: PAT_MRT4530_29625C.1
atgtcgacctccgccgacctttcaagcgcaccaaccgccgaatatgctgagcatctttctcatcaagttgcggttcctagcataaccgatgagtatcaattttatcttggcccaatcagcaacttagatcccactaagttcatcaatgctgaaaccaatcggatccccttcagatttgccaactccaatttaggtctttggaaaaacaccttcaaatcttggccatctgccgagaaaagttggccagcttggtatatgcgggtatcggctagaaagcgcacccattgggatgaaatcggcatagctcaagctctagccctgaccgcagcagatatggctaaggatgaacccatgatgtcagctgcaacttacttttggtccacagccttaaatgctttcatttttactcaaggaccgatgacccctactcttttggatgttacgatgataattggtctggacgtaacatcatcggctaatccagttagcctgaacatgaagcccaactttgagttcaaaacccggagcattggtggctggtcagggtttgttgca

SEQ ID NO: 24663 - DNA, 520 bp, Oryza sativa
  Clone ID: PAT_MRT4530_29626C.1
gggaggttgtatcgatagccttggagctccaccgcggtggggtcgctctaaactagtggatcccccgggctgcacgaattcaggacgaagcaatggtgtctctgcacattggggctatctcaagtcgtttctcatccatatgctactgaatctggtcccatattagccatgtttggatcaggaaattttcggttggggaatattccaccttctttatcccggaaaagctgcctttcttccggggtttggtggcaaaccctacccaattgaaaggggttcccaccttttgaaattttgaaacccttccccagttgaaatttgggaatttttaccctggttttttttttccgccgaaaaaaaattttttcccccccgaggccttcccctaaactggggaacctgggcccccaaaaaattttcccccccggaaaattttttttccccgggggaaaactcccatccccaaatccccccccggttaatacccctgggccccccccagagggaaaaaacccccctt

SEQ ID NO: 24664 - DNA, 396 bp, Oryza sativa
  Clone ID: PAT_MRT4530_29627C.1
atgtgtcgatcaatcttctgttactcgttcacgatgacctcgaagtccatggccagcttggagcaggaggccaccgactcgtctgaatcaggagcccggcgcggtggcgacatgctggccaccgtgcaggagagcatgcagtccttcctcggtgctgtccgcgacaagatcaccgggcctagcagcggcggcgcatctgcaaaagcaaagggcttcgcggcggacaagacggagggcatgttgtgcgcgctcgccggcttggcgacggcgaggaaaggcgagaggagcgagtccacgtggcagcaaggagatgacgcacggcggtgtggcgcagagaaggctgaggaggcgcggggacaaagcgcgcatcacgagccgtcgtcaaaggagaagtag

SEQ ID NO: 24665 - DNA, 648 bp, Oryza sativa
  Clone ID: PAT_MRT4530_29628C.1
atgccacgagagatttataatgggtgcaacaccaacaccggcacaccgcacggcggcagttggcagcggctcgcgacggccacgcggttgctggctgtgcgggtgggcggcagctggttttacgtggattttgtgacatggcatcagcaatccttaacaactactcctattgaccagatcattgaagagctggaattgctcgtcatcaagaggcaagcagtagaaggtagtactagtactagtactatagatttactagccggcacacgctgcagaaactttttgtacaacatgggcccttttcttcatcaccatcatcgtcgtgttcgactgttcgtgttgtcatcggcggcattgttgctgtcgggttcgaatttgcaatcaacggcacgcctagcaggtgagaaaaaaattcgtcgggtgatctacaccgttaagcttgttgaaacggacggtggagaattaggcgcgattctctgtggccgcaatcaaccaacggagcaaggacagatcggcgaatctctacgggcgtcggcacacggcgatcgtcggcgccgggccgccggtttggcatcgagcaatgctactgctttaccatcctggccactgctgcaaacctgccaggctgccacacgcacgcgtaggcag

SEQ ID NO: 24666 - DNA, 570 bp, Oryza sativa
  Clone ID: PAT_MRT4530_29629C.1
atggcaggcgacggcggcgaggggaaggtggcgtgcgtggcgtggatccagcgctgggaggagaaggcgacacgggtcttcgcggcgtacgggcaggcggggtcaagaggcagggtggcggcggcgcatgccgtgggggctccaaggattggcgacgcagcatgcgacgtgatgagctttcaggacctgctccgcgacatggaggccgacgtgctgcagtcggcgccgccgccggcgcaagaggtggtgcaggccttctctgcgccacaccgccgtgcgtcatctccttgctgccacgtggactcgctcctctcgcctttcctcgccgtcgccaagccggcgagcgcgcacaacatgccctccgtcttgtccgccgcgaagccctttgcttttgcagatgcgccgccgctgctaggcccggtgatcttgtcgcggacagcaccgaggaaggactgcatgctctcctgcacggtggccagcatgtcgccaccgcgccgggctcctgattcagacgagtcggtggcctcctgctccaagctggccatggacttcgaggtcatcgtgaacgag

SEQ ID NO: 24667 - DNA, 1123 bp, Oryza sativa
  Clone ID: PAT_MRT4530_2962C.1
atgagtagagtgtccactagttgaggttttgtttattctagggtgaacaagccgaggggagcgggcgggcggaccgggtccacgggagtggggcccacgcggcagcctcacggtccacggtggaccgggcgcacccggctcacaccggccggcgccgtgggtcccatgcgtcagccgcacccgagggcgcgggcggctgacggccgggccccacatggcagccgaggggcgcgcccgaaggcggccacgccggcacagccgacgggaggcggtgcacccgcgcccctatggtcgccgccggcgaccaccggcgcggcggagcggcgcccgaaagaggggagggaagggggaagcgaatcggcggtccacggctcaccccgggtcgacggcgacgacgggaacggcgaccggagcggaggaaggcggcggcgcggcacgggtcgacggggacggcggcgttccggcggtcggcgaacgaaacggagaggtggacgaggtcggcgaggttgcggcgaacccgaagaaggcgacgccgaagcgggagaaggtccggagcgacgacggcggcggactggagctcggcggcgatggcggagagagagagcgacggcgcgagctcgattccggcagagagagagagcggcgagggtcggaaacggcggagggaggcacggggagtgtttatatagggttgggagggggagagagcggccggatgagggggaaacggccgtggaagatccggccgccattgatgcgccagcgaggtttaggggaaaagatcccgaatgaatccgatggagagagagagggaaaagtggggggaaagagggagggaatcttgattgcacgcggggcggacgggagcggcgggatttgcggcggcggcggcgctagggcacgggcgaggcggcgggagcggcgggaggtaggggatgacgggtgggccccacccgtgagcgagggtggcgggcgggcccgcctgtcagcggcacgcgcgcggggaggaggccggatgggccgcgggggagaggagagagagggagggaggtgggccgagccggcccaagagggggagggggggaaaagactttttagggtttttctttttataaaacctttt

SEQ ID NO: 24668 - DNA, 445 bp, Oryza sativa
  unsure (1)..(445): unsure at all n locations
  Clone ID: PAT_MRT4530_29630C.1
ggccaaaacttttgttcactattatgtatggagttttctgtacatttctacttatatatatacaatgtgaaagatcagcagatcctttaaaaggcggatgccaatcgctgggtgtcgagtgaagattctggagtatctatgagctaagaatgttgaggagagaaactctgctctggaccaatttcctgaacagatgtcctgctccgctctcaagatctctgatgctgcactctaacacctgcaattgctcctcctcgcaaataactactttcttcttgttgaatgccttggaaacaagtgattgtttgggcatttcgatttgctttgacaggagatgcagtgtggactccagcatagaggttgatatatctctagcctccctcaatagcctggccatcctgcaatcctncttttcataagtaaccttctttgcagtcttgaaatg

SEQ ID NO: 24669 - DNA, 1768 bp, Oryza sativa
  Clone ID: PAT_MRT4530_29631C.1
aatatcaactcgaaaaaaattgcaggtcgatcaaacgacctaacccactaaaagaatcatagaaagtattcagtatttctgtttcacaactgaataaattatgctatcgtgtattgtccttaacagaaactttttgtatgaactttggcaccttcaatactcgaagggcaaacaatgagctgaatcagtgagcggtattcacttatctacaccattttccccaagaccttggtggcctcatctcgtagaagcttccaagcggcatccacgtgtcgctcctctgtaagtggcgctcctactgcaaatctcaagacgaacttacctgaaagaaccgtgtgagataggaagatctttccacttgaatttacaccatccatcatatcgtaattcaatttacgtccattttcatggtcagaagtgggaggcacaagtcggaaacaaacaagtgaaaaagtccttggagtcactacctcaaatcttgaatcagataataaaagttgctcaaaatgttcagccaaatgtatgtgtttccggatatagctttgtaggttgtccacaccataaagtctcaagaccatccatagcttaagtgatctaaagcgtcgtccaagtggaatttgccaatctttgaaatcaacaactgaattagcttgggaagccttgtttttgagaaactctggattcgtagacaatgattgtatgagaaaactcctgtccttaacccatagcaaggaacaatcgaagttagtgaggaaccatttgtgggcattcatattaaacgaatcagcttcttccactccattgaggtggtgtcggtactctgggcatatacaagcacttccagcatatgcggcatcaatatggaaccacatgtcattggactttgctatctgtcctagttcaggcagggggtccacagctgatgatgatgttgtacctactgttgcacagatgaaaaatggtatcaaaccagatgacaggtctatggaaagcgcctcactaactgcctcaggggcaacggcgtagttcttattacaatcagcaattacaaccctaacattctctgagaaaattcctgcaatctggcatgccttttgtagagcagaatgtgtctggtcagatgcataaactactaacttttcaagggaatgcttcccatgcttctttaaagctctatctcgtgcagccaatagtgcaacaagaacagcttcactggcagtaccttgtattactcctccaccaagagcagttgacagaaactggcttggaagctggagcatttttgcaaaccagtctaagactataacctctagctcagtagcagcaggagaggttatccaactgaagccaacaatgttaaaggcagcactaagcatctcccccaggaatccagcagtgctgctatttgaaggatagtaagcaaaataatttggactttgccagtgcgttactcctggtattattttttgttgaatatctgccaccaagttaccagcaaagcccctatcaatttcttttttctttctccttgcatcgaagaagcaatctttttgtttcactttgtacctccttttactcttgccgtcaagcttactcccagtgtgccaccgtgacatccggtgcccgcactcccgcagctgctccgcgtccatcggccgcagccactcctcaccgccgccgccgccgccaactccctccatggtgatcgaggagggaggaggaattgggttacagttgcagtccggccgcgggggagaaggaagcgggc

SEQ ID NO: 24670 - DNA, 574 bp, Oryza sativa
  unsure (1)..(574): unsure at all n locations
  Clone ID: PAT_MRT4530_29632C.1
ccctacgcgtccgnaaaaaaaaaaaaaaaaaaaaaaaaaaaaaaaaaaaaaaaaaaaaaaaaaaaaaaaaaaaaaaaaaaaaaaaaaaaaaaaaaaaggggggccgatattaaaggaatccaagtattacgaacgcagtgcttgaaacgtattaagcttttttttgggggtcaccttaaattaaatggggggggggggggggttacaacgtatttgactggggaaatccttggggttacctcaatttaatttgcgtggcgggaaatttccactttcggcggctggggtaataccgggggggcccgaacaaatcgcctttcccaacaattgcgcatcctgaatggccattgggacgcgccttgtagcggcgctttaagcggggcgggtgtgggggttcctcccagggtgaccgttacatttgtgggcgccttagcgccccttcttttggtttttttaccttggtttttggccaggttaattgggtttgcccttaaagctttaaattgggggtttcttttagggttttggatttagggttttacggtttttggaccctaaaaaacttgtttggggt

SEQ ID NO: 24671 - DNA, 1063 bp, Oryza sativa
  Clone ID: PAT_MRT4530_29633C.1
cccccccccccccaagcttccctccctcccttccgcaatctctcctctcctcttggcgacagctaccagtttgcctgtcatccacacggtttaccactatgcaaagtttgccaaatactactcggaagaggaggcagtgacgactgcgatgccatcctcgtcatcgccggatgttctgtacctctggcatctgccggaccctaaggtctgcggtgactcacatggcaagtctcagacagtggtggttctgctcgggtggttgggctcgaggcagaagcacctcaagagatatgccgattggtatacctccaggggttaccatgcagtgaccttcaccctccccatgtctgacattgttagctacaatgttggagggaaggctgagaagaatgtagagatgctctcagaacatctcgctgattgggttagcgaggaggatgggaagaagattgttttccacaccttcagtaacactggctggctttgctatggggtgatactggagaatttacagaggcaggatccttctgcaatggacaaaattaagggctgcgtagtggactcagcgcctgttgctgtccctgattctcaggtttgggcttcaggcttctcagctgctatcatgaaaaaacacagcgtagcggcaaaaggagtgaaaccaaatgatgcaaggcccgatgtcctagttgtggagtctaacaaggatcatcccaagccagcagttagcgaggccattctactttcagcgctggagaagttgttcgatgttgttttaaactacccagccatcaataggaagttgtcgggtgtgatggagctattgtcgtcgaagcagccaaaatgcccacagctgtacatatacagctctgctgacagggtaatcccggccaagtcggtggagtcgttcgtggagagtcaacggcgagccgggcatgaggtgagagcatgcgactttgtgtcgtcgcctcatgtcgaccactaccggagcaatccagagctgtatacctctcagctcactgaattcatggaggactgcgtgttggcccgctgccaggcgaaggag

SEQ ID NO: 24672 - DNA, 1970 bp, Oryza sativa
  unsure (1)..(1970): unsure at all n locations
  Clone ID: PAT_MRT4530_29634C.1
gagaaattgggaggtgaggttaactaggttgaggttgggcgagagagggaggaagggaggcggcgccgncacccccctcnccatccccggccgccgcgcccccccccccccaagcttccctccctcccttccgcaatctctcctctcctcttggcgacagtaccaggaaacaaggaaggagcaacgcaacagtgggagggattaattaagcttaccgggcttggctgtcaatttgacctctccaattccacctccacagggtagggcaacacgaggccggagactaaacaacaatctgattattcacaacaacttctctcctctccatgatggcttcgctccaccgccccctctctgccatggcagttgccgcctttgccgccgtctcctcccttgagctgcctgacaggctgtctcaccacaagttgcctgacacaaccgtggatgccgaagctgtcgtctcgattccagccagcaggcccgatgtatcagcagcaccttctgcttctgccatgtctcgcctgcacttcctgccacgcaatctgcagacttcgcacccggctaaggcgcctcctgcatctttgcctgtcatccacacggtttaccactatgcaaagtttgccaaatactactcggaagaggaggcagtgacgactgcgatgccatcctcgtcatcgccggatgttctgtacctctggcatctgccggaccctaaggtctgcggtgactcacatggcaagtctcagacagtggtggttctgctcgggtggttgggctcgaggcagaagcacctcaagagatatgccgattggtatacctccaggggttaccatgcagtgaccttcaccctccccatgtctgacattgttagctacaatgttggagggaaggctgagaagaatgtagagatgctctcagaacatctcgctgattgggttagcgaggaggatgggaagaagattgttttccacaccttcagtaacactggctggctttgctatggggtgatactggagaatttacagaggcaggatccttctgcaatggacaaaattaagggctgcgtagtggactcagcgcctgttgctgtccctgattctcaggtttgggcttcaggcttctcagctgctatcatgaaaaaacacagcgtagcggcaaaaggagtgaaaccaaatgatgcaaggcccgatgtcctagttgtggagtctaacaaggatcatcccaagccagcagttagcgaggccattctactttcagcgctggagaagttgttcgatgttgttttaaactacccagccatcaataggaagttgtcgggtgtgatggagctattgtcgtcgaagcagccaaaatgcccacagctgtacatatacagctctgctgacagggtaatcccggccaagtcggtggagtcgttcgtggagagtcaacggcgagccgggcatgaggtgagagcatgcgactttgtgtcgtcgcctcatgtcgaccactaccggagcaatccagagctgtatacctctcagctcactgaattcatggaggactgcgtgttggcccgctgccaggcgaaggaggaggaggaggaggtcaccaactaactaagatgatgatggtggtgatgtgcaactgccataaaatagagataggcatacataccaactgttattttcattcattcttcactggcgctcaattgcaaagagaaaaataggtgccaggagaggagtattactagtacttttttttagacaggagagcgagtacactactgttttctttcgtctcgtctcatactctcattggtgggattgactttcaatcaattgtaaacacgttgctagaagaaaacaaaaaggaaaatggtggttactgactcaaaaaaaaaaaaaaaaaaaaaaaaaacaaaccactgtaggattatactcctttggcacagcacgacatgctagtactaattttgtgatgcaatg

SEQ ID NO: 24673 - DNA, 621 bp, Oryza sativa
  Clone ID: PAT_MRT4530_29635C.1
atggcggcagtggatggggacagagcccgagcggcggcggtgatggagggggcagagcccgagcgcccggcgggggatgggagcaaaatccgagcggcagcggcgaatggtggcaccgcggcagtggatggagatggagcccgagtggcggcggcgacggtagatggtggcggcggtgaaagcaagagatgcagaatggaaggaaggagtcgtgcatacagtcgtctcaccgaccgatctagatgcactagacagggcagtgataaaagatactccttcgcccctaaatataaggcaatgttaagcaagtgtggcttgccacacttttgtggcctacaaattataagccacacttgtgacaaagttaggcaaagaattaagcctatgacatatgagggcgagggatctgccaccgaaaccgatgcagtctcatcaatctccggcgataagcaaatccgcattccgcaaagcagcaaaaggataatcagccacgagtatcacactttcagagaaaagcctctgcttgcgttatctaggagtatcacagtttcagagaaagcgagcgagctgctcctcctttcccttccccttcgaggcaagatactcaaagctgcagcctag

SEQ ID NO: 24674 - DNA, 649 bp, Oryza sativa
  Clone ID: PAT_MRT4530_29636C.1
gcatgggcatggcggattcacatctggatggggtgccggcgatgaggaagacgacggtctccagctccagcagcctcaacatcgccttcctactctccatggttgccaccaacctgctgtccctctaccacctctccacccgcgcatccaccgcaccgccgctcctcttgccggcggcgcaccaggcccaggcccaggacgagcagctcctccgccagctgaccgccatccgcgccaccgtctcccaactcaaccacctccgctcctccacgcccccgcctccgccgccgccaccggagctcctcctctactcccgcctggcgcccctcgcctccgcctgctcagcccacccggacctcctccaccgattcatgtcctacacgcccttctccccctgccccgacgacgccctctccctcgccgagcccctcctcctccgcggctgccacccgctgcccaggcgaaggtgcttctcatcatcttcgatctcgtcttctcacaacctgaataatctgcccaccgatcccttctccccgctcccggactccgccgtccgctggcctccgggggccaaatgcacctccttctcctgcctcccgccctcgctcggcttcgacctcgcgcgcacggaggccgggcgcttcctgcg

SEQ ID NO: 24675 - DNA, 443 bp, Oryza sativa
  Clone ID: PAT_MRT4530_29637C.1
acaccaacgataaatcaatcagacgatgtcgaggatcagacttatgtatgaatgggccaagaacacagaattgacacgatgaattgggccaaaattcacaagtctgcggagtggagcaatagaggaggccaccagccgaaattgggctggattgggccagccccgggttcggctgaacctggtggtttggccgaaccaatcctggcgccgttggatccaggttttggcgtggacgtccaggattgcatcccaatgacggttggagggtacttcggacaattccccttccacaaccgtcataactacctttatataaggagctcactctcttcacttcaacacacacctcaagcaatagctctctcatttctctcaagtttagtttagtagtatctagctggtggaatagaaatagaataggagtcgggaacccggaagggctg

SEQ ID NO: 24676 - DNA, 1195 bp, Oryza sativa
  Clone ID: PAT_MRT4530_29638C.1
ggcacgaggcctctcccttcctccacttcacccatctctccccacctccacctccatatctatccacttctcactctctcacactctcactagctaggagcactccactccaatttactactagtatctctctctctccaactaccgccattgccttcttggcaagctcggttttcttgcggagatgaaggggctcagtgggccgaagctgctggtggtccacccgtcgtcgaacaagccgctgggtggcgccgcgtcaccggcgatggcggtccttggctcccgccgccggatgtgggtggtgctgttcttggccgggttcgcctgcgtgtcgctcggcacgatgctgtgcgccgcgcgcgaccacccgccgccgcccgtcgccgcgaggaggctggcggcggcggaggcgcaggcggcgacgctcgcagtgtcggcgcggggtggcggtgcgggtggaggtgggggtgggttgccggggtacgtgttcgacgcgctggtgcagtacgcgtcggcgggggggaactcgacggcgagcatgccgggcggcgacgtgcgcgccatcgcggcggtggtgaagcggcgggcgccgtgcaacttcctggtgttcgggctcggcggggagacgccgctgtggcgggcgctcaaccacggcggccgcaccgtgttcctcgacgagaaccagtactacgtgtcccacctggaggggcggcacccgggcctcgaggcctacgacgtcgtctacaccaccaccgtccgcgagttccccgacctcctcgacgccgcccgcgccgcccgctccgccgagtgccgccccgtccagaacctcctctactccgactgccgcctcgctatcaacgacctccccaaccagctctacgacgtcgcctgggacatcatcctcgtcgacggccctcgcgggtacacggcggcgtcgccggggaggatgtcggcgatattcacggcgggggtgatggcgaggtcgagggcggagaagggggcggagacggacgtgctggtgcacgactacgagagggaggtggagagggcgtgctcgagggagttcctctgcgaggagaatcgcgtggaggaaaccagcaccaggtcgctcgcccacttcgtcgtccccggcggccgcgacctccgccgggaaaccttctgcgccggcggcggcggcagcggcgcctcgacatag

SEQ ID NO: 24677 - DNA, 520 bp, Oryza sativa
  Clone ID: PAT_MRT4530_29639C.1
ccacgcgtccgagcaccgatacgtgactcgattgaacgtgtgcgcacccgaccgggcaggctcaggacctgaagttcatgggggaggactacttatgagacctcccccccggcagcggctaaaacttcgggatcggggtgtggagccagccgaggctgatgccgaccgccctcgaccgggaccttgataccgattccctagatggggaataacggcgccctaaacctcctacccaagaggaagtccctattgccctcgttaccgggaaacctgatgatccccgtggttgcgcaagcgcaaaatgcccaggttaatggcctgtacctctgggactgcgaagggctcctgccgctggggagacggcgcttaccgtggctgggctttggacgctttcactgcaaccagatgtgatgtgtgtaattcatggcgctcatacacctgtgtaagaacgccaccgttgctggcttcctcaaccggacctcctccatacgagccttacttcaaggacatttttgactac

SEQ ID NO: 24678 - DNA, 1134 bp, Oryza sativa
  Clone ID: PAT_MRT4530_2963C.1
atgagtagagtatccactagttggggttttgtttaatctagggtggacaagccgggagagagggcgcgcggaccgggtccacgggagtgggacccacgcggcagcctctcggtccacggtggaccgggtgcacgcggctggcgccgtgggtcccacgcgtcagccgcacccgcgggcgcgagcggctgacggccgggccccacctggcagccgcggggcgcgcccgaaggcggcctcgccggcacggccgacgggaggcggcgcgcccgcgccccgatggtcactgccggcgaccaccggcgcggcggagcggcgcccgagagagaggagagaagagggaagcgaagcggcggtcttcggctcaccccgggtcgacggcggcgacggaaacggcgaccgaagcggaggaaggcggcggcgcggttcgggtcgacgaggacggcggtgctccgcggtcggcgggcgaaacggaggagcggacgaggtcgacaggacgcggcgaagccaaaggaggtgacgccgagacgagaggaggtccggggcgacgacagcggcgaaccggagctcggcggcgacggcggagagagaggacgacggcgcgggctcgattccgaaggggagagtgagcggcgagccgcggaaacggaggagggaggcacggggaacgattaaatagcgtcgggagggggagagagcggccgggcgagggggaaacggccgcgaaagatgcggccgccattgatgccgacgaggtttaggggaaagattccgagcgaatccgagggagagagagagggaaaagtgggggaaaagggagagggaatcacggggaatgattccccccactttattgcgcgcggggacggcgggatgcggcggaatccgcggcggcggcggcggcgctagggcacgggcgggcggcgggagcggcgcgaggatagggatgacaggcgggccccacctgtcagcgagggtggcgggcgggcccgcccgtcagcggcgcgcgcgcggggagaggccgagtgggccgcggggagaggagagggagggggagggacatgggccgagccggcccaagaggggaaggggggaaaaagaagactttttaggatttttctttttataaaatcattt

SEQ ID NO: 24679 - DNA, 167 bp, Oryza sativa
  Clone ID: PAT_MRT4530_29640C.1
agttagacaagtaaatttagctagctgcaaacacagatagatcgtaattatcgcatatggcacatggggaagtacagtgtgggtctagcgagtttagggctgatgcaccttgctgtttgtgaccactagacgctggctgaaacacatgttgttggtgactccaacgg

SEQ ID NO: 24680 - DNA, 1992 bp, Oryza sativa
  Clone ID: PAT_MRT4530_29641C.1
atggtggcgcatgacgttcttccagcgaaagagatcattggatggcgtccagcattcggcgaagcattcccgacccccgatacacatgaagtcgtggtattttctcatttcttctatggtggattttctcttccaacctcaagattcttccggggaatattagagttttatgggatcagattgcaccatctaaaccccaactctatagttcacattgccaacttcattcatgcttgcgaggctttcctggctcttcccgagtactcctgccttcctccagtgtaccaagatacttggaactctcttccaataggagaggaagctgctcaagcacttgctctgatggatcgtatgctgaatctgaaagaacagggcctgcaaggggaacagattactcggcattttatcaagagccaactagccccaatcaaggaaagatctcgcacggcctttgaattcgacggcaagcatgaccccaaccgtgaagatcctgaatctcttgaattcaaggttatgaaggaaagaatgtataaaatcttctcgaacgcaatcgtagtcagctattcgcacttgctaccagtggtgccgtacaatgccttcaatccccctccaccggaatttgccttgatgaagtcagaccctccaatcgctcaacgccgctcatcccgtcaaccgaccgggcaagctagtggggggccaaaaattcggtcggatgtgcaacccaaccccacaaggtcaaccactcagttagactctcggaagaggaaatcggtgctgaccgacgatgagggtcatgacaccaaaaagcccggcaacaaaaaggaaggagccgagagacagccaaagcaagccaacttaaggaagaaaacatccagtcgtccaatgccaaaaataaggaagtcatccagaaagccatatgacatagatccttctagaaaagactccacgccgactggcacgaagactaacccctcagtggggaccgggccgactgccagagatcgcccgagtaaagaccaaccagcatctgtcaatacgcaagctagcaacgagaccccgactggaaaccagtcagccgaagctaacgttaatgctgaacaggagctgccgactaggaaccagttgggcacaactcaagacgaagatatcccggaggcagaggcccaagccggcagccctcctaagaaagatgccaacgctgacccgggatctatgtctcccgttaaagtgcaaggaccctctcgtccccacccagaaataataacaggcccaattattggtgacgaagaagaggtcctccagattcagtcagctgaggattctcgcccacctatattggtcaaatggtgggatgacgatatgcagcctcaatggattgtgatcaacaagcaaaaagaagacgaggagttatatatgttgaaaaaggctctcggccaagccactcgtcttgtaaatatctccgagctggaaaggcgagttaaagctctagaaaaagacaaggctgaactgacgaagcaaagggactcggccctgaaggacgttgaagatcacaaaatcaaatcccaagctcaattcgacgtcttggttaacaaaatcaagagtcttgaaggagctagagatgaggtcgccaacgccgctacaccactcgtccaagccatgttcttcaataacaatggtccgagttcatttgatgctgacgaaatcttcgacaagctgagaattgctccggatacatattttaagaatatcaaggaggctagaaatatgggagcaggcctggcgcttgcgatgaccaaatccttgtacccaaagatagacattgaagccgttgacggttttgcagatgggacaagcgaagaagctgctcttgatctcatcagtgaagctaaaaatgccgccaacaagatagctgctgatgttgttgaaagattccaggagaccgacctcaggccgactgggtcagctaactctgatgatgaaaaaactgactaa

SEQ ID NO: 24681 - DNA, 321 bp, Oryza sativa
  Clone ID: PAT_MRT4530_29642C.1
aaaataagcaaacccatcgattgaaccaacccaaccgcacgcgacgcgacccactccccaccccttccccctcccctccccgccgctgccggcgatcgccggagatgtcatggcttgcccgcttccttcgccaccctcctcaacatccccgaagatgacccaggcgccgacgaccgccccgacttctacgccgccgccgtcgccccggttccctcctggcgcattccggattcggcgcaattcgggccttcccacccttcgcatttgggcgcgggggagggcgtcaaggaggaccttaccgagctgtccaaacccctaccc

SEQ ID NO: 24682 - DNA, 1440 bp, Oryza sativa
  Clone ID: PAT_MRT4530_29643C.1
atggcgacgatgaggaatcggttcgccactcgaatgctcaacctccaccgactcgtcaagtccaatctcgtcgccggcctcctccgccgccgcggccaccgcccgcttgacgcgccgccgccgcggatacgcgtgctcatcgatggcaacgaggctacggtggtcgacgtcgaccggctgctgctcaagccgtcctcgccgtcctccgccaccgcgctgttcccgccattcttcctcctcgccgtcgaggccggcgggttcgtcaggggcctcgtgctgctcgcgctctacccggcgctgcgcctcctgacggcggagggggcccggttgaaggccatggccatggtctgcttccttgggctgcgccgcggcgaggcggccagggccggcagggctgtgctccccaggtatttcttccgggaggcggcggacgtcgaggcgctgatggaggcggcggcttctgcgcgcaaggaggtgatcacggtggtggcggcggcgagcaggttgttcccgacggtgatggtggagacgttcttgaaggagtacgtggggttcgacgcggtggtcgggagggagaggtttagggatgtggtgaacaagacaccgaggaatggagcagggccgcggccattgatcttccacgatggccggctcgcgttcacgccgacgcccgcggcggcgctcgccatgtacgtgtacctcccgttggccgtcgccctctccgtcctccgcatcgccatcttcaccctgctcccacggggcgtgtcgggcgccgcagccgcgctcgccggcgtgaggctgcgcgtcgccggcgcgcctaggcctccagcggcgggcgacgccgccggcggccggctctacgcctgcaaccaccgcacgctgctcgacgcggtcgccgtgtcgggcgcgctcgggaggcccgtgtcctccgtgacctacagcctgggccgcctgtcggagctgctctcgccgatcccgctgctgccgctggcgcgcgagcgcgaggaggaccggcgccgcatggcgtcgctgctgtcgcgcggcgacgtcgtggtgtgccccgaggggacgacgtgccgggagccgtacctgctccggttcagcccgctgttcgccgagctcgccgacgaggtgaaccccgtggccgtgcgcgccgccgcggggatgttctacggcacgtcgacgtcgccgtccgccaagtgcttcgactcggtgttcttcctgatgaacccgtcgccggagtacggcgtgcacttcttggagccggtggccacggccggcgccggcgccggcagcagcatcgaggtggcgaaccgggtgcagagggtgatcgccggcgcgctcgggtacgaggcgacgacactgacgaggaaggccaagtacttgctgcttgccggcaacgaaggtggcgtggcaaccaacagaagcaacaacaagtga

SEQ ID NO: 24683 - DNA, 220 bp, Oryza sativa
  Clone ID: PAT_MRT4530_29644C.1
tataggggttggtcttgccctctacgggccctcctccacatccaactcggggtagaaactaaaggaaacccgaaacatgccttcccgagcaaggaaatctcgaaacccgacgaaacacaatcggactcggacctgtcagtcggaccggccacacaccgccggtccgaccggccgtcaaccggcggtctgaccgcccaacacacggcggtcagaccggccc

SEQ ID NO: 24684 - DNA, 308 bp, Oryza sativa
  unsure (1)..(308): unsure at all n locations
  Clone ID: PAT_MRT4530_29645C.1
aatatccccgtaaaattgttgcatggactctccgactctggcatgtgaaggccgtgaaaaaaacgagngaaaataagtggccacaagtgaggcaggaaaagcagagantggtntgggatccggattttcccantctctttttttctcttntccctctttatatgttttgttttgtttttctattcctaactgccattatgattcctgagtttttttttctccttcccaactgttgttccgaagttttacagtgtatctcgcgacatattatatgttcatcttctatcttataccaaaaaaaaaaaaaa

SEQ ID NO: 24685 - DNA, 1212 bp, Oryza sativa
  Clone ID: PAT_MRT4530_29646C.1
atgaggttgggcggcgaagggatgaggtcgtcggaatccagtaggccagtagtcgtaggccggagagacaaaacaaagatgggcggttgcccctccctcctcgaccaccgctggattttctcatcccagacgtcgcaattatttcactttcccatgacgtggatcctccgcggcatcccccgccgtcgatccggcatcggacgggccgcaccccgcggggccgcgtggatcccacacgaatacctaccggtgccacggccaggtcgggcccacgtgccagcttcccctccgcgggacgccagcgcgagcggctttagagcggcgcgggggggtgggccccacaccgggatagcaatcgtggccgtcaacggaacgggggaagaagggctgcagcgagcgacgaggggcatcgccgcctccgccgccgccgcgcgcgacgggttatcccgtccccgatccgatcgtcgccggggctcctcctcctccaccctcgccgcgggcaatatttggaaccccccagggaaagtatctctcaccgccgatcgcctctcatgccgtgctgagtggagcgcctaccgaatccctacccccacccgccgccgccgcagcagctcgtgccgtatcctgtttacagcggtttgtgggtgatggtggacgaggccgaccccgacgagcggggcaacgggggggtgcggacgacgccggctgtggcggtggcgcccgggaccgccatgaagcctggacgccgcctcagcgtggaagaggccggggaacgggatggccgtcgctgcccgggctggcgtctccgccgccgccatcatggacgccgactcatggccggcgacgacgctgacgccgacgccgatgccgcccaaggcatcgcccaaggtggctcctctaccgccacccgctgaggcggtgatcccaccgatctccttggggaattccggcgctccggatgctaatcctgatcacgaagcaccggtgcggaatccgccggctaggcgtgccctggtgatgcctgtgggggatgggctggacaagcgtgcccctggctcagagccatccccagtctacacccctaatgccaggagcaatggaggcgctaggcgggcccctcggggcacagatcaataacagaatggtcgatatggttcccatccccatagccgaggtagtggctattgggggggggggaacaggaggggcaat

SEQ ID NO: 24686 - DNA, 1907 bp, Oryza sativa
  Clone ID: PAT_MRT4530_29647C.1
atgggggtgacgaaggcggaggcggttgccggcgacggcgggaaggtggtggacgacatcgaggcgctcgccgatctcagaaaggagccagcatggaaaaggtttttgtcccacattggaccaggctttatgcttctttgggtgattttgattggcctgatctttgcactgattatacaatcattatcggctaatcttggagtggtgacagggcgccatcttgctgagctgtgcaagactgaatatccagtatgggtgaaaacctgcttatggctgctagcagaactagctgtgattgcttccgatattccagaagttataggtacaggatttgctttcaaccttttgttccacataccagtgtggaccggggttctcattgctggctctagcacgcttcttcttcttggactgcaaagatatggggtaaggaaactggaggttgtggtcgcgctattggtgtttgtcatggcagggtgcttcttcgtggagatgagcatagtcaagcctccggttaatgaggtccttcaaggattattcatccccaggctcagtgggcccggtgccacaggagactccattgcccttcttggggctcttgtaatgccgcacaatctattcttgcactctgccctggtgctgtcgaggaatacacccgcatcagcaaaaggaatgaaggatgtctgtaggttcttcctctttgagagtgggatagctcttttcgtggctctgcttgtcaacattgcaatcatctctgtctccggcactgtatgtaatgcaaccaacctttcaccagaagatgctgtaaaatgcagcgaccttacattggactcctcatccttcctcctcaggaatgtgctaggaaagtcaagtgcgacagtgtacggtgtagcactcttggcttctggacagagctcgaccattactggcacttatgctgggcaatatgttatgcaggggttcctagacatcaaaatgaaacagtggcttcggaacctgatgacacgcagcattgccattgtgcctagcttaatcgtctccatcattggagggtctagtggcgccggtcgtctcatcgtcattgcatcgatgattctatcctttgagctaccatttgctctgatccctcttctcaagttcagcagcagcagcaacaagatgggtgaaaacaagaactccatctatattgttggattctcctgggtgctggggttcgtcatcatcgggataaacatctacttcctcagcacaaagctggtcggctggatcctccacaacgcgctcccgacattcgccaacgtgctcatcggcatcgtgctgttcccgctcatgctgctctacgtcgtcgccgtgatctacctgacgttcaggaaggacaccgtcaagttcgtgtctcgtcgtgagctgcaggccggcgacgacaccgagaaagcacaggtagccacctgcgtcgccgacgagcacagcaaagagccacccgtgtagtacccttccagaccggttaccggtgttggctggtttttattggatagatgtttaggtccaattttttttatataaaaaatccaatagatgtttaggtccaaatttttgaattcaaaaaccggttagcagtgataaccggctgaaattttggcccatgggagtagattgttgctttttttcttagtgattagttattggcagattggcagaatgttgtagctaggcaatctaattgtatggttagatatttagtcataaatccaagagtgagttttcttggatgcgaggacaaggacaatctaattgtatggttagatatttagtcataaatccaagagtgagttttcttggatgcgaggacaaggacaaatataaatgtaaataaatgcagttaaagtaacaccttgctcaaatatcaatgt

SEQ ID NO: 24687 - DNA, 2004 bp, Oryza sativa
  Clone ID: PAT_MRT4530_29648C.1
gaattccggtcggggttcgcccggcgcagttgttgagaggcaaggcaaactcaggcgactgagctaaagaagccgcactagtatgggggtgacgaaggcggaggcggttgccgcgacggggaaggtggtggacgacatcgaggcgctcgccgatctcagaaaggagccagcatggaaaaagtttttgtcccacattggaccaggctttatggtctgtttggcttacctcgatcctggaaatatggagactgatctacaagctggtgccaatcacaaatatgagcttctttgggtgattttgattggcctgatctttgcactgattatacaatcattatcggctaatcttggagtggtgacagggcgccatcttgctgagctgtgcaagactgaatatccagtatgggtgaaaacctgcttatggctgctagcagaactagctgtgattgcttccgatattccagaagttataggtacaggatttgctttcaaccttttgttccacataccagtgtggaccggggttctcattgctggctctagcacgcttcttcttcttggactgcaaagatatggggtaaggaaactggaggttgtggtcgcgctattggtgtttgtcatggcagggtgcttcttcgtggagatgagcatagtcaagcctccggttaatgaggtccttcaaggattattcatccccaggctcagtgggcccggtgccacaggagactccattgcccttcttggggctcttgtaatgccgcacaatctattcttgcactctgccctggtgctgtcgaggaatacacccgcatcagcaaaaggaatgaaggatgcctgtaggttcttcctctttgagagtgggatagctcttttcgtggctctgcttgtcaacattgcaatcatctctgtctccggcactgtatgtaatgcaaccaacctttcaccagaagatgctgtaaaatgcagcgaccttacattggactcctcatccttcctcctcaggaatgtgctaggaaagtctagtgcgacagtgtacggtgtagcactcttggcttctggacagagctcgaccattactggcacttatgctgggcaatatgttatgcaggggttcctagacatcaaaatgaaacagtggcttcggaacctgatgacacgcagcattgccattgtgcctagcttaatcgtctccatcattggagggtctagtggcgccggtcgtctcatcgtcattgcatcgatgattctatcctttgagctaccatttgctctgatccctcttctcaagttcagcagcagcagcaacaagatgggtgaaaacaagaactccatctatattgttggattctcctgggtgctggggttcgtcatcatcgggataaacatctacttcctcagcacaaagctggtcggctggatcctccacaacgcgctcccgacattcgccaacgtgctcatcggcatcgtgctgttcccgctcatgctgctctacgtcgtcgccgtgatctacctgacgttcaggaaggacaccgtcaagttcgtgtctcgtcgtgagctgcaggccggcgacgacaccgagaaagcacaggtagccacctgcgtcgccgacgaggacagcaaagagccacccgtgtagtacccttccagaccggttaccggtgttggctggtttttattggatagatgtttaggtccaattttttttatataaaaaatccaatagatgtttaggtccaaaattttgaattcaaaaaccggttagcagtgataaccggctgaaattttggcccatgggagtagattgttgctttttttcttagtgattagttattggcagattggcagaatgttgtagctaggcaatctaattgtatggttagatatttagtcataaatccaagagtgagttttcttggatgcgaggacaaggacaaatataaatgtaaataaatgcagttaaagtaacaccttgctccttgtggacatcaaaaaaaaaaaaaaaaa

SEQ ID NO: 24688 - DNA, 281 bp, Oryza sativa
  Clone ID: PAT_MRT4530_29649C.1
aattaaggagtggggtacaacaaaaacatagcttctaatattcgaaccatgttacatttcaaaaaagttgttctgttttcacactttattccatatacttttctctcaaggtccttttattttctttgccacacttttcactttacactttgaacgaggtctaaccattcttttaacatgcatatttacgttctttcaaactcatgcttcacactcacaccggggcaaaaatattacttttcgccttaattgccatattgtaactctttacacacctccca

SEQ ID NO: 24689 - DNA, 392 bp, Oryza sativa
  Clone ID: PAT_MRT4530_2964C.1
gggggggttaccgaatttttttttggttttaaagcaaggaaaaccccccgggaaaaaaaggaccccttcaacaggggggggcaaacccccaggttaaaaaaacaacaacccaaaaaccttctcaaaccccccttttatggatttccaccaccccacaggggtttaaagaaacccaaaaatcccatttgggaaacaaaccccccccttttaaccaaaccctttttacaaatctaacaaaaaaaagaaccctttaacgtgacaatggttcaaacccccttgaaaaacatatttgaagggaaaacccccgacccggggccttaaaccaacccagggggggggagaagctgtctttaaaaacaatctataccttttccttgggaaaaggaatggcg

SEQ ID NO: 24690 - DNA, 2603 bp, Oryza sativa
  unsure (1)..(2603): unsure at all n locations
  Clone ID: PAT_MRT4530_29650C.1
gcacgaggagagaactagtctcgagattttttttttttttttttgatgttaaaaattattaataagcgaacaagtatataaaatacaatatgaatattacaagttattgcaaaatttaaaattatgttgttattttaatatatttgaataatatattaaaaaaacatatatgctattatatgagagaaaatataatgatgctagccgcacaatctaggcgtgttaccatactagttgaagagaaaattaagtgcaagccgcagttggtgcggaaaaaaagagcctcttattcgtctgcacaattacaggttgcaaattggattgctgctatgcacttgtattacagtattcactccactggtaaacacagcaaactctcatctctctccatgacgccgcaaagcatccgtgccaataggacgggtccctcgggcaaacgcaactggcaaacccgtagggccgcgagcagcgaactcgatcgatcacaccagctttagcgcggctcccgccgtttccggccaagtgccccgctcgccggatttccagaaagggaaccagcagcacgtacgccgcggatcaccccaatattactcaccggctcaccgcgagacgagcaaccacaagaagaaaaaatctgtactactagcgcgtagtagtgtagtgtagtgtagcggcgtggtcggccaagcacgtgcagggtggagaagtgcgtcttgttcttggagtgtggtaaaaaaaaatcctttgcttctttttgtgtgtgttgagttttgttgggggagggaggtgttggatcgcggaggcacggcgcatgcacgcgcatcagtcgagggggtagcatgtgtcatcgccgcccgtgttccagaggaagtgcgcgtaggctgccgcgtggtgcgagttgctgggttcggcggcgatggcctcctggtacgtctcctccgcggccgcgaggtcattgcgcgctttccacaggaaagtcgcgtaccgacccatcgcctccgcgtccgccggctccgcgcgcaccggccgcttgaagtagtgctccgcccgatcgtggtcgcgctgcaccgtgtacaggaactgggcaaagttggacagcagcagcgagttgtctggctcctcggacacggctcgctcgtaccgctcctccgtcgccgcgaactccgccgtgtcctccgtgtccagcttggcctccaccggcgccacgagctgccccagtgtgtccgggtccatcagcgcctcggcgcgaacgctcgcctgcatcctggtagcctcatcggctatccttttccagatgaccagttcgtcctctgtctcctccacggccattgcttctgacacgggcacggcctcctccgcgccagctcccggcgtaccctgtgacgcatcctgcggcaacaccgcgccgctttgccgatttgaccactcgtccgagcgaccgtcgccggttgccccggcgaccggccgcaccttgccgccgccgccgctgttgccacccaccgaggccgttcggccgatggacaacgtcttgagcgaggcatggtcgaaccgctggtgggaatgagactgctccgcgtgctgggtgtcgaccatcgccacagtcgccgcggggggctggggaggcgggagcgtggcggcggccgcgacgctgtcgcccatggagtagacggtgaagttggcgagcagaagcatcacggagaccatgagggcgggggtgccggagaagatgtgctggaagagccacacgaaggaggcgtgcatctcggcgtggacgcgcgcgagcacgcgctgcaggtcctcgtagaagagcgcctgccgcatctgcagcgtgaagctctgcagctcccggatgatgagcaccatcgacgagaacgcgcgccccaccgcgccgcgcgcggactcgccggcgcagtcgatcagccgctcgtcccaccggccctgctgctgctgctgctgcttcttccgcttgagcatccgcagcgacagcggcaaccccacgctgctcgcgctccgctccacgctcgccggccacccgcagccagcggcgccagggtgcagccccaccgccagctcctgaatcctccgcaagaactcctcgtcgtccccgccgtcgctcccgatgctgtcaatgctagcgctgagagcgcgccttgccatctggtgcccgccggtgcgccggcgggtcataccgacgctccagctagccagcgacgactgccctctcgacagcctgacacctccaagaacggcnctattgccgcgacgtcgtcgcggcggcagacgacgaaggcgacagcgacgacgacgacgaacgttcgtgacggcgcatggcgacgacgccacggccgcgacctggatgcccatgggtcgcagcgaccaccctcccaggccacccaccggagcgacggttgggaaatggcccacacagctccacaaccgtgggaggctggctaaatgcaagggggtggcaaaggaagaggaagagggggagggggaaacgagcggtggccttatttcagatcacgggaggcgtgtcctgtcaaccacccccacagcagctcgtgaagatctagcactcctgtactgcgtcctcagcccgggat

SEQ ID NO: 24691 - DNA, 523 bp, Oryza sativa
  Clone ID: PAT_MRT4530_29651C.1
gaaccagctatgagcgcagaagggatgctccttcctttgtagccgaatatggtggcgccggctacgaaggcgccgacggccccgttgacgtagtcgttcttcttgcgctggctcagcacgagctgctcgacgccgatgtagaggcccccgacggcggcgaacgtggccccgtagctgccgcacatcttgagcgtccggatgagccccgggagcgcgacgtggcgctcgacccggggcacgtcgtgccatgtcgcgacgaccgtgccccagatggtccccgcggccagccccgtcgccgcggccttcaccgtcttcgtcaccggcgtgtcctcctccaaccccatccctcccttcccaacaccaacccgcccgctcctctcctctccactccctggggggaaccctccgcggcgcttgccggcggcgaaggatcaaaaaattgttgggattttcgggggcggaggtagtgaggtaaaaatgggggaatcgcggcgtggttggagaggagaggagagagggggtg

SEQ ID NO: 24692 - DNA, 2148 bp, Oryza sativa
  Clone ID: PAT_MRT4530_29652C.1
ttttttttttttttttaggaaataattattgtgatttatgatcatgagaaagcaagcaaaaccagatgtttcaagcatcgtgaaggcgtttattgtgatcgatgatcacgataaagcaagcaaaaatatttattccgagactgttgtataggtctctctcgagcacaacaatgccaaggatttgcaaaggagctagtacatcaacaaaacagacatgaaagtaagcatcagcttcaaaattcaccgagctgacggttttgcaggacttgggctacacgtacagaacttcagtcaatgagcgggcttattctcgactgtgtagggatagtactctttgccattgtccactctggtagtgttgccgccaacgtccagcgcagcagatgtaaaagccaggcaagaaccagctatgagcgcagaagggatgctccttcctttgtagccgaatatggtggcgccggcgacgaaggcgccgacggccccgttgacgtagtcgttcttcttgcgctggctcagcacgagctgctcgacgccgatgtagaggcccccgacggcggcgaacgtggccccgtagctgccgcacatcttgagcgtccggatgagccccgggagcgcgacgtggcgctcgacccggggcacgtcgtgccatgtcgcgacgaccgtgccccagatggtccccgcggccagccccgtcgccgcggccttcaccgtcttcgtcaccggcgtgtcctcctccaaccccatccctcccttcccaacaccaacccgcccgctcctctcctctccactccctggggggaaccctccgcggcgcttgccggcggcgaaggatctaaaaatttgttggatttggggggggccctgcgcggcgcttgcaggcgggggaggctcaaaaaattgttgggattttcgggggcggaggtagtgaggtaaaaatgggggaatcgcggcgtggttggagaggagaggagagagggggtgggaggggggacggggcggcgtggtctcactcggctcggcctcggcggcgctcgcggctcgcccgctcgcccgctcggccgcaacgttggcgcgggcttgagccttgggcctcctcccggtggagacgcagacgcgggaggtggcggtggcggcccccggcagccgaagtcgccagcgatccatcatgatgtcgcgcccgcgaccgcgcgacagcatcacccagacacacaccccgtattccccgttccggctgccaccgctcgcggccacgtcccgcgccgcgccgcgcacgtcccgcgggcggggcatggtgatctcgccgtggttttcccaaccgtctacgcggcgcggtggcgtccgtggcgtgcggcctctcttccagtcacgagcggtaaaaagtggcgcggctttgccgaaaaggccccagccgcttggcttgcctgccgcccgctcagctcccgcgtcccgaccggagacgacacgagggcgggtcaaggcgaccagacgaatcggcgcctctgatgaatcgcgctctgctttcctctgcgctgattctacagtgaaaccagcagcagatgcagtggtgttcttgtctagccttgatgccttcagcttaacatcatcaccttctacttcttcgccatcaattacattgtcttccatatagctggcgtccactccaagcagcatcatgcatcccatcttttgtggccttcccctcctctttcttgcaggcatagcttcttcagcgccgcttcctttgtcttcatggctccggacaatcgccagcttctttcctctgcctcttcctctacccatctatccaacttagcagtgacaagatttattcagacaatcactgaagctgcaggctctactgaagttgctctatgtttttctctagttgctatttggaaggaaagtactcaatatttccccgagatacctcgcgatggcgacaatccaatcaagaagataggctacgcatccgccctcgtccccggcctccactccaagcagcatcatgcatcccatttcttcaagtttggtagccaaaaaagatggaatttttcgcaggtgctacaggaaaagaaacgctgggtatccatggatcggcggtaatcttcgcttcgcgatgccagaagtacccgcggatcgggaggtttc

SEQ ID NO: 24693 - DNA, 324 bp, Oryza sativa
  Clone ID: PAT_MRT4530_29653C.1
tcagagcccccattagttggtgtgtgatttggccgggtcgattagatctaccacttcaatcgaaactattccttgtgcttaatcacctattcgcaatatttagattgcatcttatcttgttcttgcagtgttttctcgtttacattgcagggatcatcaaccgcgcgtcacggttggtacgacatcgtttgtggtgtagcgattgcacggcgtcctggacttgttctttttggtagctatgtcgcaaatgtcgcactcgatcaaagcgagagttatcccctcaccagaagatcgggccacgagagagagcgtcatcagtagcta

SEQ ID NO: 24694 - DNA, 2370 bp, Oryza sativa
  Clone ID: PAT_MRT4530_29654C.1
atgggcagcggtggtgactatgatacgtgcatagatatgatcttcgccaactatgtccaaaacctgacatcatcctatgccaacaagagcaatgagacctccattgtggccaccttgtccatcatgttcatcctcgcctctctcttcttcatcctcagcctcttcagccgcttgtccgacgtgagcgcggtgctcaaccccaccgtccgcttgatcctctccagctcactctccctcttcctccccgtcatgtcctacctcttctcggaggccaagaacggcgatgccaccgcgggtagttccggccagcaaacggagctctcgttgcgggcacggacgatcctcacgtggatgcttcttgtggagctcctccgcaacaaggtggagactgctcttgtcagcgacactggagcgaaaggatacttgagcaccattcagcaagctacccgcgttgcttggcagggctacctcgtcttcttcaacctcaagagctctggccagagggtagtctttggcttcttatgggtgatcgctgcttcccagctatttcagaggatcaccataaatgaggttctcaagtcctcctatgcctatggcaagaacgcccaacgtctccactcctacatggctcacatactgctacatcgtcgtcgtcaagattccgatgaaggaggaggaggagcccagctgttgaagctttgcgactacgccgtgatgggagaagaagagttggagatggaggctgggccgccggaggacagcgagcttaatatccagaagatcatctctgcaagaaatactacggatcatgtcatcaccgttggcaagatatggtccctggcggatgtgagagactctcctctccagaaagaccataggctcaagaggctgtgcctctcctttgcactccacaagctgctgcgtcgtcgctttgagaatctccgcttcaccgatgcggaggttcataactgccgcgacctcatcttcagaggtctatgccgagacggcacggacaaggaagccatcgcggttgcactgttccaagtgctaagggacgagatacttttcgtcaatgagtactacaactctgtcctccccgttgtgctctcaagccccttcttcctcctagccaactacttcatgtctcccatcctcgtattggcattcttcctcctcaccttcattgcttgcaacaatggggactggtcctacgcgttgcagagtatcacgagtgacaacctacttctacatattggcatcatcaagacggttaaatgccttttccactacattagtacaccgccagcactctacaccacggtggaccttgccatcacctttcttctagtgctggctaacatctatgaggagatttgggaattcattgtctgcatcctctctaactggttcatggtgtctttgatccacctctacgctaggaacccacagaggagccgtctaagccccactttcaaggccatcatccggaggatcatatgggttcggaacctaatgagccaacctaggctccagttcaaccagttgtccatgctaggaggaggttttctcccttgccgtcatcctttcttgctgcaacccaagattgtacccaaggaggtgaagaagtccatcatggagtatctgatgaaccacattgacggccatgccccactaagcaacggatggtccacgatgcaagcaaactaccccgagtaccactctaagctctcatggatgtgccacaacgacaacgtcacggaggtgatgctcacttggcacatcgccaccaccatattggaggccaaattccccaagcagacaggagcaacagcttcttctcaagctcaccgcacggtggcgacgacactgtccaagtactgcgcatacctggtggccttcaagccagagctactccccagcaacctagatgggacacagaaaatgtatggagccctgaagaaggagctgaaggcgacactcggatgctggcgttactgcttcccaaaggagattgtgggacgacgagttgcagtcgagaaattgatgcaagaagaatcccaagggaagctagaggggaagatgccattgatgtgcaagggtgccagggctggaaggattctcttcgagaaggctacgctcgtcgacaacgaggagcccgtgtgggaggtactggctcacatctggacggagctcattgtgttcatagcgccatcaggcgacgatgaggtgcaggtcaaggcacatagggatgcattggggcaagatgctggggagttcatctctgtgctctgggcactcactacgcatacaggtgtgacacgcccgtgcgttaagccgtgggcattaatcccggtcgaaaatctagcttga

SEQ ID NO: 24695 - DNA, 558 bp, Oryza sativa
  Clone ID: PAT_MRT4530_29655C.1
atggcattgcagctcgctgcccaagcgctctccgcgatcctcctgtccggcgcccagccgagcagcagacgcgcgacaccgcccggaaacggccaacggagtcggagaccgccagccaccggcaggcggcggctggcggcgtcgctcctcgcgtcccagctgctgctgctgcccgcggcggcgaccagcgtcgccggcgcgttcgagttcgacctgaggatcactgtgccggagcagtccggcgaggaggccgaggccgtcgtgaagctccacgcgaggaacctggtgcgcgtcaaggggctcatcgacgccaggtcgtggagggagctgcaggcggcgctccggtccagcgccgccaacctcaagcaggacctctacgccatcatccaggcgagcccggcgagccggcggccggagctccggcggctctactccgacctcttcaacagcgtcaccagcctagattatgcggccagggacaaggatgagctccgagttcaggaatactacagcaacatgatcacaagcctcgacgagattttttccaagatcatgtag

SEQ ID NO: 24696 - DNA, 333 bp, Oryza sativa
  Clone ID: PAT_MRT4530_29656C.1
aagcttcggcataggtattgtaggtcagtttgttatgtgaattggtacgattacgtgacttcgacatctgatggggagttgactaaaaacttttgaattgtcagtgagtgaatgagcaacttaatgatattttttaaaaacccgaagtgttaatggattatctaaagtataagtgcgtaaataacacgtaaggactgcttggaaagtaaggtcctaaggtctggagtaggtgagtttgaaataaattaaaagtggaaagataaatgaaggggcaagcaatactcttagagagaagaggttgatatttgtttgggtgtggaaaaaaaaaagctt

SEQ ID NO: 24697 - DNA, 2187 bp, Oryza sativa
  Clone ID: PAT_MRT4530_29657C.1
atgcctctccttcatcatgtcctccttggcttcctcctcatcctcctctacctacggactccgacgagctctaccgccacggacaccgtgtctcccggccacgcactcgtcggcagcgacaggcttgtctccaacaacgggaagttcgcgctcggcttcttcaagccaggcaatgagtcctacaccaaccacaattcctaccttggcatatggttcaacaaggtccccaagctaaccccactgtggactgccaacggtaataacccggtggtggaccccacttcaccggagctcgcaatatccggtgatggaaacttggccatcttggatcatgccaccaagtcgatcatatggtccacccatgccaacatcactgccaaggacaccattgccatactgttgaacaacgggaatcttgtcctacgaagctcctcaaattcatccataatcttctggcagagcttcgactacccaacagatacacttttccccagtgcgaagattggctgggacaaggtcaccggcctgaaccgtcgtcttgtttctaggaagaactcgattgatcaagctcctggtatatactccttggagttagggcccaatggggatggtcatctgctatggaactcaaccatagcgtattggtccagcggacagtggaacggccgatattttggcctaacaccggagatgacaggcgctctcatgccgaatttcacatttttccacaatgaccaagaggcttacttcatatacacctgggataatgagacggcgatcatgcacgccggaatagatgtcttcggcagaggtttggtggccacatggttggaggaatcgcaggactggttgatctattacaggcagcctgaagttcattgtgatgtgtatgcaatctgtggaccattcacaatctgcgacgacaataaggatccgttctgcgactgtatgaagggcttctctgtaagatcaccaaaggactgggagcttgacaatcgaacaggagggtgcatcaggaatactccgttaagttgtggcagtagaacggacagaacaggcctcacagataaattctaccctgtgcaaagagcttctggtgccaccctgaagacttccggcgtgcgcacaggggcagcggtgcagaggagccccgcgtggttccacctcctctcgcacgacaccgccggcggtggtggcagccgcgacgacggctacaggcgtgcgtggagccggctgttgaggaggctggtgcaggagagcatgagcttctgtagcctcagcatcagcaggcacgggcaccggagtgggtatcctgtatttaagggctacctaagcaactctaccatagcagtgaaaaggcttgatggtgcccgtcaaggagagaagcagttcagggctgaagtgaattcaattggaatcatccaacgtattaacttagttaaattggtcgggttttgttgcgaaggtgataataggttacttgtgtatgaatacatgccaaacagctcccttgatgtgtgtttattcaaggctaatgatatagttttggattggactactagatatcaaatagctattggagttgccagaggccttgcctacttgcatactagttgtcgggattgcatcatacattgtgacatcaagccagagaatatacttctggatgcatcttatgtgcctaaaattgcagattttggaatggcaaagattttggggagagaatttagccgtgctatgactacaatgagaggaacttttggatatctggctcctgaatggattagtggaacagttgttacatctaaagtagatgtttacagctacgggatggtcttttttgagatcatatcgggaagaaggaactcaagtcatgaaaatttcagggatggtgattattcattcttttttcccatgcaagctgcacgcaagcttctcaatggagacgttggaagtcttgtggatgctagtttggaaggcggtgtgaacctcgttgaggttgaaagagcttgcaaaattgcatgctggtgtattcaagataacgaatttgatcgaccaacaatgggcgaggtggtacagtctcttgagggtctacttgaactcgacatgcctccattgccaagactactaaatgctatcacaggaggctcacatccagtgacaccacaatatttttattcactataa

SEQ ID NO: 24698 - DNA, 2484 bp, Oryza sativa
  Clone ID: PAT_MRT4530_29658C.1
atgcctctccttcatcatgtcctccttggcttcctcctcatcctcctctacctacggactccgacgagctctaccgccacggacaccgtgtctcccggccacgcactcgtcggcagcgacaggcttgtctccaacaacgggaagttcgcgctcggcttcttcaagccaggcaatgagtcctacaccaaccacaattcctaccttggcatatggttcaacaaggtccccaagctaaccccactgtggactgccaacggtaataacccggtggtggaccccacttcaccggagctcgcaatatccggtgatggaaacttggccatcttggatcatgccaccaagtcgatcatatggtccacccatgccaacatcactgccaaggacaccattgccatactgttgaacaacgggaatcttgtcctacgaagctcctcaaattcatccataatcttctggcagagcttcgactacccaacagatacacttttccccagtgcgaagattggctgggacaaggtcaccggcctgaaccgtcgtcttgtttctaggaagaactcgattgatcaagctcctggtatatactccttggagttagggcccaatggggatggtcatctgctatggaactcaaccatagcgtattggtccagcggacagtggaacggccgatattttggcctaacaccggagatgacaggcgctctcatgccgaatttcacatttttccacaatgaccaagaggcttacttcatatacacctgggataatgagacggcgatcatgcacgccggaatagatgtcttcggcagaggtttggtggccacatggttggaggaatcgcaggactggttgatctattacaggcagcctgaagttcattgtgatgtgtatgcaatctgtggaccattcacaatctgcgacgacaataaggatccgttctgcgactgtatgaagggcttctctgtaagatcaccaaaggactgggagcttgacaatcgaacaggagggtgcatcaggaatactccgttaagttgtggcagtagaacggacagaacaggcctcacagataaattctaccctgtgcaaagtattaggttgcctcacagtgccgaaaatgtgaaggttgctaccagtgcagatgaatgctcacaggcatgcttgagcaactgctcctgtactgcttattcctatgggaaaagtggctgctctgtttggcatgatgagttgtacaatgtaaagcaactatctgattcttcttctgatggaaacggggaagttctttacattcgccttgctgcgaaagagttgcaaagtttagaaaggaagaagagtggaaaaataactggcgttaccattggtgcaagcaccggtggcgctttgcttttgattatccttctattgatagtttggagaaggaaagggaaatggtttactctcacactggaaaagcctgaggttggcgttgggatcattgcatttagatatattgatttgcaacgggcaactaaaaacttttctaagaagttggggggaggcagttttggttctgtatttagagcaatgctccgattattttctactacaattagagggcaccggagtgggtatcctgtatttaagggctacctaagcaactctaccatagcagtgaaaaggcttgatggtgcccgtcaaggagagaagcagttcagggctgaagtgaattcaattggaatcatccaacgtattaacttagttaaattggtcgggttttgttgcgaaggtgataataggttacttgtgtatgaatacatgccaaacagctcccttgatgtgtgtttattcaaggctaatgatatagttttggattggactactagatatcaaatagctattggagttgccagaggccttgcctacttgcatactagttgtcgggattgcatcatacattgtgacatcaagccagagaatatacttctggatgcatcttatgtgcctaaaattgcagattttggaatggcaaagattttggggagagaatttagccgtgctatgactacaatgagaggaacttttggatatctggctcctgaatggattagtggaacagttgttacatctaaagtagatgtttacagctacgggatggtcttttttgagatcatatcgggaagaaggaactcaagtcatgaaaatttcagggatggtgattattcattcttttttcccatgcaagctgcacgcaagcttctcaatggagacgttggaagtcttgtggatgctagtttggaaggcggtgtgaacctcgttgaggttgaaagagcttgcaaaattgcatgctggtgtattcaagataacaaatttgatcgaccaacaatgggcgaggtggtacagtctcttgagggtctacttgaactcgacatgcctccattaccaagactactaaatgctatcacaggaggctcacatccagtgacaccacaatattttgattcactataa

SEQ ID NO: 24699 - DNA, 2427 bp, Oryza sativa
  Clone ID: PAT_MRT4530_29659C.1
atgcctctccttcgtcatgtccttcttggcatcgtactcctcttcctgcacactctggcgagctccgccgcgacagataccgtgtcacccagccaagcacttgccggcagcaacaggcttgtctccaacaacagcaagtttgctctcggcttcttgaagccaggtaatgagtcctacaacaaccacaactcttaccttggcatatggttcaacaaggtccccaaacttaccctgctgtggaccgccaacggcgataacccagtggtggaccccacttcaccggagctcacgatctctggtgatggaaacctggccatcctggatcatgccaccaaatccatcatatggtctacccgtgccaacatcacaaccaatgacaccattgccgtgcttctgaacaatggcaaccttgtcctacgaagctcctcaaactcgtccaagatcttttggcagagcttcgactacccaacagatacgcttttcgccggtgcgaagattggctgggacaaggtcaccggcctgaaccgccgtattgtttctaggaagaattcgattgaccaggccccaggtatgtactcattggaggtggggctcaatggggatgggcatctgctatggaactcaactgtgccatataagtccagcggggactggaatggccgatactttggcttagcaccagagatgattggagttgcattgccaaatttcacatttgtttacaatgaccaagaggcttacttcacatacaccttgcgtgatgacacagcgatcgtgcacactggaatagatgtcttcgggagaggtttcgcgggtacgtggctggaagggtcacaagactggctgatacattacaggcagccgatagttcattgtgatgtgtttgcaatctgtggacctttcacaatctgcgacgacaaaaaggatccgaataacaacccattctgcgactgtatgaagggcttctctgtaaaatcaccgaaggattgggagcttgatgatcgaacaggagggtgcatgaggaatactccgttaagttgtggcagtagcaaggacaggtcagacctcacagataagttctaccctatgcaaagcattaggttgcctaacaacgccgaaaatgtgcaggctgctaccagtggagatcaatgctcacaggtttgcttgagcaactgttcctgtactgcatattcctatggggaagatggctgctccatttggcatgatgagttgtataatgtaaagcaactgttggatgctgcttctgatggaaatggggtagtcctttacgttcgccttgctgcaaaagaattgcaaatttcagaaaggaagaagagtggaacattaattggtgttgccattggtgcaagcacaggcactttgtttcttattacccttctactgatactatggaggataaaagggaaatggattattgctcacccactggaaaagtctgaggatagcattgggatcattgcatttcgacatattgatttgcgacgtgcaactaaaaacttttcagagaaattggggggaggaagttttggttctgtatttaaagggaacctaagcgactctaccatagcagtgaaaaggctcgatggagcccgtcagggagagaaacaattcagggctgaagtgaattcaattggaatcatccagcatattaacttagttaaattggtcgggttttgttgcgaaggtgataataggttacttgtgtatgaatacatgccaaactgctcccttgatgtgtgtttattcaaggctaatgatatagttttggattggacaactagatatcaaatagctattggagttgccagaggccttgcctacttgcatactagttgtcgggattgcatcatacattgtgacatcaagccagagaatatacttctggatgcatcttatgtgcctaaaattgcagattttggaatggcgaagattttggggagagaatttagccgtgctatgactacaatgagaggaactattggatatctggctcctgaatggattagtggaacagttgttacatcaaaagtagatgtttacagctacgggatggttttgtttgagatcatatcaggaaggaggaactcgagtcatgaaaatttcagggatggtgattattcattcttttttcccatgcaagctgcacgcaagcttttcgatggagacgttggaagtcttgtggatgctagtttggaaggcagtgtgaacctcgttgaggttgaaaaggcttgcaaaattgcatgctggtgtattcaagataccaaatttgatcgaccaacaatgggcgaggtggtacagtctcttgagggtctacttgaactcgacatgcctccattaccaagactactaaatgctatcacaggaggctcacatccagtgacaccacaatattttgattcactataa

SEQ ID NO: 24700 - DNA, 861 bp, Oryza sativa
  Clone ID: PAT_MRT4530_2965C.1
atggcaaaggctgttgccaacatgcgggcccgcccgccactctcgctgacgggtggggcccacctgtcatcgccttcctcccgccgcgcccgccgccgcgtccgtgccctagcgccgccgccgccgcggattgtgccgcatcccgccgtccccgcgcgcattaaagagaggggaatcactccccgtgattccctctcccgttttccccgatttcccctctctctctccctcggattcgttcgaatcgtgcccgcattcgtcgccggcgccatcaatggcggccgaaatccccgcggccggtttccttcctcctcggccgccctctctccctcccgttgctataaaatcgtccctcgtgctccgctcttccgtttccaccgctcgccgctcgctctcgccgtcggattcgtgctcgcgccgtgctccgctctctccgccatcgccgccgagctccgttccgccgccgccgccgctccggacttcctccttactcggcgacacctccgtccgcttcgccgtgtcgccgtcaacctcgtccgcgcctccgtttcgctcgtcgaccgtcggagcgccgccgtcatcgtcatcccgagccgcgccgccgtcttcctccgctccgtccgccgtttccgccgccttcgctgtctcggggtgagccgtggaccgtccccttcgtttcccccttccctcctctctctcgggtgccgctccgccgcgccggtggtcgccggcggcgaccatcggggcgcgggtgcgcgtccccctcccgtcggccgtgccggcgaggccgccttcgggcgtgccctcgcggctgccaagtgggcccggccgtcagccgcccgcgcccgcgggtgcggctga

SEQ ID NO: 24701 - DNA, 320 bp, Oryza sativa
  Clone ID: PAT_MRT4530_29660C.1
ggcaaaatggttgatgacatggcgtgaagctgtggaccatttgtggcaaactgcaacttgtaaaattttgtgtgggaacaaaacacgatgaatggcatgctgtatttagaacacggagcacttgaaaagctaggtagctactcttgttgcctgtaattattttcttctttcttatggaaaaccaagataggagatggtggagttaactgttaagtacacttaaatacttactgaagaaattttgtacttgcacacttgacgttgatgaaactgcaattgcctcagtagagtgaagcttcacactaaaaaaaaaaaaaaaa

SEQ ID NO: 24702 - DNA, 353 bp, Oryza sativa
  unsure (1)..(353): unsure at all n locations
  Clone ID: PAT_MRT4530_29661C.1
cctgtcccctggtggataatatatggcccaggacgcaaattgccaggggcccccactttgggacctgtgtgccaagtgcaactctactgtggcttatgatccagatcactcttngaatctatgagagccaagaaacctggtgttttgtttcacagaggtaaacttggcttatcactttgtgccatgtgagctgttgacacttggcgaacatggcttggctggtttgtgttctgctagatgatttctactctgatgtgtaattgaagagctctcgtggtcataatttgtatagaatcaatatttcattattctaatatttataaagacatccaaatgaaacgcgggtttttggg

SEQ ID NO: 24703 - DNA, 1725 bp, Oryza sativa
  Clone ID: PAT_MRT4530_29662C.1
atggccgacacggcgacaccagatcgacggccgacgcctccacgagaccacgacaagggatccaggccgcagtcgtcgccgcatgcttccaggagtcaagggaaccaggtccgcatgttcgaggcaagtggggacggggacgggggagaacctgcacccaagtgcggggatggggagggtgacgggcgattcccttcaatgcgggtgcgggacggggtggtgaaacccggcgggtgcagccccgttgccatctcatgtctccctgcaaagcttgtttcgcagtcaggaggcggcggcggcacagctggtgcctatgcgtgcgacgcgggtcgcatcgtgcgcaccgcctccgccattgtctccaggccgtcgacgacctcccacgtgctcagggtcgacggctactcgcacctcgtcggcgtgctccagcccggcgagcacgtcgactcgtgcgtcttcgacgccggcggccactcctggcgtctccagctctaccccaatggcagcaacgaccaaacacacaggagccacatcggcgtcttcctccagctcgccgccgccgccggccaccctagcgacggcgacggccgcgtgcgtgcccggccaaggttcagcctggttgacagcgccggcgacaagccggcggcggcgccaccatctcacgacgctggatttcacagcttcggccatggcgacggctggggctttcagagcatcatcagcagggaagaattggagcgatcggaatatctccgagatgattgttttgcaatccaatgcgacgtcgatgtcacaaccgttcggaagtgccatgatcacccgtccacactgccagccatgtcgttggcagcggcggcgggtcgcatcgtgcgcaccgcctccgccatcgtctccaggccgtcgacgacctcccacgtgctcagggtcgacggctactcgcacctcgtcggcgtgctccagcccggcgagcacgtcgactcgtgcgtcttcgacgccggcggccactcctggcgtctccagctctaccccaatggcagcaacgaccaaacacacaggagccacatcggcgtcttcctccagctcgccgccgccggcggccaccctagcgacggcgacggccgcgtgcgtgcccggccacggttcagcctggttgatgtcgccggcaagccagcgccgtcgcgggacgccggagttcatggcttctaccatggtcattactggggattcaaggacttcatcgccagggaggaattggagcgatcggagtatcttcgagatgattgttttgcaatccaatgcgacgtcgatgtcacaaccgttcggaagtgccatgatcacccgtccacactgccagccatgtcattggcggcggcgggccgtatcgtgcgcaccgcctccgccatcgtctccaggccgtcgacgacctcccacgtgctcagggtcgacggctactcgcacctcgtcggcgtgctccggaacggcgagcacgtcgactcgtgcgtcttcgacgccggcggccactcgtggcgtccccagctgtaccccaacggcaagaacaagaagcacagggaccacatcggcgtcttcctccagctcgccgccgccggcggccaccctagcgacagcgacggccacggttcagcctggttgatgtcgccggcaaggcggcgccgtcgcgggacgccggagttcatgggttctaccatggccatgactggggattga

SEQ ID NO: 24704 - DNA, 702 bp, Oryza sativa
  Clone ID: PAT_MRT4530_29663C.1
atggctaccccatctcattccttgatttttctcttcctatgcctgccagcagtcctggtcaaggccaacatccttggagacatctatccatgtccatgcaagtgctcccaggagaatgagactagccttcacatgtacttgcaccagttccctgctttgccaggtgttccaaaccggaacgaatatggggaaccagtgcaaatgaaaatgttgttggacgtctacaaggctttcatctccaagctggtcaaaccaccaccagctgggtccacaattgaggtgtctgggctcttgggtgtcaaacccaatggtcagtggtccattacgggtgggactggaacatttgctagtgcgcatggaactatcaagtttacgaattcccagagtagcactgccactgatgacataagagagcttgatattcatgtattccacactcccgaggcagtggccgaggcccagccaggccgccccgcctccctcctctcccggggtcgccgacaagtggggcccacctgtcgggtcctcccccaacctcccgccgcccgcgccgggtcgccgccgcgccgcgccgccgtcgccgtcgggttcgcgaggccgaactccacctcgtccgccccttccccgtcgggattcatcgccggaattcgcatcccctcgcgctccggtgagttcaacctctaccgccgccttcggccatga

SEQ ID NO: 24705 - DNA, 561 bp, Oryza sativa
  Clone ID: PAT_MRT4530_29664C.1
ctccttcctcccccctccctcttttcttttttttttttttctttttctttttttttttttttttttttttttttttttttttttttttttttttttttttttttttttggcccaaaaaaaattttcccgccccccccatacaggcaaacccagccaaatagggggttaagagtttatttgaaggggtaaaacccccgggaaaacataaatacccgggccgggggtaacctaaaaaaaaaaaaataaataagggttggggttttcccatttttttaggcttgggacccttcgcgggggcggtttgaaagaaaaaggggggggggggggctttacaaatggttttttttttttgggggggcccttttgaaaaatttaaaaggaacagggggcttttggggggggacccttgggggtttaagggggacccggcctgcagggaaaaccccccccggggggggggtcccgtaagggaaatggggcccaaaaaagaaaaggggcaaaaagggggccggggttttggggtttttccaatttaagggggggggggccttttttttttgg

SEQ ID NO: 24706 - DNA, 845 bp, Oryza sativa
  Clone ID: PAT_MRT4530_29665C.1
aatagctaggaatcatagtcctcattctagagaccctagtatcaatcgacatacatgaggagcacaaatggtgacggtaaaaggacattacggtgaaaagaacatcaggaacgctgcaaattgctagacacacttgtgacaaccaaaaacagaaaaacacactgcaagcatcgatacagacacattatttattcaaatattaacttaaccgctactttattgaattcaccgttctgatctgctgatggcatcattcgtgatctggcaattgctcaaccttagatcactgcctcgggagtgtggaatacatgaatatcaagctctcttatgtcatcggtggcagtgctactctgggaattcgtaaacttgatagttccatgcgcactagcaaatgttccagtcccacccgtaatggaccactgaccattgggtttgacacccaagagcccaaacacctcaattgtggaccctgcaaaactgccatcgctgaacaccatggtgtgagccatgtaccagctggtggtggtttgaccagcttggagatgaaagccttgtagacgtccaacaacattttcgtttgcactggttcccgtggtgagaagccaatcatgaacatacatctggccaaaccctataggttctgttgagtttatcaccccatattcgttccggtttggaacacctggcaaagcagggaactggtgcaagtacatgtgaaggctagtctcattctcctgggaacacttgcatggacatggatagatgtctccaaggatgttggccttgaccaggactgctggcaggcacaggaagagaaaaatcaagcagtgagagggagtagccat

SEQ ID NO: 24707 - DNA, 596 bp, Oryza sativa
  Clone ID: PAT_MRT4530_29666C.1
cagggctgacgtcagcacggggggggggggggggggaacgcggcgcccacatgcggggcccaccggtcagcggctcgggggggcggttcaccgtggaccgggaccacgcgggtggtccaccgccggtccacgggaccgatggcccagatcgccctcggggccgattagacgggtggtggcgacccggctcggctcaagaccggccaagcggccacggcgacggcgacggcgcgcgcacacgcgttgccggcgacggcaaccggcggcgcaaaggcggcgccgacgggcggtggtgctaaagcgaccactaacgggcggcggccctaaagcggcggctacgagggagagggaggggaatagaagggagagggcgcctcaccgagggtggccggcgcggaggaagacgacggcgaacggcgacggcgagccacgggaggacgacggccaccagcggacggaggttgaactcaccggagcgcgaggggatgcgaattccggcgatgaatcccgacggggaaggggcggacaagatggagttcggcctcgtgaacccgacggcgactgcggcgcggcgcggcggcgaccctatcggtggc

SEQ ID NO: 24708 - DNA, 350 bp, Oryza sativa
  Clone ID: PAT_MRT4530_29667C.1
ggctggcgcccccccccccgagaactcacaggaaccaaccacgtaaaaaataaactcaaacggacgaaatatgtggcatgtggaattttccaaagctccaccgaaaaacttctctcctcgaaaacataatcttgcaagcggaatttggaggttttaatatcgccaaacccggcaaagcgggggagaatcggatgtaactttttctgtagatgtccgttcatatattatttgcctgattccgagtccggggcggcgccagcatggctggcgccctcctcctgccacgtcagttcgcgtgcgccacggtggcaggaggacggcgcatgacaaacccaaaaacaatatatata

SEQ ID NO: 24709 - DNA, 861 bp, Oryza sativa
  Clone ID: PAT_MRT4530_29668C.1
gaactcactggaaccaaccacataaaaaataaactcaaacggatgaaatatgtgacatgtggaattttccaaagctctaccgaaaaacttctctcctcgaaaacacaatcttgcaagcggaatttggaggttttaatatcgccgaacccggcaaagccggggagaatcggatgtaactttttctgtagatgtccgtgcatatattatttgcctgattccgagtccagaaacatgaatggaggtggcggcgctagccatgctggcgccctcctccctggggcggcgccagcatggctggcgccctcctcctgccaccgtggcgcacgcgaaccgatgtggcaggaggagggcgccagccatgctggcgccgccccagcctagtgccgccgcctccattcctgtttctggactcggaatcaggcaaataatatatgcacggacatctacagaaaaagttacatccaattctcccccgctttgccgggttcggcgatattaaaacctccaaattccgcttgcaagattgtgtttttgaggagagaagtttttcggtggagctttggaaaattccatatgccacatatttcgtccgtttgagtttattttttacgtggttggttcctgtgagttcctaagtgtgaaaaaaatatcaaaaaagtaaaataaaaataaaaaagttgcacatctctctcctctgcactagttcggagagaggagaggagaggaaaaattctacatgtcacatattacgtccatttgagttcaatttttctatggttggttcttgtatgtccctaagcgtgaaaaaaatatcaaacaaataaaacaaaaataaaaaaattcgggggggggggggcacat

SEQ ID NO: 24710 - DNA, 907 bp, Oryza sativa
  Clone ID: PAT_MRT4530_29669C.1
gtggtggggcgatgtaacatcccggcctatggcttaataggattaatagaatactcatatcaacaagttgcaacttcttttccggaagccaatctccaaagaactccagggttaagcgtgcttggcctggagcaatttgggatgggtgaccgaccgggaaattctttccgggtgcacacgagtgaggaaaagtgtgcagaaaagacatgtgttggtctgtgagggcagtctatgacctatgaaagctatcagatgtaagtgggcccggcctgggggaggcgggacgttacaggcgatgctgaggtggctagggggagtgcgccagagtggctggcgccccaccccccctgaaattttttgtttttgttttatttgtttgatatttttttcacgcttagagatacacaagaaccaaccatagaaaaattaaactcaaatagacgtaatatgtgacatgtagaatttttcctctcctctcctctctccgaactagtgcagaggagagagatgtgcaacttttttatttttattttatttttttgatatttttttcacacttaggaactcacagaaaccaaccacgtaaaaaataaactcaaacggacgaaatatgtggcatgtggaattttccaaagctccaccgaaaaacttctctcctcgaaaacacaatcttgcaagcggaatttggaggttttaatatcgccgaacccggcaaagctagggagaatcggatgtaactttttctgtagatgtccgtgcatatattatttgcctgattccgagtccgtatgagaaatccctggggccggcgccagccatggctggcgccctcctcctgccacgtcggttcgcgtgcgccacggtggcaggaggacggcgccagagaggctggcgccgtcccgttgga

SEQ ID NO: 24711 - DNA, 405 bp, Oryza sativa
  Clone ID: PAT_MRT4530_2966C.1
cccacgcgtacgaacatttcttgctgaagtctgtcttgtttaacccatacggtattctcctacagtccttcatcactaggcagaaaccacagtctccaggacctagctagcttgtcaagctaggagctagcagctgtgcgtagacaatcgcattcaccggcggcttcctgtccacgctcgtcggctcgaccagactgggcggagccacaccggtcagcggcagacgcagctggaggagcaagacggctaggctctcgaggaggcaacggcgcggcagctcggggagggcgactgtgtccggcacgaagcatgcgccagagacaaccaaaaacaacggcagcggcagcagcagcagcgacaagcgcatgatgcaagtacacagacgcgaacgagctcgactgcacg

SEQ ID NO: 24712 - DNA, 3530 bp, Oryza sativa
  Clone ID: PAT_MRT4530_29670C.1
atggtggcggccaaggtgtcgacccctgccggcggcgcggtgcgcgacgggctccggcggctcacgcagctctcgctcgtctccaaggtctgctcggagctggaggcgcacctcggcgtcggcgaccgcgtcctcgcggagttcatcgtcgacctgggccgcgcatccccttccgtcgcagacttcgacgccaagctcaaggcccacggcgctgacctgccggactacctcgcgcgcaccctccacaccgtcatccacgccatccctacccacgccgacgacgcccccgcccccgccccccaaaaccctgcctcccgtggcaccggtgcaagggtttgcgggaaggacaaggcggaggagcgggtgagagatggggatccggggctgtaccaggtgtgccgcgggaaggtcaccggcctggcggacgccgggtgcttcgtccgcctcgacgacgcgcgcggccgcgaggggctcgtccatgtctccgagatgcccggccgccgaatcgccgtgaagcgtgggcaggaggtgttcgtcaagatcgtgtccgtgcaggggcgcaatctggggctgtcgatgcgggacgtcgaccaggacacggggaaggacctcctaccgttgcagcgtgctaggggggaggatgatgtgccgaggccgatggcgaatccgtggaccgatcgagccgccgccactaggagaaggacgggggtgtcaggaattgtgatccccgaggacaaccagactggcacggcatcgtcgcggcggccgattaggcggatgagctcgccggagaggtgggaaatgaagcagctgattgcttcaggggttctgaatgcgaaggattacccggcgttcgatgatgaggatagcgaggggatgaattaccaggaggaaggtgtggaggaggagcttgagattgagcttaatgaagatgagccagcattcttgcggggacagggtcggtccacaattgatgtgtccccagtgaggatttccacgaaccctgatgggtcgctgagtcgagcggcggttctgcagagtgcgcttatcaaggagtggcgtgatatcaggaacgaggatcaaagagcattggttgactccatcccaaaggatctgaatcggccatgggaggatcctgtgcctgaggtcggtgggcggtatctcgcacaagagctacgcggtgttggattatctgctgaaagcatgccagagtggaagaaagaggcttatgggaagactgtaacatttggtcagacttcaaggctttcaatcctggaacagaggcagagtcttccaatattcaggctgaagaatgagcttatcgaagctgttcgtgacaatcaagttctggttgttattggtgagaccggttcagggaaaacaacccaggttacacagtaccttgctgaggcaggctatattacgagggggaaaattgcatgtactcagcctcgcagggtcgctgcagagtcagttgccaagcgagtatcggaagagtttggttgccgattgggagaggaagttggttactcaatacgttttgatgatcacactggaccagatactgtcattaagtacatgacggatggcatgctccttcgtgaaattttgttggacactgacctctctagttactccgtggtcatgcttgatgaggcacatgagaggactatatatacagacattctctttgccttactcaagaagctaattaggcgtagaactgatctcaagttaatagtcacttccgccactcttgatgcagagaagttctctggatatttcttcgattgtaatatttttacaattcccggaagaacatatcctgtggagatactctattcaaaacagccagagagtgattacatgcatgctgcgctgctcacagtatcacagatccatctgactgaacctgaaggtgatatcctcttgttcttaactggccaggaagagattgatcatgcctgtcagtgtctctatgagaggatgaagtctctaggtaggaatgtaccagaattgctgatatatgcagtgtacagtgctcagccagctgaaatgcagtcaaagatgtttgaacctactcctcctgggaagaggaaagtggtcgtggccactaacatagcggaagcatctattacaatagatgggatatattatgtaattgacccaggatttgcaaaactcaatgtgtataacccaaaacaagggctggattcactgatcatcacaccgatatctcaagcatcagctaaacagagggcagggcgtgctggacgtacaggcccaggaaagtgttatcgtctatacactgaaagtgcctatcgcaacgaaatgccccccacaactactccagaaattcagaggatcaacttgggggagacggtcctcaatatgaaggcaatgggaataaacgatctactgtcatttgacttcatggaccccccagctcctcaatcactcataactgcaatggaacaactgtacaaccttggtgccttagatgaggagggtctccttacaagagtagggagaaggatggcggagtttccacaagaaccaccactttcaaagatgctccttgctagtgtggacctcggatgcagtgatgaaatactgaccatcattgcgatgattcaaactgggaacatattctaccggccaagggaaaaacaagctcaagccgatcggaaaaggggcaactttttccaaccagaaggggatcacctcaccctgctcaccgtgtatcaggcgtggaaggcaaagcagttttcaggtccatggtgctatgagaattttgtccagctaacatccctgaggagagcacaggatgtcagaaaacagctccttgagattatggacaagtataagcttaacgttgtctctgcagggaatgatctcaccaaggtgaggaaagccatcactgctggcttcttcttccacgctgccaggaaggatccccagggaggatacaggaccattgctgatcatcagcaggtgtatatccaccctgccagcgctctcttccagcagcaaccagagtgggttatctatcatgaagtcgtcatgaccacaaaagagtacatgagggaggtgacagccattgacccaagatggcttgttgaactggcaccgaggttctacagatctgcagacccaacgaagatcagtaagcggaagcgccaagaaaggattgagcctctgtatgacagatacaacgagccaaactcatggcgcctcagcaagcgccgagggtaatttgtctgtatatagtttttacttccactatagctgctctttatgcaatgtaagctgagtacttgtatgtaagtgtaaatatactctgctgataagttccaatacatattgggatattaagcttgaccaaaaaaaaaaaaaaaaaaaaaaaaaaaaaaaaaatgaatgaggttgacaattttgactgtttctatattagttgatcctgaaaaaaaaaaaaaaaaaaaaaaaaaaaaaaaaaaaaaaaaaaaaaaaaaaaaaaaaaaaaaaaaaaa

SEQ ID NO: 24713 - DNA, 555 bp, Oryza sativa
  Clone ID: PAT_MRT4530_29671C.1
atggcggccggagggaggtgggggcacagcgacaacccgttcgaggaggtcgagatagatcaggtcaaccccttctcgcacccacgtccaactccactccctcatgaacctgttgccttctacaatgaccctggtgcatccgtggatcctcttgatagtaaaaagggcctgaagaaaaaggagagagaactattggctaaagaggctgagctaaacaagagagaacaggaactaaaaagaagggaagaagcacttgcaagagctggagtttttatagagccaaaaaactggcctccattcttccccgtcattcatgttgatatctcaaatgacatacccgtgcacttgcagcgagtgcagtatgtcgcttttgcatcactcctagggttggtgatatgcctcttctggaacataatatgtgtcagtgctattgcgattatgtggggcgaccctagggcctggtttctggctgccatatacttcattacaggatgcccaggtgcctatttttcatggtaccggcctctttatcgtgccatgaggtactacatataa

SEQ ID NO: 24714 - DNA, 101 bp, Oryza sativa
  Clone ID: PAT_MRT4530_29672C.1
tggactcgtgggccgatggtggaggccaaggaaccagtggttcttatgaaccaaatcttagcctcctttgacggggccgtgctaattgtagaaaccaaggg

SEQ ID NO: 24715 - DNA, 297 bp, Oryza sativa
  Clone ID: PAT_MRT4530_29673C.1
atgcgggggtcgagagctacaagtgcgatgcgacgcgaggaatgggtggtgccagctggggcggcctcgcctttatatagaactggctccgccgggggatccagggctctgtgcccgcggctcaaggatgggatcggggccgttggtttgaatcgggaggggggaagtggacggtgggagatgcggccacgtcgctggattgggagaggggatagagagggcgtgggtttccagaaggttcctgtgggtggagagaaacgttggaccgctgctggatttgggcccacgaaaagataa

SEQ ID NO: 24716 - DNA, 344 bp, Oryza sativa
  Clone ID: PAT_MRT4530_29674C.1
ttgtgtgctcaacagggagcataagcgctcgaggagtggccacgaccaccacacgagtggcaacatggcatgcataatgatggacaacccgaacaggagcgggacgtttgggggcggtcagaccacggcgctgtgccagcgcatcaccttctgcagcgactttgaggcctagccaggggctccggtgcagaaccgggcgactaacctccaccgccaggaggtggatatcaccttcaagttctcggtgggtagtgacgccatgatggtcatggaccagttctgctccaggggcaggatcctttccgtcatggacggctgcttctcctacgatcggactgccacca

SEQ ID NO: 24717 - DNA, 487 bp, Oryza sativa
  Clone ID: PAT_MRT4530_29675C.1
attagaggctggcaggccgatgcgatcgaagggcttgcgagatcacggtgcaattagcaaaagcaagcaaaaggcggagtccgaacttcctttttgagtcttgctgtaaacgtctgtcatgcagtaggtccgaacggccacattccctttgtgctcacaacagcaacgtcctaaccacctgctcccagccttcatggctgagtcgacatgcgagtggctgatatgaaggagctgtagcttgtttgtcaccaggttcaagccgaagcagtgcctctaagagcgtgacgccatggctacaaagaagtccagcagcagtgatgcggagtatgactttgccacagtaactggttcgtcagctgatatagaagatgactttgattgggcagacgacgaactaccagccggcgccacacctgcagcagcagctactgcaagtcaggcagccccatcacagccagcatcagtagctttgaaagcagggcccatt

SEQ ID NO: 24718 - DNA, 267 bp, Oryza sativa
  Clone ID: PAT_MRT4530_29676C.1
atgacggagcgcggggctcctcaccgggagaccgcacaggcccccctttgccggttcggccgggggctcagggtgaaattccaagctctctctgtatgtgggaagatcgcgacctatcaaaagagcatgagacacaagcgatgtatacagcctggcatatatctgaccggggctaacgcgccatctctaagaggcaacacgctagctccagttagagacgagtgcctagaggctctcgtcttgacaggatggggcgagaccggataa

SEQ ID NO: 24719 - DNA, 367 bp, Oryza sativa
  Clone ID: PAT_MRT4530_29677C.1
catcatgacgctgcaaaaagatatccacacggatcggggcatataaaaaaccggggattgacatgacttctcattcaattatgattggcataagccctagacatactgtatgcttaaacatcaaataccacctggaatgactggagagaacataatcccttacactggtgacaacacgctctctacaccacattttgacggaattccttactttgagatctcagggtctatcgcatgcatcaagatagtctgtttggctcacgaggccttatatgtacaaccgtttccaggcttgagaatcttggatggtgggacaagctttatgcccagctcccttgcaagagactggtcggcataattgctacac

SEQ ID NO: 24720 - DNA, 296 bp, Oryza sativa
  Clone ID: PAT_MRT4530_29678C.1
taaaaaaaagtttacataaagtatatcatgtttatcatataataaccaataaaatacttatcataaaagtttttacaaataagacagatggtaaatgttgaacacaaccaatgcaaaactgcagtcttctgggatggaagtagtataaaactatggcgtgcgggtggcaaactgatgtgattagccacttgtcttttcacgatgctggtttctcgagcttgtgttgatgttaagcgtgattaggcacagactaatgtgcaaatatggtctgtaaataaatataagaatgatggctt

SEQ ID NO: 24721 - DNA, 3274 bp, Oryza sativa
  unsure (1)..(3274): unsure at all n locations
  Clone ID: PAT_MRT4530_29679C.1
tttgggataagttgcttgattcatgagatggttattacaactggaaagattatcttgattttcttagcttgcactgcacatgtcgtcacctgcagttccttatatggaaacgagacagatcgagtggcactgcttgaattcaagcaggcagtctgtcttgatccaaaacaaaccttgatgtcctggaatgacagcatccacttttgcaattgggaaggcatcttgtgcagcttgaggattccatatcgtgtcacttctcttaatcttacaaatcgaggtttagtagggcaaatctctccttcacttggaaacctcacatttctatcaattctatcccttacagagaattcattcagtggacaaatccctgcatcccttggccacttgaaccacctccaaactctctggttgagtaacaacactctgcaaggagttataccagattttacaaattgttccagtatgaaggctctacggctgaatggcaataatctagttggaaaatttccgcagctgcctcatcgccttcaaagtctgcaactttcatacaatcatcttagtggaaccattcctgcttctcttgctaatatcacaaggctaaatgtgcttacctgcacatataataacatccagggcgatatcccacatgagatcggaaagttatccagcctgcaattcttgtatgtaggtgcaaataagttggttggcaggtttccacaagccatcttaaacctttctactcttattggtcttagccttgggtttaataatctaactggagaggcaccatccaatcttggtaattgtctacccaaccttcagctacttgaattagaagacaactgctttcaagggcaaatcccctcttcgttgataaatgcttccaagctatatcgtcttgagctagcaagcaataacttcaccggtgtggtgcctagatccattggcaaactaaccaagctatcttggttaaatcttcagtccaataaacttcaagctcgtaacaagcaagattgggagtttcttgacagcttagccaactgcactgagctgaaagctttctcgatagctagtaatcatctagaaggacatgtgccaacttcattaggtaacctttctgttcagcttgtacaattgtttttgagtggaaatcaattatcaggtggttttccttctggcatagcaaaccttccaaacctgatttatattggactggacaacaaccagtttactggtgcagtcccaaaatggcttggaactctcagtaatttacaacagatattgttacatgagaacatgtttactgggtttattccaacatccctttcaaatttatctgtactgggatctctctggctagactataacaaaattggaggacctttaccagcaagcttgggaaacctgcaaacgcttgaaacattgagcatttcaaacaacaaactccatggtagtgtaccaatggagatcttcagaatcccaacaatacggttaattgatttgtctttcaacaactttgatgggcagcttagtgccagggtaggaaatgctaagcaactcatgtatttatatctttcatccaacaatttatctggagatattcctagttcactgggcaattgtgaaagtttggaaggcatcaaattgggctcgaatattcttagtggaagcattcctacttcattaggcaacataagaagtctgaaagttctcaacttgtctcacaataacttaagtggatcaatacatgctaatcttggaaagttatggctccttgaacaagtagatttgtcatttaacaatctcagcggtgagataccaacagaaggaatattcttgaatgcaactgcagtgcacatcaatggaaatgagggtctttgtggcggggcactcaatttacacctacccacatgttatgtcatgcctttgaattcatctaggagtgaacgatctattttgctgtatttggtgatattatttgctagcctggtgtcagttatattcatatatctattattgctctggaggggaaaacagaagaaaaaatgtacatctttgaccccatttgatagcaaatttcccaaagtttcttacaatgatctcgccaaggcaactgaagggttttcagcatctaatataattggaagaggaatatacagtcatgtttacaaaggggaattgttccaaggcagagatgtggttgctgttaaagttttcagcctggagacagaaggagcagaacatagttttatcacggaatgcaatgctttgagaaaagtgcggcatcgcaatctagttcctatcttaactgtgtgctcaagtctggatactaagggaaatgatttcagagccctggtgtataagttaattccacaaggagacttgtattctctactgcactcaactagagatagtgagaatggtttcacttcgaacatcattacattttctcaaaggctaagcattgttgtggacatagcagatgcattggaatatcttcaccataacaaccaagaaactgttgttcattgtgacataaagcctagcaatattcttctggacaatgatatgaaagcttatgttggagatttcggtcttgcgaggctcaaagctgatgctgcagtaccatctgtcggtgactcaaactcaacttctatgattgcaataaaaggaaccattggatatgttgctcctgagtatgcatctggtggtcaagtttcaactgctgcggatgtttatagctttggaattgttctccttgaagtattcttacggaagggaccgacagatgatatgttcaaggatggtctggatattgcaaaattcgttagtatgaactttcctgacaagatactagatattgttgaccctgtattactacaagacgcaatggcagtcaaggagaaaggcctacactacttgcactctgtattaaacattggactctgttgcaccaagatgacaccgagtgaacgcatcagcatgcaggaggcagctgccaagctgcatggaatcagagatgcatatctcaggggaaactgaagaagcagtgcagttacctcaatggttttggttttgtctgaacgcgttatatattatatatagcattatactagcatgcatgtgtgcatcgtgttctggttaaatagatcggtattgccttgaataaagaagtggcgattgtcctagagcagcaaatgtttttagattgctgtttgattcatttctaattttgaaacgcggttacataaacnnnaggtgtttttcgtcgttc

SEQ ID NO: 24722 - DNA, 1738 bp, Oryza sativa
  Clone ID: PAT_MRT4530_2967C.1
agtagcatagtgctctgtacagatccatttttttctttttttttttgtttttgagggaaatgtagaaattcgtgttatcacaaacagttactatattgtattttgggacaactgtcatgcaaccctgtagaacatctctgctgtctcccccataagaaatgtacaggagaacgaaaaatgtgatgacaagtgtatattgactgtaatctatagctatgacaatgctgagtttctagatggcaaatctacggcttcagcactaaacgaagacgccaggcaaggtttcctttgtatatcatacctgcatcaccagaaaaacttcacagaagaaattgtcatataaatcgcaggtcacgttatttctcactgccatccttctcgtctaatgctccattaggcttctcagaccttactggaagaacgctgcgccgctctttgccacctggtttagctgatgcattcccataccatatcatcccaacaacagcaaggatcatcccaaggactacctgaaaattcagaccttccttgccaaagaagagaaacccaagggacaagacgagcactgtcttcatgtggcccaggacttggaaggatacggcagaaaaccgaccaatgcagatgaattggctcagattaacaccaatggcaatgacacatgagagagtcaggaaaaacaaagcaatcgatgtgaaaccaaagtgatccacccttttgcctgtcaacaagaaatctacaaagggccccactagcagaagggatcccgcttgggctggagcagtgtggcccaggaggttgaatgagttcagagagtacttccgttggagaaaatgaacataatattgttgcaaagctgtgctccaaacagctataacagcagcagccagaccttttgcatttacactgacatcagtaactgtgcagaccgcaacacctataagcacaaccattatgctcagctttgtgtcccgggagtaatgtacacgatcgaagacaacctccaggagacatgatgcaggtatcatgcacagctttgctatctgataaaatcccacagagttccacatcaagctcacattcattccaacaattgacaagttcgaaaagatcacaaacttaatcagatctggtattggtaagtgggagggctggctgaggcctaaccaccgaaacacgatagtcatcaaggtggttgtcacaaaatgaagaccagttaatgttgtggcgaaactgaatccatgtgtagccatcagagccttgttgaccatgatgattccaacggatgtggtgatgttgaaactccatgccgcaaaatctagcaccttcttcttgtcggatttgctcatggaagaagtcatttcgctcgaatccttgaggcttcaaatcaacaccaacactttggcaggggaggaccggaagcacgccgtcggccggcgccgctggctcgaggggtgatggatggagatcggcgaactcgctcgcgagtcgagaggccgaggtggcgggtggggagagattggcttgggcgcggcgaggaggagccagaggcgagggtacgcggcggcgggagcagctggacgccgccgggcaccgccgctcgcgtcgcggtggtggagatcgccgcgcgacggcggaggcggcggcggcgggccaaggagattttgctcgtgtggtgttttttttttcttttgttttatttttttttttagcgaaatgaaaacaagtgtatacgcgtggg

SEQ ID NO: 24723 - DNA, 259 bp, Oryza sativa
  Clone ID: PAT_MRT4530_29680C.1
atagtgggttgtgagcacatggttttgatggtcgtgctcatgacaattaagaaccggttcacgagtttcggttgtgaaacattaaccgtgccaaccacaagccagcatgggcaacgactttatcttttgtatagcatggttcattgtggggcaccagactgagaagtggcggagataagcccacgagggtcgctgagtagtccatgccttgttttataagggggtgattataatccaggaacggtgcgctgtggtggtt

SEQ ID NO: 24724 - DNA, 409 bp, Oryza sativa
  Clone ID: PAT_MRT4530_29681C.1
agtctcccatggctgagctcgaggtcgaggctgcgtgggtgtgcgacgtcggggatgagctgcaacggctgccgcgtgctgcggaaggggtgcagcgaggggtgcgtgttgcggccgtgcctgcagtggatcgacggcgccgaggcgcaaggccacgccaccgtgttcgtcgccaagttctttggccgcgccggcctcatgtccttcctcaccgccgtccccgagccgcagcgcgcaggtaagggtggggatccgtactacgatggatggtttaccggtgagtgcgcgcgcgtgttcttggctgatgggatggcgtggttggttgcagcggcgttccagtcgctgctgtacgaggcggcggggaggacgatcaacccggtgggcggcgcggttcgtctacctcttcggc

SEQ ID NO: 24725 - DNA, 433 bp, Oryza sativa
  Clone ID: PAT_MRT4530_29682C.1
ttatcatgggaactgagaatgatgcccagacagacactcccacaaaatacgaaccacgctgttccgatggagagagatagagtgctattacgcgctgagcagtcattacagtcgtaatagtcgaactgcacaacatcttctcctatgagcctgaggaaggaccgtagatcactggatggagagtccagggctggcaattctaaaatcgaaccagtgcgtattcatccagtataaggaagccctgcaaactttggaggacagccacctacacatactgttgggatcacacgagttaacaaaatcatgacatcatatgaggaccttaagaaccctacaattatatgttgcaatgacaacaacttcagatgagcggaatacttgtgagtgctaaggtgacagggtggaccgacttagttttgatcctaatgatctt

SEQ ID NO: 24726 - DNA, 539 bp, Oryza sativa
  Clone ID: PAT_MRT4530_29683C.1
cccgggctgcaggaatacggcaccggccgcggccccgtgccgcgtacgccccgaggccgacgtgccgaggtcggcaccggggcgccatacagccgtaccgatacgagtagataccgataggctactacgctactactaccacctactagctagctagctagccgctagccgccgcggcgcgggcgctacgcggcgagggtagacgacgacgaggggttaacgccgcgtcggcggcgtacgtacggcgatagaggcgggcggcggcggcggtaggaagggaagggcgctagcggggatagacgcaggcgaaggacgggtacgtacgtacgtacggcggcgagggaggtagtacgtgggtagcccgaccccgtgacgggccactaaccggccctaccaactatacgccggcggcgccgacgccgccgacctccgcgccgcccacctacgcccgcagctaacgcccgcgcgtagatgcgcgcgacctacgccgtcgtccgaccgacgacgacgccataccatccatataataatactagcta

SEQ ID NO: 24727 - DNA, 505 bp, Oryza sativa
  Clone ID: PAT_MRT4530_29684C.1
gactgaatctcaaatatttacatggaaaaggataaagcccttgtcatattgagctatgacatgtgggagagatatctgtacataatattagaaaaacaaaagaacaacactggatgtgtaaaacttaaaaggtgtaacgctaactaatagcttcagaatagccaggcaaaaccatcaaggcggatggtcatagtataacagtggaacaagccccgttttaaatgatgccagatgtacggcattgctaaggttcccttcatggcattgttgtgcttgtttattctgcttatgagtaagtgcatcttgtttcaaacaccatcagttgacctactattgactagcctctctttccttccacctccatcaaatggatatctccagagaaaatactcagtgcaatcaggtctgaactgctgcttcaagggtccaggtaccggcatcaccaagtcaattctatatgctaagctgattttgacttggaaaggaccttcagatcaactaatat

SEQ ID NO: 24728 - DNA, 717 bp, Oryza sativa
  Clone ID: PAT_MRT4530_29685C.1
atgacaaagcggaagattgagatcaagcgcatcaagaatgaggaagcacgccaagtgtgtttctctaagcgtcgtcctagtgtgttcaagaaggccagcgagctctataccgtctgtggtgcagaggttgctatgcttgtcaaatctcctgctggtaaatttttctcctttggtgccccctctgtcggatttgttcttagccgcttccatgctactactacttctagaaaacactccagtatgggtgttacgatccaacatgataatagtgcaacaatcaaactacatgagttgaatcaacaacacatagagttgcaaaaccaactgcaagctcaaaatgagaaaatgaaagcgctacaagaggttgctaagaaggaaagtgggggaaaagtgatgggttggttgaatagcaaggttgaagatatatgccaagaagatttggaagagttcaagatggtgcttgagtctctaaagtacttgacgagggggataattaatcaactctttcagaattatgctatgttctctaatatgatgcgtgtgcagcattgtgtgaccgctttgcccaatcaacaattccttccgagcagtgaagatgtcaaaccgatgattcaccatgttcctagttcaagttatggatggaacacaagcatagatagcaaacctaattcaagtgatgctcatgttgttggggccaggaggtactttccgaagtga

SEQ ID NO: 24729 - DNA, 844 bp, Oryza sativa
  unsure (1)..(844): unsure at all n locations
  Clone ID: PAT_MRT4530_29686C.1
ccggccgggaacaataactcaaccttttgatctcgctacgaagctcctccgctccacccaggcacgagcgccgccgcggccgactccaccggacaccacccaacgccgccagccgcctcctcccatcctccctcgatccgtacggatagcctccccgctcgctcggtctgcgcccgtcgtcgtcgtcccgccgtcttatccctcccgcgactcggcgacgcgcgaaggcctccggcgcggggctgaagatttaccatgaattctctcagcaatggattactgaagggcttgaggagggtcttagaacagcagagaaaaccaattgatttctacagaaaatctcaagcttggagttctactgtttccttttctgatattgatgagaagagtgaaatgggaggtgatgatgattatacagattcaagacgagagttagaaccccaaagcgtagaccccaagaagggctggggattccgtggtgttcacagggctataatatgcggaaaagtcggacaggttcctgtgcagaaaattttaaggaatggtcgtacagtgactgtttttacagttggaactggtggcatgtttgaccagagggtagtaggggatgcagatctgccaaagccagctcagtggcatcggatagccattcataatgaccagctaggtgcttttgctgtccagaagctggtgaagaattctgcagtttatgttgagggtgatattngaaccagagtatacaatgacagcattaatgatccaagtgaaaatataccagagatttgtcttcgacgcgatggttagattcggctgattaaatctggcgagagtgctgctagcattt

SEQ ID NO: 24730 - DNA, 696 bp, Oryza sativa
  unsure (1)..(696): unsure at all n locations
  Clone ID: PAT_MRT4530_29687C.1
cattatccgaagtttgcatacttaatgaacttgaggtgcttcagttgttgaaattagttgatcccttcaaaaaatggcagacatgataatgaggaaaaaaatggcagacatgataatgaggatgagcttgaaagtatttatctcgatgaattggtggagcagtcattccttcaagaaatttatttttgatgttcttgatgccgccgagttgaaatttcctttttctcaaattaactgaaaatagagatgaatcattgtgacactcagtagcttcctacgcttggtgatcttccgtccctcgtgtccctctatttctatggcgagtggctttgtgcacgacactggaccggtccagggagttttnggagccttgttcctgcaggtgttgggattagcttcattgagacattttgatactctgacgcccaagttgttccgagtgattcggagttagtggtggtgaaatttccacactacaatactatttacatctgcaatgacgctgccaacactagtcttatcctctgaggtttcttccatatatctgtgctcttcgtgtccttgagaactatattactgataggatgccactgtgtatcactgtaatgtattcctgcatggcctaaaactgcatatactacagattggtaggcaccgaaaaaaaaaaaaaaaaaaaaaaaaaaaaaaaaaaaaaaa

SEQ ID NO: 24731 - DNA, 382 bp, Oryza sativa
  Clone ID: PAT_MRT4530_29688C.1
tgcttcgactctcaccccttctaggagttcaagcgatacttcacgcccatcttcgcccccggagaacatcacccttggtgagttagcccctagttctgccggcatcatcgcctcatctccacagaggagcatgaaagggctgaactttgttggccttgtgggggtcgtccgaagggctcagagaatggatagcatttcatctggccattttcccttcgccgccacctccagtctcttctttagagcctcgaggatctttccattcgctcattcggccgccccgttcaactgcggttattgtgccaagtggttcggcttcaacccagcgagagaagtactcaatggcttcaatggcgaacttgtaattgttccgcgccactag

SEQ ID NO: 24732 - DNA, 303 bp, Oryza sativa
  Clone ID: PAT_MRT4530_29689C.1
tcagccctccgtttcacggggaaaccactggaggtgcgcccccaccggcaaccagtggcatcgccgccactgcaccgcctcccgccggctgttcgccgtgcctaaagcgttggccgacgctgctgtcccctccctcggcacggtgacgtcgccatcaacctcggccactccccggtttcgcctggaagccgccgcacgtcgctgccgcgccggcttctccatcctcgtcgtcgacgtctccttcggccgcccgttccaccccgcttgtgcaccggccaacgttgccaccaccacctccgacat

SEQ ID NO: 24733 - DNA, 398 bp, Oryza sativa
  Clone ID: PAT_MRT4530_2968C.1
ggaaaaccaaaaactggtttactggccagaaaaaatttccagaggaatttaagctaaagcatgcaagaacccatcatccaaggaggggtttttttttatttctacaggattgggaccaaaaaataagacacctgggggaaagggaaaactttggccatcagcgggttaaagacccgttgggttccagccaaggtgggttttttactgaaggacagcaccccacaattcagggggaggaccccccgttttttggcccaaaggggggggctaaaatcctgggctgcccttggggggcgacacacacatggggccaactgggaaagagttcctgaaggatgctataaccgggtaaaccataagcttaaaggatctttattaaacacttggggtcagaagac

SEQ ID NO: 24734 - DNA, 2330 bp, Oryza sativa
  Clone ID: PAT_MRT4530_29690C.1
atccgattcgaactcggatccataacgcggcaacattcgaatgatttaatgcaggggctacatttgccaggctagtgtacagggtcttgggatcacaattggggccaaacgtcgaagcctatgttgatgacattgtcataaaaagtcgcaaggccttcgaccacgcatcagacttgcaagagacttttgacaacctccgcgcaaccagcatgaagctaaatccagagaaatgtgtgtttggcgttcgtgctggtaagtagttgggattccttgtgtccgaacgggggatcaaagcaaacctcgaaaaaatcgatgccattcagcaaatgaagccaccatcgagcgttcggcaagtacaaaagctcgaggggcgaattgcggcacttagtcgattcttgtcaaaggcggccgaaaggggcttgccattcttcaagacccttcgaggggcaggaaagttcagttggatgccaaagtgccaagcagccttcgatgagcttaagcggtatctccaaagcccacaagctctggttagcccattggcagggattgaactgtggctctatctagcagcttcgcccgtggctgtcagcatagctttggtgcaagaaaccaaagcaggccagaaactagtatacttcgtctccgaagctctccagggggcgaaagttagatacattgaaatggaaaaacttgcttacgccctagtaatggcttcaacaaagctcaaacactacttccaagcccacagaatcatggtaccttcgcagtatcctttggacgaagtgcttcgaggaaaagaaatcacggggtgcctaagtaaatgggccgctgagctatcacctttcgacctacactttgtcgctctcactgcaatcaagtccctagtcctcactgatttcgtggccgaatggacacgcttcgacacaaccaacaacgcagcagaatatgaagcagtgttaatgggcctgaggaaagcgaaagctttgggcgttcggcgtttcctagtccggacggacccaaagcttgtcgccagccaggttgacaaatcctttaaagcgaaattagaaggaacgagaaaatatctagaagccgtttagtatatgggtaaatgtttcgccggcataacggtcgaacacttgccctgaggccagaatgaagaggctgatgcgctagcgaaatcagctgcttgtggagggccgcattcgccaataatctttttcaaagtcctgtatacaccaagtgtgccagcagatagccaagacatcatggcaattgaccaagtctagttgggcgaagacccaaatgactggcgaacgcctttcgtcaagcaccttaaagagggatggctgctagatgaagaatctatggcgaaacagttgcaactcagagctatgaattacaagctaatctccaggcaattgtatcgaaccggaatactgcagcccatgcttcgttgtgtctctttctccgaaggtgaggagatggtgaaggaaatacactaggggatatgcgaagcgcaccaggcagcaaggaccgtcgcatcaaaagtattttgctaaggcatatattggccaaccgtacttaaagtacgtgttgaacatgtcaaaaaatgtgaaagctgtcagcgacacggccgaagtcaaacagcaccacagtacgaactacagctaatcgcaccaatctagccagtcgcaagatggggcttagacatcaacggcccattcctagtggcgcggaacaattacaagttcgccattgaagccattgagtacttctctcgctgggttgaagccgaaccacttggcacaataactgcagctgcggttcagaagtttgtatggaaaaacattgtttgccgattcggggtaccgaaggagttcatcactgacaatggcaagcagttcgattctggaaagttcaaggaaatgtgcgaggggctaaacctgcaaatcagattcgcttcggtcgcacacccgcagttgaacggggcggccgaatgagcgaatggaaagatcctcgaggctctaaagaagagactggaggtggcggcgaagggaaaatggccagatgaaatgctatccattctctgagcccttcggacgacccccacaaggccaacaaagttcagccctttcatgctcctctgtggagatgaggcgatgatgccggcagaactaggggctaactcaccaagggtgatgttctccgggggcgaagatgggcgtgaagtatcgcttgaactcctagaaggggtgagagtcgaagcactagaacacatgcgcaagtacgtggcaggtacttcggtaacctacaacaaaatggttcgaccg

SEQ ID NO: 24735 - DNA, 193 bp, Oryza sativa
  Clone ID: PAT_MRT4530_29691C.1
ctccaagtgttgagtgatttattgggttgcaggggatgatggctggtgctttgaaaaggatgtgctgggaaattgatgcaggggaacatttctaagatatctgaaatggcgagtgatgttgtctattgacatgtattccaaattttgacatactatgggaacaaaggcatgtttatttaaaaaaaaaaaaaaa

SEQ ID NO: 24736 - DNA, 423 bp, Oryza sativa
  unsure (1)..(423): unsure at all n locations
  Clone ID: PAT_MRT4530_29692C.1
gtacttggtacattaccaaagcagtgctagtgtacaggatacaatttctaaaatgagaaaagaaagcagtgagcatcccaatatgatcgtgctttctcaaaatggtgagcatgagattttcccacaaaatgctgtttctcgaaatggcgaactcgagattgtcccggtcaatgctgttgatggcatgcatcaggattagcacaggcaaaaattgaagaacaatattgtcattgttaacgccctatctgactgcattctactgccgttgttctctgcaggtggggttataaggactggtatattaacttgcatcgtacanacgggcaaattaatcctcattcttggtgccagacataggttgtgggagcagacggggcaaatcaagatcctattgganttacaatccttctatgactcaggcca

SEQ ID NO: 24737 - DNA, 1186 bp, Oryza sativa
  Clone ID: PAT_MRT4530_29693C.1
gactataccactgcccatgcttagttaatgtcaacactgaaattattaaaaaaaaacttagttaaatacctctatttttgatcttttttatatttgcttccacgtttcagtatgttgtcgaataattttgtatttactttgtactgtttgttgcagatattttgtgagtttaactgggagatggatgattatgaggtttgtactaatttggtagttttgctctggttctacctttggaagtaacctgtgtctggagtcattctgttgaaatgcaggactttgctgatgagaaagttaaagaggaggggctacccgaggatgagagagaaaaaatgaaggaattcctaaaaggagaaggtagagagagaaaaagagagctgaaacaggctaaggaagctagaaagaaagctattgatgatatggatcctaagatcaaagaggggtttgaaaatatccaattttacaaattttatcctgtaaaaactctagatactcctgatgtaagcaacgtaaaggcaaggtacatcaatagatattacaggaatgcacaccatctgatgtaattgcatccaatcgtgcattttcactgagcattgccaaagaactgagctgtcaaacatggcaccgaaattttggaagccgtggttgattttgcaaggggttatgtgcgggctcaacggtgttggatctggtgatggtggcgctaataaaaaatcatattttgtcgccagtggtcatggtgctgatgctgactgtcatggagcatggatagtggctagcctagtggccccactagtcagctgctacgtgctatatttgccaggcaagttggtttagtgaaaagaagcagcgccatccatggtactcgtccagtccgcgggatctcgtgtcgcgaattcacgagcagccacggtcgaaaaggagagatgcaggattgcaacgccgtgcgccgtgcgtgttgtgacacggcatcttaatttcgcaccaaacgaaggcgcaaccttagctggagaaacttgcaggctacctgaagcttgaagagttcagatcaattggtcaactgaagattagtttacacctgtcaccaatttgtgcttctctttgatttgtaagaagcatagtaaattttgatgatttcagttctatagaaaaaatcctataaaaaccttcgaaaaaaaaaaaaaaa

SEQ ID NO: 24738 - DNA, 126 bp, Oryza sativa
  Clone ID: PAT_MRT4530_29694C.1
agaacccacacagaggtcagcttgatgaactgcaagggttaagattaagcatttatgacccgatagaaacgtcagatggttagcttctactaagacttgacaagatgtttaagctagatctttgca

SEQ ID NO: 24739 - DNA, 471 bp, Oryza sativa
  unsure (1)..(471): unsure at all n locations
  Clone ID: PAT_MRT4530_29695C.1
ttcgcccgcttaagctcacagaccagnncnaccacgnacaacagcagaagtgagttagggagaagaagacaagggacgaggaggagccgagcnagccagccacggcgaggcgcgcacgcagccacgccgacgccacgcgccagcaaggggcgccggcagaggcgagcgcccccaccgacgaagcggcggccgccggccgggggcccggccacggcgcccgccacaagagcaagcagggccgcgagacacacgagaagccgccggagccggagccgaagccaaagccaaagccncancccaaacccacgccaaaaccngagcccaagccagagccggagcccaaaccagaacccgagcccgagcccaaaccggaaccaaagccagaaccaaaacccgagcccaagccngaacccaaaccaaacccagagccaaaaccggagcccaagccagagccaaaaaccgagccggagc

SEQ ID NO: 24740 - DNA, 396 bp, Oryza sativa
  Clone ID: PAT_MRT4530_29696C.1
atggcatgtaaggaccggttcacaggaaaccctgtaagggtgggcgtgatggagttgggtcgggccccggttttaaggtttgattggcttatggatataccgcggcacaagagggggctgcctacccctgttttaagggtaggggcgaaacttgcgaaggggttatgcgaagggtcctattacagtccctgtccgaggtggaggagcgtggaggtaggagaggtggcggtacgcaacggcagcatggcgtgccttggaggtggtggaaggggggagagtaggagagccaagggggcgagatgttggtggtatatattttgcacttcacagccaccaacattaccaccaacaaaaaccaattttcactggagggctcttaggaggcctgccttataa

SEQ ID NO: 24741 - DNA, 252 bp, Oryza sativa
  Clone ID: PAT_MRT4530_29697C.1
atggcgccggcggcgactattccaacaggcgatgatggcagcggccttccccaccgagcagcggcgacgaagcttctcggtgacgtgttggcacatcagatccccaccatagcgtcggtcatcggttcagaatctagccccccgagttcgcaacctccattgcagcgaggtggcgagaagcagcacgtgatggcctcatcttgtgggggcgaacgaaaaatccctgcatttggttgtgattttgggaattga

SEQ ID NO: 24742 - DNA, 519 bp, Oryza sativa
  Clone ID: PAT_MRT4530_29698C.1
atgagtagcccaaaacttccggagttcttgagccaggaacttccgggcagcagagataatttgaaaactgagaagaaaaacaggaacttccggacagcacttaggaaaaattttgctttgaaatggcgcccagaagttccggccagaacctccgggctcgacctcggctgcagcggatccgacgaggtagctgcggatcaagtttgcggcgacaaattgagcttgccagctccagatcgacctaggtggggtagattgtgggaggtggctacatatcgagtgagacggttgcggatcgagctcgctggctacggaccaacatcggcggtcaccgacgccgcctcatcaagctcgggttttggccttgccgacgatgaccaccgccaccttacacagggtgtgggggcatcacacggggccatgccttctcccaacgtgctacttgagctgtgccacaccccacaagtcctcaaccaggcccagcggaaatggtcaattctcactttgttgctcggttag

SEQ ID NO: 24743 - DNA, 423 bp, Oryza sativa
  Clone ID: PAT_MRT4530_29699C.1
atggcggctggacggcgaggtcgcggcagcggtacggtgaggtcgcggcaacggcgtggtggtggggctctccgcggcgttggaggcgcggcgatggggctctgcgcgactccagcgatggcgtcgccagatccagttgccccgccagatctggccgaggtgacgacggcggcgcggcggtggggctctacgcggccggcgacgggctcggtcggcgccggcgccctcgggcgttggcaggtggcctgtagctccggcgcgtttcgtcggcgacgacggcttcgggtcggcagcggctcgcgtggcttcgctcagaaggtttatgctccactagaggatgttcggtggttctggagacctcgtttgctttatgttgtcgaagctgcttgcctttcggtttttgccagttttccgtttaattaa

SEQ ID NO: 24744 - DNA, 825 bp, Oryza sativa
  Clone ID: PAT_MRT4530_2969C.1
atggaaatgtatggacttaagtggtctgacccttggcggctgcagcagcttcaaacggatgacattgcaagggtggagcgcatcaccaaggagcagagtgaggcccttctgctcctctcctccctccaggacctcgagttttactcctgccggaagctgcagtccctccccactgggttacacagactcgtcggcctcaagatattagagatcgactggtgtccagccatctgttcactgcccaagggtggccttccgagttcattgcaagaactagatgtctgtcgttgtgagaacgaggagctcaaaaggcagtgccgcaagctaagaggaactatgccctgcttccccggcagtgggtgtagcctgcaagtccctaacgaaggagtcaaggaggctgctggttacaagggacattttcggccgcccggcccgcatggttatctgacttggcccgggctgttttgcagactcctgcaagatctcatcaaccaccgcctgaattgaggataggttgttgtcgaagacccgagcattcctctccagtcgacgaggtcgtcttggtccattggcgcagcaagagtgagcctcgcgatggccaacaccttatcgaggcagtgcccaagcccgccaaagctctttccagcaggggaacggctgcatgccggagaagaagagctggtaggccgaactcgacaagtattgatgatcactagaccatcgccggaccatctggtcgccgacgtcggggatcagagtagtagcctcgatcacttggattatgtccctcgtccactgcctatggaggatggcctccgccaccat

SEQ ID NO: 24745 - DNA, 216 bp, Oryza sativa
  Clone ID: PAT_MRT4530_296C.1
atggcaaatccagggttgggattagtcaggatgggaatggcctcccccacccgcggctcctcgacgtgcctctttccgccacaaccacagtcgacgacgtactcccctcgcgacgatgacatggtggtccggacggaggtggcaggggtccaggcgacggcctccaacgatgccacccgtgcaaaagagggtggcaagacggtggtcagcgcctaa

SEQ ID NO: 24746 - DNA, 312 bp, Oryza sativa
  Clone ID: PAT_MRT4530_29700C.1
atggcgcccttgggaggaactctacggctgtgtggtagctcgtgggaggaggctacatcggcgggggcggctgagcaagcagcggggctcacaggaggaggaggccgcagcagcatagcactcgtaggagagggatctgcgatggagagagatgaagaatggagcgaatgttatggggtcaatgtggtcgtggaagatttcgacaatgttggctatggtggagttcctggccagcaaaactcaggtgccggattctcaagtacaaagcggatgacgtctcacatgagtgcgattgttgtggttaagtccacg

SEQ ID NO: 24747 - DNA, 1814 bp, Oryza sativa
  Clone ID: PAT_MRT4530_29701C.1
atggcgttcaacgacgatgagaagcctgctactactccaattccgaatggagggagcaaacagggcctcgtgacgatgaacatcccgacgtacagcaagaaagatgtggctctgacggcggactcagtgacggctgtggtggagatcaaggcgacgtcctccaccgccgtgagggagggcctggacctggtggccgtggtggacgtgagcggcagcatgcgagggcacaagatcgagagcgtcaagaaggccctgcagttcgtgatcatgaagcttacccccgtggaccgcctctccatcgtcaccttcgaaagcagcgccaagagactcaccaagcttcgtgccatgacccaggacttccggggcgagctcgacggaatcgtcaaatccctcattgccaacggtggcaccgacatcaaggccggccttgacttggggctggctgtcctcgccgaccgcgtgttcacggaatcccgcaccgccaacatcttcctcatgtccgacggcaagctcgagggtaagacctccggtgacccgacgcaagtcaaccccggcgaggtctccgtctacacctttggtttcggccatggcacagaccaccagctgctcacggacatcgccaagaattcccccggcggaacgtacagcacggtgcccgacgggacgaacctgagcgcgcccttcgcgacgctgctgggtggcctcgtcaccgtggtggcgcaggacgtgcggctgacgctcacccccaagacggccgacggcgacctggacaagatggaggtggccgacggaacggactacacgcagaccaccgacgccaaaggcgagatcaccatcaaattcggcacccttttcagcggggagacacgcaaggtcgccgtcaacttcaccctcaacgaaagccccgacaccgaggagtacaacgcgaccttagcggtggcgaggcacagctacgccgcccaggaggcgccgcagcctgcccagaacatcgtgcggctgcgcaaaccggagccgaccactcccggcagcgacgacggcatcgaggagcggtccgtgcaggccgaggtggtgcgccggaggcacgccgacctgatcggcaaggccagcgagctggcgaatggccagaagctgggcgacgcgcgggaaacgatcatggacgcccagaacgcgctgggggacatcctcctggacgacggcgacaggatggtgaacgcgctccaagccgagctgctgcggctgctggaatacatggagacgcaggcgctctacgacaagctgggccacccctacgcgctcgccaccatcatctcccatcgccgccagcgcgccgctggaaggggcgacgaggaggtcatctccctctacgtcacgccgcgcatgatcgcctacctcgctcaggccaagaagttcgaggagaacccggaagcgccggtgcccagcgctgacgaggatgtcaagcaggagatggctgccaacccactcgccgctatctccgccccgctcggcttctacctggagaacgccatccaggcactgcaggccatccagaagatcatcgccgccaacacaatttgatattatatattgccttgcccgtccaattcgaatttactatcccagtcccagacgcgcatgtgctaagttacgttgttcttcatctctttcaatttcctttctcgcttctgatcatactacttatatgtatgtaaccgatccaataagtgcgccggcccctaagatgtaatcaatctatatatgtaccactgtaatgtaatgcaagaccctttttagagcaaaaaaaaaaaaaaaaaaaa

SEQ ID NO: 24748 - DNA, 339 bp, Oryza sativa
  unsure (1)..(339): unsure at all n locations
  Clone ID: PAT_MRT4530_29702C.1
ttttntttatatatattttattcattttaccaatcagggggttttttaagttttttataagggaaacccacattttttttggtcaccggccagtgaaacctccaaaacaccccacaagaaaaagagaaaacccacagagacaacaacctaaacctggaggcctaagtgagaaaaactaaaactacggggcggggggggaaaacgcctaggccaccactgaggggggggaaagatagaagagatgcacccgcagcaaaaaaagggctccccaaggaccaatggaaacggaaactccaaacgacgccaccaaaaaaagaaaaccgccaggccgcccttaaa

SEQ ID NO: 24749 - DNA, 678 bp, Oryza sativa
  Clone ID: PAT_MRT4530_29703C.1
atggaggcggcggctgccaccgccaccaccttctcccatctgcgtgttccttaccggcggcctgctcttacccggaggtcggagatggacaagctaaacagggtgttcaaacacgtccgtggtctgccaccgtgccagtccaccgtcaccgtggggttcgacgtgctaagcgggctgctcgcctgccagccaaacaggccgctcaccacggtggacgtgctctggtgcgcgcggttcacggaagctgacatgccgcccacccgtacccctattccaaacccactagcaacattgctggccggccctccaacagccgcctcccacgccgctgccatcgccggccatggctgctattcctcttcctcgtcttcacaccacctccaccctcccttccctagtccggctcgccaccaccaccctcccccggtctggctcaccaccggtgtcctccctaggtccggtcatcgctcgagagggggaggggcgtcgaaggtgtttcgcaacgcggttgacgaggaggtgtgtcggaggtgtctcgcgacatggttggtggcggttggtggggaggggcgtcagcagagtctatctggagtaggttggccgagaggggcgccggcggcgttgcgcgcgaaggtggggcgtcagtttcgatggcggcgcacgctgaggttggcatga

SEQ ID NO: 24750 - DNA, 1448 bp, Oryza sativa
  Clone ID: PAT_MRT4530_29704C.1
gggaagctcaccaacccaagaacaagaagtgatcggagatggctcccaagaaggtgctcctgctctgcggagactacatggaggactacgaggccatggttccgttccaagcgctgcaagcgtacggggtgtccgtggatgctgcctgccccggcaagaaggccggcgactcgtgccgcaccgccgtccatcaggggattggccaccagacatatgctgagtcaaggggccacaatttcgcacttaatgcttcgtttgatgaggttaatatcaatgaatatgatggcttggtaattcctggaggccgtgcaccagagtatctcgccatggatgaaaaggttcttgatttagtaaggaaattctctgatgcgaagaaacctattgcatcagtttgccatggacagttgattttggcagcagctggagtagtccagaaccgtaaatgcaccgcatatcctgctgttaaaccagttttggttgctgctggtgctaagtgggaagaagctgatactatggacaaatgcacagttgatggaaatcttgtcactgcagtggcttacgatgcacatcctgaattcatcagcctttttgtgaaagcgcttggaggctctgtaactggctcaaacaaacggatattgttcctttgtggggattacatggaagattatgaggttatggtaccatttcagtctcttcaagcccttggttgccatgttgatgcagtttgccctgacaagggtgctggggagaaatgcccaactgccatacatgactttgaaggtgaccaaacatacagcgagaagcctggtcacgattttgctttgacagcatcatttgacaatgtggatgcatcaagctatgatgcacttgtaattcctggtggacgggctcctgagtaccttgcactgaacgataaagtcattagccttgtgaagggcttcatggataaagcaaagccagtcgcctcaatttgccatggccaacagattttatctgctgctggagtccttcagggaaggaaatgcacggcgtatcctgcggtgaagctgaacgtggtgcttggcggggcgacatggctggagcccaatcccattgaccgctgcttcaccgacggcaaccttgtgaccggcgcggcatggcctggccacccggagttcatctcccagctcatggcattgctaggcatcaaggtctccttctgaagcaacgagaggtcaggtcccagcgtttttgcacgcgatatagcaagacacagctttgggctttcgtctaagatatatacagtcttaccgatactgtaccagactgtactatgcacacctgatagactgtcgtctgctgtcgttttttgtgcttgaaataataagataattactaaaagggtttgcgtgttaatcgaatcttgtccgctcgcgcagaaggagctgcaaaaaaaaaaaaaaaaaaaa

SEQ ID NO: 24751 - DNA, 1272 bp, Oryza sativa
  Clone ID: PAT_MRT4530_29705C.1
atggctcccaagaaggtgctcctgctctgcggagactacatggaggactacgaggccatggttccgttccaagcgctgcaagcgtacggggtgtccgtggatgccgcctgccccggcaagaaggccggcgactcgtgccgcaccgccgtccatcaggggattggccaccagaagggggaaagaaaaggagagtacacagagtcacacaacgggacagggaaaacatatgtgcaactaggtttatttttgagagctcataatgaaatgacagatttcttgacatatgctgagtcaaggggccacaatttcgcacttaatgcttcgtttgatgaggttaatatcaatgaatatgatggcttggtaattcctggaggccgtgcaccagagtatctcgccatggatgaaaaggttcttgatttagtaaggaaattctctgatgcgaagaaacctattgcatcagtttgccatggacagttgattttggcagcagctggagtagtccagaaccgtaaatgcaccgcatatcctgctgttaaaccagttttggttgctgctggtgctaagtgggaagaagctgatactatggacaaatgcacagttgatggaaatcttgtcactgcagtggcttacgatgcacatcctgaattcatcagcctttttgtgaaagcgcttggaggctctgtaactggctcaaacaaacggatattgttcctttgtggggattacatggaagattatgaggttatggtaccatttcagtctcttcaagcccttggttgccatgttgatgcagtttgccctgacaagggtgctggggagaaatgcccaactgccatacatgactttgaaggtgaccaaacatacagcgagaagcctggtcacgattttgctttgacagcatcatttgacaatgtggatgcatcaagctatgatgcacttgtaattcctggtggacgggctcctgagtaccttgcactgaacgataaagtcattagccttgtgaagggcttcatggataaagcaaagccagtcgcctcaatttgccatggccaacagattttatctgctgctggagtccttcagggaaggaaatgcacggcgtatcctgcggtgaagctgaacgtggtgcttggcggggcgacatggctggagcccaatcccattgaccgctgcttcaccgacggcaaccttgtgaccggcgcggcatggcctggccacccggagttcatctcccagctcatggcattgctaggcatcaaggtctccttctga

SEQ ID NO: 24752 - DNA, 510 bp, Oryza sativa
  Clone ID: PAT_MRT4530_29706C.1
atggtggcgacaacggcggcggcaacggctcgacgttgggaggaggcggtggtggcgacgcggcgtggggaggaggcgacggcgacggcccagctagggggctacgacggcggctcaacacggggaggaggtggcggtggcgacttggcatggagagcaggtgacagcggcagcccgaccaggggtgacggcagcggtggccaagatgcagagaggaggaggcggtggcagcgaccaagaggcggcgacttgatgctgaaggcctctgtgcaattcgaccgcagaagcacggcctacaaaaagcccaaaagaccgagagaccagaagacttcttcgccgccgcgcggccgcggcagatatccggggaccgtggccgtgtccttggccaccgggatcacgcgcggtctcgcggagatcgtcgcggactcgcgcgagggggacggcgccgtggcgtatgattcatcctcccgcaaacctgccacgcactacgcaaaaggtaaggagctctaa

SEQ ID NO: 24753 - DNA, 2415 bp, Oryza sativa
  Clone ID: PAT_MRT4530_29707C.1
atggccgaagtacttctgtcaagttttgccgtgtcaattattggaaaaataattttgtttgttagtgaacacggtttgatggggattaaatcagacaggagtgtgcatcaagaactggggaagctacagaattcgttgcaagctattagtggagttcttctagacgcagagaggaagcagagtacttctagtgcactcaaggaatggctgcgaaaactgaaagatgtcatgtatgacatagatgacattttggacgatgcgtcaactgaaactttgaagcgcagagttagcaaagatgtggttactcaaaccaattgtgtacatatttctcgattgaaattgagaagaaaattgctcaaaaggaagaagaaatggagcagcagaataagagaagttcatgaaaagcttaacgaaatagccgctagtaaaaaggactttggactgaccgattggacagtgggtggtcagtgttctgaagaaccagaaagagaatcatattcttttgtgtatcaacctgatataattggaagggatgatgctagagatgagattgttagtaagatactaagagcagcagaacatcatgatatttttgtgcttcctctgcttgggcttggaggcattgggaaaactgaactagcaaatatggtgtatcatgatcaacaaatcagggagaggttcagcaagatgatgtgggcctgtgtctctaataaatttaatctgaaaaatatactacaagatataatcgagtctgccagtggtgagagttgcaagcatctaaacttggaacatttacaaaataagctcaggggaattctgcagaatggaaattatttcctggtattggatgatctgtggactcgtgatgtaaatgaatggagagagctgaggaatttgttgtcaagtggtgcaaggggtagtgtgataattgttactacacgcgaaaatgttgttgcatctatggttggtacctcagacccgtacaaggtgggtgcactcccttttcatgagtgcatgcaaatttttaccagagttgcattcagacaaggtgaggaaaataaatatccgtggttgttgaaaattggagagtccattgtgaagaagtgtgctggagtaccactggcaataaaatcattgggttctctactatttaccatgcgtgatgaaactcaatggctacgtgttaaagaagaccacttgtgcaaaattgtacaaggtgacagagatataatgccagtgctaaagttaagttacaatgctcttccagctgcccttaaaccatgtctttcctatttatccatatttcctaaggacttcgaatattacagaagatgcataatcatgttttggatggcacatgggctactgaactcgaacaaattgagtgaagaaatagatgttggtaatcagtacattattgaattgataggaagttccctttttcaagactctctaattacttttgatggaagcatgccacattgcaagttacatgacattgtacatgatcttggtagatatgttttggacacagacctagctgttgtgaactgtgaagggcaacaagtctcagaaacagtcaggcatctagtatgggaccttaaggatttcacacacgagcaagaatttcccaggcatttaatcaaagcaagaaaagctcgaacttttattagttcgtgtaatcatggttctttaagcaaaaaatttctggaagtgctgctgtccaagttattgcttctacgtgtattgattatatccggagttagaattgacgaactcccagattcaattggaaatttgaagcacttgaggtatcttgacctcacctggaacaaaaccataaaataccttcccaattccctatgcaagctcataaaccttcagacacttgatctttatcgaagtgaccaactaatcgagttgccgagagatgtaaacaagttaatcagcctcaggtacctgagtttgacatcgaagcaaaagcagttgccagaagcaggacttcgtggctgggcttcactaacatccctgcagcttcactcatgtagtgaactaacatcactgtcagaagggattggctcgttgactgccctacagatgctgtggatcagtgattgcccaaagcttccttctctcccagccagcatgacacacctctccagtctgcgagagctgttcatcgacaattgcccggagctggatttgatgcatccagaggaggccatggatgggctatggagtcttcgatcattgcagatcattggacttccaaagctagagcgtcttcctgacactctttgttctgcctcgggttctcttcggtatttattgattgagcaatgccccaatctaagggagcttccaagcttcatgcaagatctcactaaccatcagaggcaggggggtattcattaa

SEQ ID NO: 24754 - DNA, 270 bp, Oryza sativa
  Clone ID: PAT_MRT4530_29708C.1
gtttgctgaatgttacaacatagcattgaatataaagcatacacgggcgcatcagggtctggcacgggtccattacctgaaaaataggaaaaaggctgcgtatggagagatgtctgaactaataaaggtagctaaagacagtgcatcggcatatgaaaaacggtcggaatatggtgaaagagatgaagcaagatgtgatctcaatatggcatcacttttggatcctacaaggtcttacccttacagattacagagcagctgttctgatgg

SEQ ID NO: 24755 - DNA, 423 bp, Oryza sativa
  Clone ID: PAT_MRT4530_29709C.1
atgtgggggattgagactctgatgagcagaactgaggccggcccacgggcacgaggcgggagaaagggagggcggccggccggcgatggccgacgcgggagaaggcgagacgatggctcctcctaccgcgggcgcgaggcgggagagagggagggtggccggtggcggccgatgctggggcgacggcggccggtgatggccgacgcgggagaaggggagacgatgggtcctcctaccgcgggcgcgaggcgggagagagggagggcggccggtggcggcgccggccgacgctgggccggcgatggcggccgacgctggggcgaacttcgcaagcagacgcacggccccacacaggcacgactcctcccttgtcgcgaacttcgcaagcagacgcaggcactagcgagcggcagcggcgagtga

SEQ ID NO: 24756 - DNA, 201 bp, Oryza sativa
  Clone ID: PAT_MRT4530_2970C.1
atggagcaggccgtcatggtccaagtgacggcggcccggctccgtctccgcgtgcgtgggaaagcaacggagacacgtaggatccgtacgctatttcttcaagtgagcctgagggagagggagagcgctggtgatggcgtgggccggtgtagcgcctcggctggggcggcgctgcgcggtcatgcgggaggtggtgcctga

SEQ ID NO: 24757 - DNA, 610 bp, Oryza sativa
  Clone ID: PAT_MRT4530_29710C.1
agcgtccagatgatcctatattcctacaccatacagatagtatccttccacagccattactcatatactggtttagagtattcttgacttgtcttcctcctccagaggatatgattgttcagggttagcggcgttgcttgtacattgtcccaaatttgaggtattatacactgcacaggtattaggggggatttgcatgacaaggaaatttgaagagtatccagttgaccacatctaaaagctgtcttacatgtgatctttttctttagtgctacattgatacatttttattgcttcttaatgcaaccgacatgaacagggaaccttgaataagtgccatagctgtggctcactaatataactgtcatatgatccatgacagcttgaaatataagtgtgaaggtggtggcaacactagcttttggatgcaataactttcaggatatgcgacattgatcccattaaccagatgatgccttctccttcttctctttattttttttcagggcacccaaggcagctacgatgatactaagccttggcctagacgacaatggctcatcgctcaccgtatgatgctgtagcaaatctatatgcccgactaatctct

SEQ ID NO: 24758 - DNA, 1552 bp, Oryza sativa
  Clone ID: PAT_MRT4530_29711C.1
cccacgcgtccgaaccagctgagctgagcgaccaagaactcgggacgactcaggagtcggaggagacaatctcactctctccctctcccctctcctctcccaaaatccacgccgagcccgccaaatcctccccccggtgcgactcgccacggatcgcgcgccgccggcaatgggggccgccgcctgcgacgccgccgtcgaggagctcactcgcctcctggaccaagtcgaggagccgctgaagcagacgttccagaatgtgcaccagggctatccaacagacacactagtgcgcttcctaaaagctagagagtggcatgtttcaaaggcttgtgatatgcttgtggattccttgaattggaggatacaaaatgaaattgatagtatactggagaaacctataattcctgtagatttatatagatcaatacgtgagacacagcttgttggattatcaggatactcaaaggaggttcattactatgtgcaatctcatattcaaatcaatgagtaccgtgaccgtattgttttgcctatggcatcaaagaagtttgggcggcctattagcacctgtataaaggttctagatatgactggattgaaattgtcagcactcaaccaaatgaagattttgactgcaatatctactgttgacgatctgaattaccctgaaaaggcagagacctattatatagttaatgctccatatatattctcggcatgttggaaggttgtgaagcctctcttgcaagagaggacacggaagaaggttcacgttttgcatggttgtgggagagatgagcttctaaagattatggaccactcctcccttccccatttctgtcagcgggaaggctcaggatcatctaaaaattcgtcgaacgacgtcaacaattgcttctctctcgatcatcctttccaccaagagctctaccactacattgacgagcaggcattgaaccaggagctcatcaagcagggctccctgcatgtgaatatccctgaccaagatcctgaggatgccaagatcgtcgaggtcatcgaagccgagttccataagctcggcgagcagaacggttctgtcaatggcgaacacaaagaatgaacaggtggtcgttgaagatgatcagctgccatagcttacctacaacacctttggtggtttgcttctgacgattcttttctgtgtcgctgtgttggcatggccacccctgttgttttcctgggctataggtgttacagatttacaatagcacattcctgcagttgtccatgatgcaaactgaggaaagaacttggtcacggtataccagttgaaatagtcagacataatcacctgtaaacttgcaatgcactatccaatatctctatatatgtatgctaatcttatctgataccagggaaatcatatctgaattctgaaatcatcttcagagaaaatgtagtactgagtcggtaacaaacgatacattaccagttcactatcaatctgtcacctaaattctcatatgattttgtctggttctctgctagaaacttgtggtatttatat

SEQ ID NO: 24759 - DNA, 1029 bp, Oryza sativa
  Clone ID: PAT_MRT4530_29712C.1
atgggggccgccgcctgcgacgccgccgtcgaggagctcactcgcctcctggaccaagtcgaggagccgctgaagcagacgttccagaatgtgcaccagggctatccaacagacacactagtgcgcttcctaaaagctagagagtggcatgtttcaaaggcttgtgatatgcttgtggattccttgaattggaggatacaaaatgaaattgatagtatactggagaaacctataattcctgtagatttatatagatcaatacgtgagacacagcttgttggattatcaggatactcaaaggaggaagatgtttatggaagtaaggtgttgcctactgtaggaggcatcccagtatttgccattggtgttggacagagtacatatgacaaagcttcggttcattactatgtgcaatctcatattcaaatcaatgagtaccgtgaccgtattgttttgcctatggcatcaaagaagtttgggcggcctattagcacctgtataaaggttctagatatgactggattgaaattgtcagcactcaaccaaatgaagattttgactgcaatatctactgttgacgatctgaattaccctgaaaaggcagagacctattatatagttaatgctccatatatattctcggcatgttggaaggttgtgaagcctctcttgcaagagaggacacggaagaaggttcacgttttgcatggttgtgggagagatgagcttctaaagattatggaccactcctcccttccccatttctgtcagcgggaaggctcaggatcatctaaaaattcgtcgaacgacgtcaacaattgcttctctctcgatcatcctttccaccaagagctctaccactacattgacgagcaggcattgaaccaggagctcatcaagcagggctccctgcatgtgaatatccctgaccaagatcctgaggatgccaagatcgtcgaggtcatcgaagccgagttccataagctcggcgagcagaacggttctgtcaatggcgaacacaaagaatga

SEQ ID NO: 24760 - DNA, 264 bp, Oryza sativa
  Clone ID: PAT_MRT4530_29713C.1
atggagcgtctgaaccttgtcgagtatgagatgctgaaattctggccatcaatgctggactttgtttcccctgagtatgttggcaggattgcacggtacctcccggtaccatttttatccctggcgcggtaccactttgccatgtgcggtggaagggtagcgaggtcttttcacatcatcctggatcgatccctcggctgcggcaacaccggcacagacgcggcttcagctcctggggactccggcggatgctgccgaggctag

SEQ ID NO: 24761 - DNA, 370 bp, Oryza sativa
  Clone ID: PAT_MRT4530_29714C.1
gtgaaaggggacaaacatcatacatgtggacgggccaaatgtttcaataccactatagactggcgtgcataaatacaatcgatcacaacgctgcaggtgaactgctgaataagaggagtgcagaggctatatatggcaggctgacacatgacttcttgagcatgtccagagagggggacttttccaagctggatagtgcgatcctgaggccaataaacagacagtttgagggaggaatctaccatggaaggatccagatgtcattgtactatgccgttaagacaccataacttatgctgctcactccaggtgtaagatgtgagattcaaaagaagatctgattgagcatatacaattaccacgctgagca

SEQ ID NO: 24762 - DNA, 279 bp, Oryza sativa
  Clone ID: PAT_MRT4530_29715C.1
ccaactctttccattgatagtgaagtcggtgaccaaaacttatcatcgcttaatggtgggggtatgaatttcggggcacagtcttcccaactttttggggaagaaacataagaataatgcgacatctacttgttaactaccatggcaagagctccaacatcatcaggttcaaggtgattgtccaatgagctgaactagggcatgcagaccgtccataacagatggaaggttctcgcctactacattttcccataccaacaggacattaccagggggaag

SEQ ID NO: 24763 - DNA, 1099 bp, Oryza sativa
  Clone ID: PAT_MRT4530_29716C.1
gcacgaggctaagctgagaacttggtggcaataacactcctctcttgatctcataggacaaaggtggagagctggtcttatccaccaagagaatttcatacaaggacagaacagcgttctcatgttcacatgaggcaatagcaggcaactcatggactttggcaagttctttccaaagatcctacatattgtaaaagtgctccaaggatctaccattgcttgggatagaagattttgagtatcttgggcattcagcattctgccctacgtcgccctgtcgatgcatggaacgatggagaagaggcaaagtctagtggccaactagaaagggttccggtgaccaatgccagaaccttgggtttcacctccctttgatctaaaacgccctcggtacacaagagcgtacccgtgtaaccatgttctacccctgttgtcggtagcaccaagggaggcttcggctttgatgcacggtgtgatcacggtaggtgactcgtaaagcatgggcaggatgccagcttgagctttggtgctgctgctggagggcattggccctagaacccctgctcctggtgtgcggattcttgctgtacctggaatgtactaatctcagacagtcagctcggtcttccggattcaagctgtaccagctgcgtgcccgctcttgccttcacaactcacgttgcgcgaaaaggtttggagagctgaactgtttctcttgcgtctttgtgtgtgttggatttcgatgctgaagatagcaagttggcaatttcatcgtcaacttgatgctgtttcacatgttttggtgcaaacagttgcgggctgtttcgcacaccacattcatgcgacacagtacaagcacagggtatgcgcccaaatgcccaatacaatctgggaattttgtcggtggattataactttctagtggcgaggacaatcgtacaaacatctgttgtctataatttttcacaatttatttacataatgttgtacacttgtgtagtactagcttggctactcgtcgctttctgttaacacgcttttcaaacggttaaatggtgcattttacatgaaaactttatataaaaaaaaaaaaaaaaaa

SEQ ID NO: 24764 - DNA, 375 bp, Oryza sativa
  Clone ID: PAT_MRT4530_29717C.1
atggtgcgcagggtggccaacagctcctccaccacggcgagcggcacgcggaggttggatcttgagtgccgggccgccaccgctctccctccgcccgttggcatcgcggggtcgtcgccggccctggatctgctcctcctcactgccgtgtgcctcttgcctacttccaacgacgagggcgaggggtggaacgggaaacttgattcagcggcaaccggtgagctcgtcggctccacctcaagggagaatcgcctctcgatccgcgccgccgacctcgtcgccatctcccgctcctatgccgccgacctcgtcaccgtctcccgctctgcgtcaccgaccccgtcgccgcccccttgctccgctctgcttcgctga

SEQ ID NO: 24765 - DNA, 288 bp, Oryza sativa
  Clone ID: PAT_MRT4530_29718C.1
atggcgtggtggtggggctccccgcggcgatggcagcgcggcggtggggctctgcgcggctccgttgagggcgtcgccagatctggtagccccgccagatctggccgggctgggttcctgggtgtgaggtggtctctggtcgagctgcagggttggctgttgaggtggagttggagctgcttgtcttgcaagctcggcaacgatgaccctcaacgaacgtcccggcaacgcgacgagggttttgaggtggagcagttcgagagagccttaggtgaaaaccttgcctag

SEQ ID NO: 24766 - DNA, 211 bp, Oryza sativa
  unsure (1)..(211): unsure at all n locations
  Clone ID: PAT_MRT4530_29719C.1
taatcgaataatggtgcagccggttccntaccgaaccctgcngtgtnctactgtgttttcctcttccttttatccccntttntctccttactcccntgaacattgatgtntcatcgtaactntgaaataaatgaaataatnccgtttcctnctaaaaaaaaaaaaaaaaaaaaaaaaaaaaaaaaaaaaaaaaaaaaaaaaaaaaaaaaaa

SEQ ID NO: 24767 - DNA, 489 bp, Oryza sativa
  Clone ID: PAT_MRT4530_2971C.1
agctagctccctcaggagctcatgggcgctgcactccctgtcatcacgtctttccactaggagagaccattagtgttctaggtaacgccccactatcccatgttatagaccgagcgctcgactatcagcgtcagagattccatatgatcatggtgaaggtgtggtgtcacctcacacgaagctaagtcatttagctgccagatcatcatccatcacatggtcagctgtgacctctagatcctgaccgatcacatgatgatgctggaccacctcttacacctatattagttgtacccgctggatcagaaggctgtatgagaggaagatcggacggcatacgaatagatgacctagtgtcgctcagcttctctccatagaattctgactcaacttatgactgtggagatatgatgtggcggagcactgcccttccttcatggatctggaacacgaatatgcctacaggtatctggtaccttggaaacatca

SEQ ID NO: 24768 - DNA, 357 bp, Oryza sativa
  unsure (1)..(357): unsure at all n locations
  Clone ID: PAT_MRT4530_29720C.1
aacaatattgtctacaccatctggaatcttgtttaacactagtattgtagaatywkcnattgtcwgyatactaccaktcwagtawtctttktycctkgtttkscycttaattgtctnyttttctgtctaagtttcccwctaactkkcaaattcacccactatkywgttattttyccamccaaacatttagtccwhkgkgtcwmycatggtatatccysbtgttadggtakrtatctmtgatggctaaaygtgtkgtgtcactkgggtatgvcytcyaccagaccaatgtgacatgkkyggcagtccaatgtgtcgccbtcycbgyagasagkcsaatgtgttgtcatgtcagyytac

SEQ ID NO: 24769 - DNA, 231 bp, Oryza sativa
  Clone ID: PAT_MRT4530_29721C.1
acgttcgtttcgttggggctcgtgcatgccacgtcatacctatacgatagagacaactatatgtaagtgacaggacgtggtgctacataggtcgccactgagtagagctctgagcgcatacgaacttaagcggctggtgacacacgccgcctgatgccagcgtgggtaatgacctgtagggcaccgaccgttcggcttgccctgcaggggtgcagcctgaatggccaatgg

SEQ ID NO: 24770 - DNA, 321 bp, Oryza sativa
  unsure (1)..(321): unsure at all n locations
  Clone ID: PAT_MRT4530_29722C.1
aaaaaaaattagaatggcataacgattatcnnaaccacangcangccnngggtccggggggggaagttcaagggagaccaataccgacatttatgatgacaacactaactgggacattgtttgcacgctgatagtagaaagaagcaaatcccgtatttacactgtggccagaaggcggatgctgaggggagaacatactatccaaactggccaagaaaactgcatgaaatttcataaaggagaaaaaaaggaaagtatattgagggaagaatgactttgatgccaacttgcgcgagtgcaagcatggtaaactgtcacaaa

SEQ ID NO: 24771 - DNA, 1769 bp, Oryza sativa
  Clone ID: PAT_MRT4530_29723C.1
agggggttcggccgaaccgccaccggctcctttgatcctagccttccaccatcttaaaggctagattcatatcccctcttctcaagatcccacaaactttttccttggaccgatgggtaaccctgacccaatagagtttatcaatgccgaaacaaataggatcccatacaggcagaccaatccagatttggtcaagtggaagtcaacattcaggtcatggccatctcctcttaaaggatacaaaacctggtgtaagagagtatcggctgccaaacagaatcattgggaggaaatgggaatagctcagtgcttgtcctagtctttagccgatatcaagaagaatgagccaatgctatcggttgctgcatatttctggtcgaataccctcaactacttgtttcggcaaggtcctatcaccccaactctgccagatgtgaagatgctaatatgcctggacatcacgacttccatctatccctttcagctagacatcaagtgtgatcatactcttaagacaaaacagatccatggaggttggaaaggatacatagcaaaacataaaggcacaggatctgtttctgaaagggaacatgttgcattcttggccaagtggttggagagagatgtattctgcggttcaacttgtgggccaacagtcaactatcaacatttcgctcagttcctggtccagaagaagcacattcctttgggaaagtatctgcttgctcagtttatcagatgcttcactctgccgcttgtaacattgtgaaagatgaagtgatcaattatggaggtccttggtggttcttgcaactttggatcaatatgcataccatcttggcacttgacagtccatcactagctctatcggctttgccaactgattatgccgataatgaacatataagcactagaagaagcatgtcctttggagaagcagctatagtatattccagagagaatcagtcagttgatggcttcaaggattgattttatcgattttatggtggatttgccttagctgccagggtttggttgccgatttgagattaaatgacttgaaagatccaattgacccaagatccagagaaaacgttatagcagccataactccttgcatactcccaactgatatttctcaaggaaaaactgccaagccatctttcgaattctatcatcctatatcatctttcgaatttggacttggacaacttcccatcagtttgtacttcatcaggatggttcaagctagagatacagtaccatcagctctgatcatgcaaaaatggttaacacttgaaggacctgttcttggtacttgcaatgaaatccaccttcacctttttaggcatccgtcatttgatcaatggtgggtagaatggaagaaacacctttttttccatgtcatcaaacttctgccttaccattgtggacgaaaagatcaggattaatgtaacagaatagcctgcccccatagtaagtgtgagcaatcatccgattgtatatatccccgcactatcactttcagggaccaaactgcttcctcctctaattggcctcaatgccccaaaggtaacatctttgctagatagttcaagtactgagccgatcatagagatcccaagaagagaaatactggcaagcgcaagaaaacaaatcaaaaaccatcagccaagaagaagaaaacctcacaagatgatgagctagctgatattgatccagaggttgatgccttcttggataatgaagttatgggcgaagaggttgat

SEQ ID NO: 24772 - DNA, 346 bp, Oryza sativa
  Clone ID: PAT_MRT4530_29724C.1
atggccagaaccctccacgaccccaactccaggtcaggaggcgaaaagcggcgcccactccaactactcctcccgtggtcgcgccgttcgcccacgtcgcgcacggaccagtggtcctcgcggcggagcgggagcagcgttggatggcgggagcggccgccgcggcgctcgcggcggaggacggcggagcgcggcccattcgagcacgaagatggcggcgccgaggccgccgacgagcttgaggatgacctcgccgtcgtccttccagacgtaggaccgcagctcggcgaggaagtcgccgacctgcgtgaaggcgagcagcgcggcggcgccttggaagatggcg

SEQ ID NO: 24773 - DNA, 767 bp, Oryza sativa
  Clone ID: PAT_MRT4530_29725C.1
atgactcatcaagatgttcatggagacatgactagcgataattcaattattgtagctgcgtcgcgcacgcaccagtggtcctcgcggcggagcgggagcagcgttggatggcgggagcggccgccgcggtgctcgcggcggaggacggcggagcgcggcccattcgagcacgaagatggcggcgccgaggccgccgacgagcttgaggatgacctcgccgtcctcctcccggacgtaggaccgcagctcggcgaggaagtcgccggcctgcgtgaaggtgagcagcgcggcggcgccctggaagatggcggtgactacggcgggagcgggagcatcgcgttccacctcctgaagcagaggcagctgttgaagcaacaacgggagcagcagctcgccgcggcaacagcggcgacgtggggcacgcaccgcgccggcgtcggcccgccgcttggtctgaactcgtccggctggccgccgctgcagaagtcccaccagcaggcgtcgtccgcggccggcatgcgcgccgtgttcctcagccctccaggaggcaaaccggaacgcacgggcaccggcgtgttcatcccccgccagggcggcgcccccactgagcccaagaaaaagctaagtgcacacctcctctgaaaaaaaattaaataagacgagtggtaaacgttgtaagcaaaaactctcaaaatccctctatactgtaggatggagggagtactatgctagttagctctagtcgtatgatgattggagcctcgtgc

SEQ ID NO: 24774 - DNA, 1225 bp, Oryza sativa
  Clone ID: PAT_MRT4530_29726C.1
tttttttttttttttttagagacaaaatctggatctctctattatgttaatcacaagggctccatgtccaagtatataaatctacaatacatacaagggggggggtatatactagtataatgcaagtatccgctacacatatgtactacgccaaaacgaatcaaggtatcaaaagaaggggagggagtaggtacacacacccacgtcagtcgggatcctcacgccgtcgccggcggcgtgccgtgcactgcacgcccttctcactaatcttttagcttaagcctaattaaccacgaacgagccaaccagatgcgagcttgggccagctcagccgacgacgacgtcgtcgacggcgacggcggcggcgaccaccgtgcgccggcacagggggcacgacgcgtgcctgagcagccagctgtcgatgcagcggaggtggaacgtgtggccgcactccggcagcctccgcgcccgctcgccgtcctccaagtcctggaggcacacggagcagccggcgcggtcgtcgccgccggcggcggcggcgaacgtggtgaccgggagcgcggcgatggcgtccgccggcatgcccgtggcggcggcggcgacgccggggatgccggtgtcgaacatctccgccagcgtcggcgcgctctccctgaagggcgcgtcggcggcgttcatctggctgtccaccgcgttctgcaccgccggatccaccttctcccgcaccagccgccccgtcaggaggctccagatcacgtcaaggacgtagagaacgctccagatcccggagtcgtgggagcaccacatggcgacggaggagtcgacgacctccatggcgaccaccgcgccggagatggccccgatcccggtgccccgcaccatgccgctctccgtcgccagcccgatcagcccgccggtgatcgcccccaggatcgtgcccactgtggcgaagacgaaggtgacgatgccgcgagctacggcgccggcgacgcgagccggcaggcgggacatgctcctgctgctgccggcgtcgtcgcggccgccggcgaccaccggaggggagtaggacgagaagctggcgtgcactgctacggcctccatggatattgttggtttgtgctggatttggataaggggaaatatcactgatcgatcgatcgagcttgctctagcagagtgcagagaagaggaggatctagctagctagctttctggtgcctcgtgc

SEQ ID NO: 24775 - DNA, 445 bp, Oryza sativa
  Clone ID: PAT_MRT4530_29727C.1
gctcccttgtatacaagggaaatactaacactaatcaaaattaagagtaaaggtccatcaccggtctctaaacttataccgtggtatcattccggtccctaaactcgtaaatcgactgttcagttcctcaaacttgttcgactgtggcatcccggtccctaaacttgcagatcactcgtttaggtctttcaacttgttcagttatgtcaccccggtctctaaacttggatttgaatattatctgggtcaaataggacgggactggggtgacacaactgaacaagttggaagatctaaatgagtgatctacaagtactcccccacgccgtcgacgacgacctcggccggtaccacgtccgccgccggagggaggggccaggggacgggcggtgcgggcggcgcgccggcgcgggtgtcgacggaggccatgaccgtcgacgccgcg

SEQ ID NO: 24776 - DNA, 672 bp, Oryza sativa
  Clone ID: PAT_MRT4530_29728C.1
tcagaggaggtgcgcacttagctttttcttgggctcagtgggggcgccgccctggtgggggatgaacacgccggtgcccgtgcgttccggtttgcctcctggagggctgaggaacacggcgcgcatgccggccgcggacgacgccctgctggtgggacttatgagcgacttgaacctggtgttgggtgagtatacttcgctgctcccgctcccgccgtagtcaccgccatcttccaaggcgccgccgcgctgctcgccttcacgcaggtcggcgacttcctcgccgagctgcggtcctacgttctggaaggacgacggcgaggtcatcctcaagctcgtcggcggcctcggcgccgccatcttcgtgctcgaatgggccgcgctccgccgtcctccgccgcgagcgccgcggcggccgctcccgccatccaacgctgctcccgctccgccgcgaggaccactgcggcggtgggtgggggccagaccggtggcggcggattgcaatgtggaggaggagtcggctacgtactgggcgaacggcgcgaccacgggaggagtagttggagtgggcgccgcttttcgcctcctgacctggagttggggtcgtggagggttctggccatggggggccgagacggcagcctcctagggcatgaaatgcggcgagtatag

SEQ ID NO: 24777 - DNA, 471 bp, Oryza sativa
  Clone ID: PAT_MRT4530_29729C.1
cagatacccatttacagaactactctttgtcaacaggcaccaaagaacctagctaatttttctaattttaaccattataatatttcagactttttttagttgaaatgtcaggtcgtttgctgatagaaatccttgtttaatttgcagaaaaatgatgaagtttgcttgaagcgctgcaagtacagcaagagtcgtccgtctatcaccagttcaaatacatgagcttgcatcatggaacaccctgaaaattgacaaccaagtcttttacattatgcaagctataagttttacattttgatcggtagaatgctatggatgccataactacaggaacggtcctaccagatgctgttatgctagaagtctaatagaccattccaggccaggaaaatatatgatgaatcatgtactctgtttctgatatggaataaagtttatgagttctaaaaaaaaagtaaaaaaaaaaaaaaa

SEQ ID NO: 24778 - DNA, 688 bp, Oryza sativa
  unsure (1)..(688): unsure at all n locations
  Clone ID: PAT_MRT4530_2972C.1
cgcctcgccgccgccggagctcgccggcggcaaagccggcagcgagcagggaaggcggcggcgaggttcttcctcccggcgactccccccggcgtgacgtggacgggacgacgacgccggcgaagaccctccaccgcggccggaggtggcgatggcggcgcggtgtggggaggcagcagatccggcgcctccaaggccggatccgaccaccccacgcctggatctggcacaacggcggcgcgaggtggctgggggggcggcggcagcggcggcagggacggcgcggctggcccggtgcggcagcctgggcgcggtggcggtggctcgacggctgggatggcggctgcctagaggcggcggcggctgggagcggcggcggcagctcggcgcgcggccggtccgggcagcccgggctcgcgcggctcggcagtgcggcggcgagcccccatggcgcaggcaggcctcggcagccgggcagccagggtgacgccgcggtgccctcctcagccgggtgggctatgcggcgcggccagatggggtgcggcggccgggcgacggggggccggtnggggttgcgnccggagccggagcagcagaagcgtctctggcgtcggcgcaagcccagatggcagtgtaaagggagctggcggcggggggtcgtcttctccgttgccggtcggcaccctcg

SEQ ID NO: 24779 - DNA, 720 bp, Oryza sativa
  Clone ID: PAT_MRT4530_29730C.1
ctagtggatcccgcagcgcacgtctcctcctccttgcgacctcgtcgagtccaccaccaacctcgccgccgctgctacagccgtcgtctcccaccgcacgccccgccccgccccccacccatcgccggcgacgcggatccctcctcgacggtgcgcccgcctgagcagccgtgctatacctctgtcgggggcatattccccgccggcgcagcaagctgagcggagaggaggatgccgaagcggacgacgcacacgtactccagcgaggacgccctgccggaggggcccgagtccgacctcttcgtctactactgcaagcactgcgcctcccacgtcctcatcaccgatacagaaatgccaaagaggaagactgacagagcacatgtactagacaagaaaaaacatctctcaaggctaaatgtgaaggaggcaggaaaggtcctgttgaaacggggagaagggaagcttgaaaagcagttccgtatgagttgtttgggatgcggccttttcgtttgttaccgatcagaagaggagttggagctagctccattcatatatgttgttgatggagcactaagctcagtggcggctgaaacaaatccacatgatgcacctgtaccaccttgcatcacacaattggaaggtggccttgtccaagtagccattgaggttgaagaccgggcacaacggtcagcaataacaagagtgaatgctgatgat

SEQ ID NO: 24780 - DNA, 165 bp, Oryza sativa
  Clone ID: PAT_MRT4530_29731C.1
atccttgtcgtagattttattaatgcattcagagacagtcccacaagtaacatgagagaccaagaacaaacaaatcccaaactaaaggcatcgcaggtcacctaccaagggataaccttcgtaagaggcacacacgcccacgtcacacaaggggagcaagacgat

SEQ ID NO: 24781 - DNA, 221 bp, Oryza sativa
  Clone ID: PAT_MRT4530_29732C.1
atggaggatggggtcagatcgggagcccaccgtggcgtacgtcgcggggagcgcggatcaggatcaaggtcggtgtcggtgtcggcgcgcggatcggcgacggacggcggcgagcggatcgagatcgaggttcgtcgccggcctagctgcctcgtcggcgtcggcgtcgagagcagcggcggcggggaggggggagcggctccagaccgaggaggagaaat

SEQ ID NO: 24782 - DNA, 285 bp, Oryza sativa
  Clone ID: PAT_MRT4530_29733C.1
atgcagttaacggccagcgatgtgatggcaatggctgatggagaaatttcttgggccgtgatgtgtggtgtcatgcaggggagttggcagtttttagtggtggagatgggtcccttggagttgagtgacttgagtcccacatatggtgcaacaagggaaaatgtcaatgcttggtgttcactcaagagcttgtggaaggtggccagcgcgtatgcgcgggcacatatattattgaaaggtatcttaaaagtccattcgcaagcttttgagtgggagatggattaa

SEQ ID NO: 24783 - DNA, 321 bp, Oryza sativa
  Clone ID: PAT_MRT4530_29734C.1
atgcatggtaaccttttcagtcttttgaaaccacagtatgtcctgcggttaccacacggttttcgcggtaactgcgcggttaccgcgggggtgcggaaaccacgccaaaaagtctcgcagattggttgtgcgagaccgtatgctcaaccgcggcgcgtggggagtggttcagcggtaccgtatcgcttttgcactctcaccacgcggggaggaggaggtaatgaaaggcaaggggtggcaacagggacaaggatgcaggtggtggtgattctcaagctcccagcttcccgcttacctcgatggctcaatgtccaccgctga

SEQ ID NO: 24784 - DNA, 582 bp, Oryza sativa
  Clone ID: PAT_MRT4530_29735C.1
atggaggtcgaggggatagtgaagctccgaccgctgagagggagagagtgggcgccggctctccggtggacgaaaggcggcgacgtcggcggccacacatgttcccgagaacgacgcacctggggtgggcggtggctggcggagagagtgagggagatggccggaacggcgagtagaagagcttatcttcggcggcaaagagaggtggcggtggtggttgctatggggtgggggagaagggggaaacaggaaaaatggaatcacctcgtcgaggcgaactcgatggcgcgatggtttggcttgcgaagctccggtgagggagatcgggtggtggcggccatggccggacatgggagagaaagagagagagatggagctctgattgggagagaggcggtggtgaaaggcggttgtggaggagatcgagaagtgcacgggcgacgatggcgtgaagattcgaactacggcggccggcttcgtttccttagcggcgaaggaagaggagttggcggcggcgtgagccgtgcacaggaggagggggcggctcggttggggtgtgggctggtttgggccggctcggct

SEQ ID NO: 24785 - DNA, 365 bp, Oryza sativa
  Clone ID: PAT_MRT4530_29736C.1
gagtcggggacgggtcaggcggcggcggaggcggcggcgaagcggagcacgtcgaagcggcggtggctggcgctgggtgacccggacatggagcggaagcggcgggtggcgtcgtacaaggcctactccgggaaggaaggtaagggctcttcgaagagttaagggataggacgtactcactgctatgtggctgtattactctctcacacgacgcttttttttaagtaagtaagtaacgagaccaccacaatacatctgtacgtcggtattttttgctgtttttatattcttgttgtttttgttggtaatacctgagttcatcatttaaagttttgattattggtgtagtaggaaaaatggtgtaa

SEQ ID NO: 24786 - DNA, 147 bp, Oryza sativa
  Clone ID: PAT_MRT4530_29737C.1
atgggtggtgatggcgacggcagcgccatggcatgggcattcgatgatgttgtgttggagaccggcgggtctgggctggccagtggtggggcgccgatgcggcagaacctcaggctagcagaggttgttcaattgctggagcactag

SEQ ID NO: 24787 - DNA, 569 bp, Oryza sativa
  Clone ID: PAT_MRT4530_29738C.1
atgccggcaaggaaaggcaaggcaaaagctgctctgtctagccctctgccggcaaggcagcatgccgcgtcgcccgggcagggagggcccctgacgctggagaggtaccaccgtttcttcgtcgacccatggggcacccgcctcaccatcgaccacctcaaccacatcatctccatgcacggcttcgtcaagctccaccgctccaacaagggcgacatcatgcgtcggctggtggggcaggtggacctgcagccgccgcggcgctccacgctgcaccgcgcggcggagggcccgccgtccgacgccgtcatcgccgccgacgtggtgagcgccgacgtggacgccatcgggtggacggagtgccccatcggctccgtggccgtcttggccgcgtcgcccggggacgcgccggagccggtggagcccgatccccgccccgcggacttcgtgctcgccgggcgccgcgcgcggtccaagcggagccgcagctcggcctacggtcacaggccgcccgagcccgacgacggtggctcgtcgatggaggtggcggagaaggaagatggggagtg

SEQ ID NO: 24788 - DNA, 1362 bp, Oryza sativa
  Clone ID: PAT_MRT4530_29739C.1
atgccggcaaggaaaggcaaggcaaaagctgctctgtctagccctctgccggcaaggcagcatgccgcgtcgcccgggcaggttcccttgtgcagcgctgagcagagcagagcagaggtagcggaaagaaacaagaggaggagactcctagaggtgaaagcagagttgcgtcggggaagagaagaggagaggagaggagagaaacagaggagggaggaagaacctaccatggtgccgagggggcgagggagggagatgcagggagggcccctgacgctggagaggtaccaccgtttcttcgtcgacccatggggcacccgcctcaccatcgaccacctcaaccacgtggacctgcagccgccgcggcgctccacgctgcaccgcgcggcggagggcccgccgtccgacgccgtcatcgccgccgacgtggtgagcgccgacgtggacgccatcgggtggacggagtgccccatcggctccgtggccgtcttggccgcgtcgcccggggacgcgccggagccggtggagcccgatccccgccccgcggacttcgtgctcgccgggcgccgcgcgcggtccaagcggagccgcagctcggcctacggtggaggagaaggaagatggggagtggttgccgccaccgccgtcgactccgccgcggtggacgcgttctccaactccgcctccgccgcctccctcgccaccacacgcgacgccgccgcctcctccgcctccgccaccacgcgagatggtggcaccgccgccgcctcctcccccaccgtactacggccagcccacgttggcgccgcctcctcctcctcccccaccgtactgcggccacccgacgttggcgccgcttcctccccgacccctacacttcggcgcgtcgcccgcggtggtgccatggctgtcgtggggcctgccgttgccggcggcggtgccactggcgccgccgccgttcccgggagcgcctgcgttcgcgcagcatcccccggcgggacagcgacctttctggagcccaccgacggtgccgccgtgttacccggcaccattctggggcgcgccgttctggggtgctcaacctccgccgccgcggccgtcgccgctgccgcactggggccacatcagatcgccgccagctccagcgctgcatcagccacctcctcccaccttgcagctgcagcagcagcaatcgccgccgccgccgccgggagttttctggggcaggccggcgtattagggagggagtgcattgctaagcttgtcctcttgcaatctttcgagccaacacagatgtatgtactgttgatcctaattgttgtttgtaatcacctgttgcagctatgggatcattatggataa

SEQ ID NO: 24789 - DNA, 2532 bp, Oryza sativa
  Clone ID: PAT_MRT4530_2973C.1
cttcaccgccggcctgcctccgtcgccgccgagtggtgcctccgcctacacggctggtctattatgccgccgctgttgggcgtctacgacttcaccgccggcctgcctccgtcgccgccgagtggtgcctccgcctacacggctggtctattatgccgccgctgttgggcgtctacgacttcaccaccggcctgcctccgtcgccgccgactggtgtccccgcctatacggtcggttggtcacaccaccgttgatgggcatcgtcatcttcaccgccggcctgcctccatcgccgccgattggtgcctccgcctacacggctggcctattatgccgccgctgttgggcgtctacgacttcaccgccggcttgcctccgtcgccgccgagtggtgcctccgcctacacggctggcctattatgccgccgctgttgggcgtctacgacttcaccgctggcctgcctccgtcgccgccgagtggtgcctccgcctacacggctgacctattatgccgccattagtgggcatcttcgctttcaccgtcgaccgccttcgtcgccgctgactggtgtcttcattgttattgatggacgactttgttcccacattggccacttctgccatcaccaaggggaatattacaaagctaagtcatcatttattttattctttcgggggctacagatgttatatcatattttttataatatttatcttgattgcttgcgacataatttgagtacaaaagtacctatcgagttatggagttctatcttcctatgctttccgtttggtttgccaatggatggttgcctttgggccgattcctagcactcgggggctcgttggatggaccgagtaacgcaaggtgctaagtattattcggaataaatcaaaagcatagagatgagataaatttattttctgctcttaataattgcaaaagtacccgagtagtaaattctaatccgtgaaactttgttccattaatgatgaactcatgtcactcatatgcatgtttgggaaatgcctaggccgactcccgatgcttgggggctatgactagtcggacagagtgtttaaacgtacagagtcatctgctcggggaaatcaaaattgacaagaggagaaatacatatttataaatattttaaaatacttgattttttctcgagtattatatttatatcagatactactcatcctatatgtttgttctgcaggatctagatccagatatgcataaaagggattcatggctttaagcttatctcttacgctccaggaatggatcagtcagaacatcaccaccggcttgccttcgtcgccgccgactggtgtttccgcctgcacggctggcctattatgccgccgttgttgggcgtctacgtcttcaccgaccggcttgccttcgccgccgccgactggtgtttccgcctgcacggctggcctattatgccgccgttgttgggcgtctacgtcttcaccgaccggcttgccttcgccgccgccgactggtgtttccgcctgcacggctggcctttatgccgctgttgttgggcgtccacgtcttcaccgaccggcttgccttcgccgccgccgactggtgtttccgcctgcacggctggcctattatgccgctgttgttgggcgtctacgtcttcaccgactggcttgccttcgccgccgccgactggtgtttccgcctgcacggctggcatattatgctgccgttgttgggcgtctatgtcttcaccgaccggccgctttgaccgccgccgactggtgtttccgcctgcacggctggcctactatgctgccgttgttgggcgtctacgtcttcaccgaccggccgccgcatctgccgctgactggtgtcaccgcctgcacggctggcctgttataacgccaactgatgctatcttcttcacggctggctacatcgctgtcactactaataggcatcagtatcttcaacacaagctgcctacgtttgccatggctgccgactggtttcttcacttccatggctgcatgattctgccagtgttgattggccttaccatcttcatcgccggtcgtctcgtctgctgctaactagtgccctcgcctctacatctggtttatacagctaccactactgatggacatcatcgtcttccgccgccgactcgtgttatgccgccgccgactggtgcttttatcttcacaactgcgcgtcttcactaccggttcacttcatcacggcaacacaactttgtcatcatggtggagcgacttcatctttattatcttcggtaccagcaaactctattgctgctacttcacaagttttgctacatcaccaaccatgacgttgttgtgaatctcgacatctcggcatgcgatgccatgttattttactacaacaagaggctctccaatattcaggatttctacttggacatcttcaacacatatcttcaatcaagcaataactattcgacgacaagaggctacagttctcgactctatgttcagttgtttcccaac

SEQ ID NO: 24790 - DNA, 438 bp, Oryza sativa
  Clone ID: PAT_MRT4530_29740C.1
atggctgtcgtggggcctgccgttgccggcggcggtgccactggcgccgccgccgttcccgggagcgcctgcgttcgcgcagcatcccccggcgggacagcgacctttctggagcccaccgacggtgccgccgtgttacccggcaccattctggggcgcgccgttctggggtgctcaacctccgccgccgcggccgtcgccgctgccgcactggggccacatcagatcgccgccagctccagcgctgcatcagccacctcctcccaccttgcagctgcagcagcagcaatcgccgccgccgccgccgggagttttctggggcaggccggcgtattagggagggagtgcattgctaagcttgtcctcttgcaatctttcgagccaacacagatctatgggatcattatggataaagatctaattctcatatatttttag

SEQ ID NO: 24791 - DNA, 630 bp, Oryza sativa
  Clone ID: PAT_MRT4530_29741C.1
atggccgccgccgccgccgccgattccacttcggcggtgccacccgccgtggtgtccgccgccgaggacaccctcgcggccgccgagtccgtcggggaccacctcgccgagatggtcgcggcggcgggcgaggaccccgacgccatcgccgagctcccgccgctgcgccgcgcgcgcgcgtttctcgccatggcgaaggccgccgcctccctcttcgcaggcaggcagctctcgcggtgttcgggagttgatccggatgaacaccctatcaagaaggagtttgagaggttaagcttgtgggaggaaaagttaaatcgatttgaggactgggacaaggcaccattgcgcccaaccactacagtgaatacacaggcagcagcaaggttcattggtcactcattgccccatttgacaactgatcagaagaggagcatgcaggcaatcagtagaggagaaggagggagttactctgggaacaagagaaaaccacaaccaccgcggccaaataagaagtctgttcgtgctgccacggaagaattccttgcaaaagcagctctggagcttagtgggcataatgatagcaaggtgaagggccctattaggctcctctctgatgaagatgaggactaa

SEQ ID NO: 24792 - DNA, 627 bp, Oryza sativa
  Clone ID: PAT_MRT4530_29742C.1
gctgcaggggtctgtcagatcttgagcaagctggagatgatgaaatgtgttgttgtttactggattggggtttcatccgatgtcgttgaagctgtcgacaaagcttgtgggggaatcagctgcctgaagactagattgaaggtgattgaggtgtctgcaaaggtcctggaggcgattgcatttggcaacattgttctcccaaccgagaaacgttgtgatgctgtcaatgtttggattggctttgcaaggagaacaaagcctttggtcggacatcccgaacacgatgacgatgacggtgatgctgaagcacctaagatcaacctagacagtgaggtctggcagagcctggaatcagctattgtttcaattgtgctaacgctaccgtcgaacagtcaagctgacattttgtcagattggcttcagtcgaagcatgctaagtgtccagacttgacggaggcgtttgaagtgtggtgttatagatcaaaggctgctaagagaagactctccttcttgagccatgccaatagggtatcttgattcttcacttgtccttcaaaatcaaacacaggggaaatgtcctggctgtttgtactcactacaggcagcacagagtgcctttgaccgaca

SEQ ID NO: 24793 - DNA, 3129 bp, Oryza sativa
  Clone ID: PAT_MRT4530_29743C.1
atggtggaaaagctttacgctgagtctgcgcaggagcagggtaagctgctttgcattgaaagcctgctccaggacctgcatacacttttcaggatggtccataggaagatcagtggcatcaacgacagtgcacttctcatgatcagcgccaacaacgagcagtaccaccagcttctacagaggctctggtctctcacacttgacattgatgacatgctcaacaaggtctcttgctatctaacaaaaacaagggtcctctcaattcaggtacacagctcattcatccttagaaggctcccttttcgacgccgcattgtccataagatcaaacaatcaatagttgaattgcaagaatgctatgcacagacatatagaatccgattcccagccaaacatagagatatcagcacacctatggtttgccaaggagcacatagcatacgaccagaagggatactaggaagggaaaaggaagtggatgatgttctaacaatgatgcaagctgatcatggcaaagctggcctgtcagtgcttcccataaccggaatggctggaattgggaagacaacccttgctcagttagtgttctcacatccatgggctgtcaagacatttggtgatgaccgaatttgggtcgtggtgtctagtagtttcgatgatatgataatattgagcagactagcagaatttctaaacaccaggcaatgcaacacagtggactctgagagccttcagtgccttgtcaagcagcgactatgcgggcgaaagtttcttattgtcttggatgatgtttggggtcagaatctgcagaaatggaagctattgattgaggtccttgagagtgccaagtcaggaagcaagatgattgtgactagtcgcgttccagatgttgtaacaatgaccaactctctcagaccatacactttgaagcgtctcttaccaatcgattcttcaaaccttctcacacaatggatgcaaaattctgcagagttgccgccgcggctaattccaataagaaaaatgatcgctgacacatgttgtggcgtgccctcactactactcagtgcatcaaacaagctcaagagcatacggaagactgaagttgcatggcagcatgtcctgagcagatttgacctagttttctacgcagacccacttctgttggatgcaacttacgtcagttatcaacaactcccttccaatatccagcaatgctttctatactgttcactgttcccagttcatagctttactcccgaacagttgactggcatgtttgttgctgatgatctcataaaactgtcaagcagcaaatctgacatgcatatgtacttctccaagataatgacagaacactactatgatgtaatgcagaaacctcgacacaaagcatacgctatttacaagatgcaccctgggatgcaacttcttgcacaaatgattagcaggggatttcacttagcaatagatgccaggaaggaattagtttggcctgtagaaaatgcaaaaaaaagtgctcggtgcctctccttactcgttgactcgaagacaactgagcttccaacagaattgtttgaaatgggaaatctgaggacactaatcttgctcagagatgaaaagatgcttttgtctgacaagaagtgctcaatcacagacatcccagaagaattctgcaaatgtctgatagatatgcgtgtactacacatgcaatcttgcaggatcaaaagagtacctaagttaattggtatgcttaaaaaattagcctatcttaatctctcccacaatgatatagagattataccagattcaatatgcaaccttcagttcttgaagaatttcaacctttcacgaactgagattgctgaattgccagaatcagttggaaagatgcaagctttgcaagttttggatctatctcattgtgaaaaacttcttcatttgcatgaatctgtaagcaatcttgtgaatcttcaaatcctaaaccttgaaggctgtcattaccttgctattttaccaagaagcatgaaaaacttgaaaagtcttgcctacctaaacgttcttgaatgtcctttactaactcaaatgccctgtcagatgaaccaacttagaaacctcgagatattgccaaggtacattgcagcggaaaatcacgagcacaccatctcagagttgcgtcccttagttagtttgaaggaactcagtatttgcaatatggaaaatgcttcttttgatgacgcaaggaatgtaatcctgcaaaagaaaaataggcttgtgtctttggcattaagttggacaggaagctgtacagatcctatgattagttcaaaagcacagcaaatacttgaacttcttaagccaaaccgtggtttgaaagtgttatgcattttctcatgtccagcaaagaagcttccatcatggataacaagcatgccagcatacttaaaatcacttactgagatcaagctagttaatttggcatgtgaatgcctacctccactggggcaattacctcttctcaagattgttgaattaagtggaataaatgctgtcacacgtgtaggtgacgaattctatggggatgatggcacattcgcctcactggagaaactctcgttctttcacatgcgcaacctagaaatatggcttccatcacagagagaagcaattttcccaaaccttcaagaattgactatcacccaatgcccaaaatttagagcagtgcatgtgaaactcccagttgtcaaaagcttaatcatgttgttgaacaacgataaattgattggatctagaggagcactggaaggtttctctcaaaacctgaaatctctgtcggtttccctgtgtgacgggctattagagtgttcagaatgtgaggggctgagagaacttcgaggtattgaggaacttcatatttcaaggtgcacagaattgatttctttgccccatggcatgcagcatttgtcattcctccgaaccttgacaataacagagtgcacaaatttggaaactttcccagaatggttgaagaatttcacctctctgagatccttgcacatatctagttgtccaaagctgcacatacccaagagtttgaataatctgtcgaatctcgagattagtctagagtga

SEQ ID NO: 24794 - DNA, 627 bp, Oryza sativa
  unsure (1)..(627): unsure at all n locations
  Clone ID: PAT_MRT4530_29744C.1
gnnnnnnnggaattgtaatacgantcactatagggngaattgggttccgggnccccccnccaatttttttttttttttttttattcnnaatccgggnctcnttttattcnggaaaaanangctcaggncanttccangtnncctgatggnaagctcncaanttcananagtcncncncacncatncaatactctcgganaaactgttacaananncaagctcccttgaaattatcttatctcactctacgangantgccggaactctgggcgcncnaaatcngcgttggnaggnacggaaatttncanggngggncgcanctcancgcacacctcnattgcgccatgganggggtncganatnaanttgctgangaagtcctggttgatgggaacatccttgtccactgtcacnaatgcttgctgggtccngatttttccaaacgttgcgcccatttccttgattcccaannaacctccttgaacaattgttcaccatgaaggcntcccccaacatgctnaagggtcattattccccganccangaaccccttgaaatnccgattngaatnacctcttccangacncattgacctctctnccttnatccccttangatcgggcaatt

SEQ ID NO: 24795 - DNA, 482 bp, Oryza sativa
  Clone ID: PAT_MRT4530_29745C.1
ctagacaagcttgaaattgataccactgtgttatttaacacagaagtttgcaagaagcttccatctcttcgacatttagtgtttttcatggccaagaatgtgagatccttcacagaagaagaagaaaaagcactttgtcacccttacatctctcccatgtacttgatttttgttattgccctaatcccctatcactgcctaaaatgttgcattgcctttcttccctgaagcagttgccaatcaaggcttgtccaggaattaaatcattgccagaaaatggccttccaggtttcctttacacgagctctacgtgagcagttgcagcgcagaactaaaggagcagtgcaagaagacaataaatgccagatgtgtttatgttgaatgaaatgcaagcaaattcatagctattgcaagctgctacggttctatttaggaaacggagagatgagaaaaagagaccactgttctgaatgaccttcagt

SEQ ID NO: 24796 - DNA, 958 bp, Oryza sativa
  Clone ID: PAT_MRT4530_29746C.1
cttcgcttccgctagtggatccccgggctgcaggctcgcggtatgcctccagttgtactcgtgccctcctcttcctcccactcctcctcatctgccctctcgtccactccaccgctgctccccgctgccgccgcagatgccgcccaaggtggtcgccgtggccgccggcgaggcccacacgctcgccctcaccggtgacggtgaggtgtactcgtggggacggggcatgttcggccgcctcgggaccgggcgcgaggccgacgagcacgtgcccaccgtggtcgccgccggcgggaggccgcggcccaggttcgtggccgtcgcatccggcgcctaccacagccttgcgctggacgatgaaggttcgctctggtcatggggttacaacatctatggtcagcttggctacggggaagagaattctcttttcccatgtttggttgagcgttttcaagatttgggttcacctgaaacgctgcagtctgaagcacagaacagtagcacacagtcttcattgaagttgtcttctgttaaagctgggggcatgatgtcatttgccatagacactctgggagctatgtggatgtggggaaattgcccgcagcagactgatgctggagagttttgtatagcacctagctgtgtcccactacctgtgtgggatttccatggtcacactgttgttaaggttgcctgtggtaatgagcatgtcgtagctgcagtcagtgctggagagacctatacaggaggtgaccttgtttgttatgcctggggcaataacaaccatggccagttgggtctaggtgacaaggaaagtagatcccgtcctgtgcttatctcagcttttagcgaaggatcttcttgggaggtgtatgaaattgcctgcggagcttggcacacagctgtccttaccaataagaagtctttcgacgtggatcttgaatctcgttgctggacg

SEQ ID NO: 24797 - DNA, 296 bp, Oryza sativa
  Clone ID: PAT_MRT4530_29747C.1
gtacccccatcctcgttatgcaaatatatataaactcatccagtttcagcttaccgttaatgttcgccgcactcggattaacgccggcgcagctgcgtcaaaaaaaaaaaaaaaaaaaaaaaaaaaaaaaaaaaaaaaaaaatggggcgtccctctaaatgctgttgagcttctctgggcaaatctgagcatggagacacctgggagctctggctgtacaacggaaccaccgccggacaactttgtgaagagacagcggcttgttcgaatggaccgctggttactgattattatgt

SEQ ID NO: 24798 - DNA, 235 bp, Oryza sativa
  Clone ID: PAT_MRT4530_29748C.1
aactagtggatccccgggctgcagtggtcaaagggtgtggagaggagaggtgtaagaagaaatctctctcttttttttgagatgggagggaggaaatctatctctgaatgtgagcgaagcaaaggatttccctagctccatcttcgtcctcgtccacacaaaatgttttcctggtttgttcgtttgtttaccatgatgctgctgctgctgcggccatttgcacatctctctctct

SEQ ID NO: 24799 - DNA, 200 bp, Oryza sativa
  Clone ID: PAT_MRT4530_29749C.1
tcagcgctgatgaatcccttgactgtaaaactctcactcttaccgaacttggccgtaacctccacaaagagcgactcgctgtataccgttggcatgctagctttatctgttcgggcaatacgatgcccattgtacttgttgactggttcattgtcaccacccgtcacataaaatctactcagcgtcggcaaaggagccat

SEQ ID NO: 24800 - DNA, 180 bp, Oryza sativa
  Clone ID: PAT_MRT4530_2974C.1
ggcagaggttttttttttttttttttttttttttaacgttataacgctgttattcaagatattcgactgcttttcaatgtcagaatgtcatttacatagaatcgatgtgacagtaagtacattctatcttcaaacaaattggcattctatccaaacatataatcttaaaaaagaaatgat

SEQ ID NO: 24801 - DNA, 485 bp, Oryza sativa
  Clone ID: PAT_MRT4530_29750C.1
aattaccaaccaagaaattaccaacccccccaaagggggaaccaaaataatttccccggcggcccccaacggggggggaaaaaacacccatcagcaaggccagatgggcctataaaccccttattggggggggcccgcccccgggaaatcagcatctaggggcgggggggaccgaccacaattgggcccggggcgggaaagggccctcccgccccaaagggaaacccgaaggggaagggggaccccccccaagggccttaaaagaagggaaaggaacccccggagggggcaagagtacccgggaaaaagcccaggggggggccagtctggaccggggccccgcaacacccgcataaaagaacccttcaggggccagggaagggcccctggggacggtggaaaacccgggaataaaaaaagcaagggccttggggcatctccccaaattccacgggtcccaacccaaggcagcttcaaggttttag

SEQ ID NO: 24802 - DNA, 432 bp, Oryza sativa
  Clone ID: PAT_MRT4530_29751C.1
atgtggggcccgcacgtgaaatggcgactcctgtggcgtgtttgtttgtcccgtgagggaagccgtgggccccacctgtctatgcgctggggcccgcgcgggggcgctgtaccggcctcatcgtgcgcgctgttcgagggtgcgaggtggaggagcgaatactttgtggcgaatgattctttggttgcatgggattttgtggtcctcgatgcgatttcttatcagaaaagtacagaacaacctatacgctctttggttacacttgcatttgcagatttgctgcagcatcatggtcaatcagcacgcaaatttacgacaagggtttggcaacaatcagaggctgagaaccacctgtatgagcttgccaacatctgtgtggcaactggcaactcagatttctattggctggccttctgttcatgcctgtcttaa

SEQ ID NO: 24803 - DNA, 2369 bp, Oryza sativa
  Clone ID: PAT_MRT4530_29752C.1
gacaagaaacagcagcaagatcaatatactagtattaatctatatttcctgtctcgcgtctcaatcaaggcatcatcaacgcttttaaagcatatacttactgtccattcatttttatgtttgtgaagccaagaaagatgagactagtccatgttcaaaaactcattagtccaaaacaaaaacatgacgcccatggctagcactcagaaaaaactggagaacactttgctcaatgcttatatcattttcatcaagattatgatcccaataagatctactcaacacttggctcgacaagaaggtacacaccattttctccccaaaattatatactctccgaacagcgccagcaggagagttcttcagtcactatgctctcagagacctcaaggtgccatcgtttcagatgattgtccccaagcaggaacatgacagcactggaaaacactgaagatggtgcattgcccttgttactttgcttcttgcagcgaccaatgcagatcatgtggaagctgacctttcaagtctggatcatgaaacacgggaggtggtgctccaagatggccaggagctctgtgccttggctagccctgtcgagttgccggccctcgagtctaccagccgcctcaacaagctgccctctcagcttctgcggcaatagccgcccacctgactccacgcattccctgtacagtggtaggtaggccatggcaatcaccagctcaagtgggaggtccctcaggcagatcggcgactcacccttttccattatcctcatgaagttaacgaagtgctcttgcgcagacgcgaatccctcagaaaaagctgcctctgaccaatgctcgagcatgaaagatctaagctttgcatccactgcctcatcggcagattttgcaatgttgtctgctacagcatatgtggcagctgggtcattgaggaagtttgagcggagaaggaagtccacaccatgcagggaaccggtgctcctctcaccagcagccttgagaatttcgacgctgaggggtgcaagaacatgctttgggactagagggagaagataggctgcaactgcaacctggctactagaggttgcagcagtaagggctaagcaaagctccatatcccgacaaccaaggttgacgaaccattcaacaacttgaaggcatccccgttcagctgcccgcattaaagggccaagaaaggcaaccgcattaccctcctcaactaagcaccccatggtatccagtttcccatagtgagcagcaaagccaagggctagatccacatcgatgtccaagctattccttcgagcaatctgaagtaagatgcgcacgagttcagtgcttccatagcgagcagcctcaagaaagcactggttcacattatcggcaccaccctctactaacaactctaagagtccttgtattgcagctgccgagatacctgatgcccaaccttggtcaaaggtgtttgagaagagtgtaagaggaaaacatgccgcgtcaaaggcctccgtgaaatccttcccagtaagatcattatcggcaagatccagaaatgtcttgaaagcagacagctgaagttggacctcaatgatcgtgccatggtttcctctgcccttgttctcccgcacacgcgaatgcagcccgatacactttagagcccactctgtgaacttgtgcacctttgcgcttgcttctgccttcaatacctcgtcgccatgggattcttgaaggcgctcgttcaacttttgccccatgaagctcacagcgtcggcgaggctggtcgttctccccctgcacgccgacacgcacgacgcgaggaacgacgtccggagcgcggcgcgggtgaagtcgttggcgccctccgacacgatcctccggatcagggccacgacggcggcgagctcctccttgtcgctgaggaaccagatggcgtcgacggcgacgcagagcacgtcgttgagcccctgcgcgtcggccctccgcaccagcgcctccgcgccatcccagtcgtgggagctcaccgcgtgctggaacgagcggctcagctcgacgcggtcctgcctcgacagcttcctctcctgctgctgctgctgctgcttggcaccgagctgctccaggtccagctcctcgccgaagtcggagctcaccgatctcggcttcttggcggcggcgcaagccttggcggtcttgggcggcggcggcggcaaggggcagtccttggacccggcgccattattggcatccgccgccgccgccgcggcgccgccgggctcgtccatgtccatctccggccgatcccccgcctcactcacatcagcttcaccgcggcggacctaacgtggggcatcacattcaaattcgatt

SEQ ID NO: 24804 - DNA, 362 bp, Oryza sativa
  unsure (1)..(362): unsure at all n locations
  Clone ID: PAT_MRT4530_29753C.1
ttctgcgaaaaccctctcctcttccccgccgacgccgtccccggctctccctcctccgtctcgcgcccgccgccgccgccanngccaccgccgccgncgccttgcgnctcgtgacgcggtgagtggggaatagcaaaaccagacccntgcccnagtccgcggggacaatggaggggaaagaagacgncagatggcggngnggcggtngnggaagntcgacgncngnnatnaacntgaagaacctggtgtcgnggnagtntttaggncacaagangnagantncactctgtaagcatngnantanctanagatnaaagnttanttcangcttatattnatcataatnnacgtntatcncgtat

SEQ ID NO: 24805 - DNA, 244 bp, Oryza sativa
  Clone ID: PAT_MRT4530_29754C.1
agacaatgtgcacccaggatctataaagaaaatgggatggggggctgatctttaaatcgtaaggatcgatacaaccgatcttgcacctatcctccagaaagacccctgcccagtcttttaaaataaaaaaattactttattatctgtggaacagtctaaatcccttaaaacattgaacaacagcttaaccatctgagaacggcagagccctcaggtggtaaatgcaagctccttcaagcctaat

SEQ ID NO: 24806 - DNA, 631 bp, Oryza sativa
  Clone ID: PAT_MRT4530_29755C.1
gggctgcaggaattcggcacgaggaattggggaaagagcagcaagaggaggcaagaaaaatcaagcatgaattggtgaaagagcagcaagagaaggcaggaaatatcaagcaggaattggtgaaagagcagcaagagaaggcaggaaatatcaagcaggaatcaggggaagagcaagagaaggcagggcaaaaccaagcatgatgcagggcaaagggcatgttgcagaaggcaatgggaatcaatcttgaagcagggaaggagcaggagaaagtagagaaaaaccaagagaaagaaatgaaaatccaagaaaaacttggggaaatctttgataaagcaatgaaatctgaagaaaagacagggcaaaatcctggcatagaaaagaaaatccaagacacggcagagaagaaacaagagcatgatgctagggtagtccaagacaaagtggagaagatccaagacgaagccaagaaaatccaatgagtgtaaagagttaaaataatgcaactgttcttaatcaattattgcttggcagttgatctgaggacaaggcccatcatctatggatctcattgcttcgatgtcatgatgagatttctagttctagagataagatcctggaaatcacttac

SEQ ID NO: 24807 - DNA, 1782 bp, Oryza sativa
  Clone ID: PAT_MRT4530_29756C.1
atggcagaccgcgatgaggaacaaatcctattagacatgatcgtagtaggcagtagtcagtactgggtggatgaggaggggaacgatgatcccaaccaatacctgaacggggagggaaataaggagggtaaccaggaggggaccgaggaggggactgataaccaaccgtcggccggacagaagaggccacacgggaaaagaggtcccgcgaagaagctggagggaaggcacattgttactgagattgtcccagacggcgaaccagtagccccagtgggtataggacaaaagttcgtgaatcattgcggttgggtcatgagagacaacgtccccatcagcatagtgtactggcgtcgaacaaggtcatgtggggatgaagatagttttctccttgacacagagaaagatatgctgtggacaaccatgctggagacattcacgatccttgaggcagatcgtccaagatgtgaagaatggaccctgaagaaaatggacatccacacgtattggagtgggatgaggagcaagaggaatatagaggctaagatcgttgatcttgagtacatggtgtccacctacgaggcaaggatgcaagaagaggttacgagacaggtggaccaacgcctggccgagcagcgcggaatggaaacacaagcgcccgtcatggtgagcccctcaggcaaccgtagcagctacgcatcaacgggccatgttggatcagaaggcattgaggccgtcgcagctcacgaagcaacccacttccccgttgaggagatcacacagcggacaccctgcgatatgcatactcccttcaggaacttctctatcaaggtggcgtcgggcatggccatacccacggacccttcgggtacataccattgcaggcccattccacctggatacgcgaaggatcactttattaagatggccgagccgagcaaaccggtcgtagtttctgactatgatcgaacattgaggaaggctcttaaagccaagcctgcagcagtgaaatgcggaaaggaagtccctcagctggggcagcagccacaacaagaggttgaaccattcgtagatccggaccaacttgagatacacaagttcttgaaagaaactagactaaagatggagcagttgctagagaacgcacctatcgaaactgctccggtcaagtacatgtttgaactcggagaaccgctagtaacgcctgataagatcagagagctacctacacagacgtaccggttccatcaatggtacatggacaaatcagggatggatgatgttctttggacccgtcacaaagaagtcttcgacttataccaccgcgacgccctcgacgcctctatcctcagcgcgtggactttattccactgggtccttattcttttcgaccttgagaaatccaaactccatgtctacgattcaatggataaaccgaagaaagctttcgcacagattttcgaagtgatagatagggcatggattcggttccatacattggtctgcgggatttggaatgaaaaactcacccggaggttcaattttctgtgtgcaaagcaggaacaggggactaacttgtgcggctactatgtctgccattacatgcactgcttattattccaaatcaggactggccaggacttggaaatgatttacatgatagataacctcaccaacgatgatttcataagggttgttcaagaacaaatgatgggattcatcaatgagcagattcttgatcccacaggagaattctattacgatggaaagcctattcattaa

SEQ ID NO: 24808 - DNA, 270 bp, Oryza sativa
  Clone ID: PAT_MRT4530_29757C.1
atgacgaagaggacggatgctcaccggagagcgaggatgcggcggaagcagcaggacgcccgcgcgctgctgctcaaggatggagatcggcgcacgcggcaggcaggcgatggtgggggattagcttccgccgacgggagcaggaggaatcgcgtgcggcggcggcgcagcagcaagagggcgaagggttttgggcccgttgagttagcatgggaggaggcccgaggcggtaatgcaacgacgatccagcttgggcagatccatccatga

SEQ ID NO: 24809 - DNA, 384 bp, Oryza sativa
  Clone ID: PAT_MRT4530_29758C.1
atggcagggtcggcgtggctcggtgcggagaatgtcctgcaacggtggcggctcggctcgcaacgtgccttccctccaagatggagaaactggttgggggcccttctctccacctctacctctcaagttgtccttattggtatcctagtgcacaggatccaacattgcagaggactccggctaggaaatccgctctctacgcttctcttcatcctggcttttgacccgctgcaaaggatcctcggtaaggctactgagctaggcgtgctcacaaagcttcgaggtagaatggctcgccttcgaacctctatgtatgtggatgacgctatcatcttcgtcaacccaccgcgagaggatgtcatagctcttaaggaaatcctatga

SEQ ID NO: 24810 - DNA, 1387 bp, Oryza sativa
  Clone ID: PAT_MRT4530_29759C.1
tttttttttttgttgtttttttttagccgcgggtaaataaatataacttttttttttttttttccatcacgctaaagcatttatatagtttaatttggatatacatgctagtgtttcatagtatgaaaagtgaatatacgcatttgtctacgctagagtagccagacggccccacacattcaccaagtgaattaggatggctcattccaaaagttaaggctacaaaatccagctaacgtttcaaggagtagctcttcccactaaatgcttggaacttgggctcgtccttctttggagactcatcatccttaacggaagccttttgcggttctttgttgttgtttgcacttgaaccgaaaacaagctttcctgatttctggcgtgtggagttgctagctcctgaagatgctggtgctaacgtttcctgattcacccttttgtttgagtctgaaggggaagaacgtgaggcagaagggacctctgttgcttgtagctttgaggctttaccatccagccgctttccagaaccagtaaacggcttgaatttcagttcatcttcaactttagcattttcatcttcagcagttgcctcacttgcaggaactgatggttgctgcggattttcaggttctttgtaatcaagaggaggtgcaaagtccacttcacagtccgtctcaataatactaactgcggaagcaggttttgtttcaacaatgtcaatgtagtattgtttgttgttgtaagctaccatgatactatcgccggtggttaaacaagagaagtttcttagtgttttctccaggatggccttcggatttgagatgtccaaaaagtcagttgtgtgaggctgcaacttgacatatgtacccttgggaagggttgtattttttacacggacagtgtcaccctcttgaagaagcatgttttgcatcatccagtagggcatgatgatcatgccttcttctgccacaaattccagcacaccacagtgtgaaatccgctgagttgcatcattatgcaactcaaacagcataggatattcaatgtgcagagaagcaagccgatcaagagcagatggtggcataattactttgtcgccaccttccaggtgtggcttgtcaaagaaagatgctggataacaacggtatgtttgctcaaagttactcccatggtagccatatcctgcataaaacattttgctgcaggtctttgcctcaacttctcccaggctcgtaaccagcgagcgaggatgcggcggaagcagcagacgccggcggcgatggagatcgacgcaggcgaggcggcgggcgaacccgccgaggacacttgcttccggcccagttggtaataggttagcctgtgtcagcccatgtacaacatgggccat

SEQ ID NO: 24811 - DNA, 564 bp, Oryza sativa
  Clone ID: PAT_MRT4530_2975C.1
gcacgagggcgccgctccctccctccggatctgagcgaggtgatctgcaggtctcgggttccgcggggaggatgaactggattgggcgcaagatccacatctacaatgtcaccgtcggtctctacatgctcgattggtgggagcgctacctcttcagtatccttccactgcctgcttcctcttgtcccctgtactgatttccttgttcctggcgaatctgctgcttgttcggtctagttttatctcctacttttgactctgaatctgagaagcccgcgcgggtgaaattattggattctgatatctgtccgtttcaccgcgtggtgtctgtgaaagaaaaaagaatagtcttgttatcgggaacgtatgatcttatcttttgaagccgttcggaatcttaggatcccctttgaggaattagtttggttttcaaattcgggattgtagaatctcttaggagtattaggtatggcaaaaactagtattagtattcggttttaaagctaagtacttgatggatttttggtcaactgttctgtaagttaagtctcgtttctcctgatt

SEQ ID NO: 24812 - DNA, 158 bp, Oryza sativa
  Clone ID: PAT_MRT4530_29760C.1
aaaaaaaaaaaatctaggggtacggtttatatttattcaaccaatggggggtatttgaacttatacataatgaaacgtttatatttagggacaaactcaaagatttacgcatataagggggacccttgctagattaaaggaaatttaatcgtaccaat

SEQ ID NO: 24813 - DNA, 5356 bp, Oryza sativa
  Clone ID: PAT_MRT4530_29761C.1
gttttgcttaattgttttgtgcttcgctgtgcgctgtctctatctctctctcttgcaaaaccctaaccctagcggcgggcgggagcggcggaggaggagggcgcggcggcggtggggtggtagtggtggtgggtggaatggactgaggatgaaagcgagatggcctccaggctcgtccactcctcctcctcttcctccgccgagccatccgccgccctgcccaatcaccataccaaccacctcgtcgatgaccacctccccgtggagaatggaccggaccccaggagggacgtgcccgacgaggagccgccgcccccgccgccgccgcaggtcgccttgctgccccaggtggttgtgctgtgcgagcagcggcacgaggggttcgacgaggccgccgcggcggcggccgggccctccaccagcgggcccgtctccaaatggcgccccaaagaccggatgaaaactggctgtgtggcacttgtgttgtgtttaaacattagtgttgatccgccggatgtgatcaaaatctccccttgtgcaagaaaggagtgctggatagatccattttctatggcacctccaaaagcccttgaaactattgggaaaacattacactcacaatatgagcgctggcagccaaaggctcgttacaagcttcagctggatccgacattagaggaagttaagaagctatgtaatacttgccgtaaatttgctagaacagagagagtcctttttcattacaatggtcatggtgtaccaaagcctacagctaatggggagatttgggtatttaacaagagttacacacaatatattccgcttcccattactgatcttgattcatggctgaaaacaccttctatatatgtttttgactgctcagcagctggaatgattgtgaaagcttttctggagcgcctagactggagttctagctcgtctgcatcttcatcgaaggactgcattctccttgcggcctgtgaggcacatcaaactctcccacagagcgcagaatttcctgctgatgtgttcacagcttgcctcaccacacccatcaaaatggcactgcactgggatgcatgggacatggctgcagagatctgcctttctaagcttcctcaattaattgctgatcctaatgcagagtttcaggttttgcttagtcagtcacacagatttagagcacttgttctgcttggaagatttcttgacatgggaccttgggcagttgatttggctttgtccgttggcatcttcccttatgtacttaaactgcttcaaacaagtgcaatggagttgcgccaaattcttgagttagagtggacaaaatgacacggtcttgataagatagacgagccagagctgctggaacattgcttcctgggcatatctatatcgttgatcggcagtttggatgctaacctacagcagcgtgcactggcggctttcgtttaagcggttattatggatgggcatagggttggtcaagaggcttgagctagtgcagtgcttataaatgtctgcatgagaaatctacaacctgaaactctgaatgatgttcttctccagagtcagcttcttttcccaattttaaaaaggtttggagatgtttgcgtataattaatcagggcagtgtggattgcctgggcatgtaatggattagaagggcccatggagaatgcatccgcatctcacccagagatgttggttccatagattgatgcactttgacctgttaagacaataggacattggctagagaaatgagtggcctctgataattctgttaatgtaagggctggagaggaaatcagtgctttacggtagggtgtcaatgtcttttcatatgttagaattgtacttggatatttgctcaatgaaaagcaaaacagctttaaaagtggtcacaataaacatacgaaaaatattcccgccgagtagtgtaaacatccaaccaattcactgtgcaaatctgtagaggtgttagctaatattaattcgagcaatgagtacagtccgagcagcttaatataaggtgacgtaggcctggccagacatgttggttccgttttaagggttttcactgggaacagtgacactgcacgtgatggaagaatctcttcgagcagtccttttgcaaccaatagcatgatgcatggtgctccacattcagttgatttttctcaacactctgatccaggcaaattactgagagagaatgcaagtaatggtggtctcaactactcaagatcgaggcctattgataatgggatctattcccaatttatagcaactatgtgcaatgttgctaaagatccttacccaagaattgcaagtattgggaaaagggcattgtccctcataggtgttgagcaagtaagcatgagaaacagtagacttagcaatggaggtgcacacccaggagagacatctgtgcccccttcatcaaactttggaatggcacgctcctcttcctggtttgatatgaactctggaaatttctcgatggcctttaggactcctcctgttagtccccctcagcatgactacctcacaggattgcgccgagtgtgctcgatggagttcagaccacatgttttgaactcacctgatggcttagctgatcctcttttaagctccagtgcagcccccagcaacatggggctcgatatacttccccaatcattaatttacagatggagttgtggtcacttttctaggccacttctaactggttctgatgataacgaggaagcaaatgctagaagagaagagcgagaacgaattgcaatggattgcattgctaaatgccaacgatcttgtgatggaaatgtccgcatatggagaaactatactcaaaagggaggacaaaaacttgtaactgctttctcatcagttcaaggctatcgaagtgctggtcgcagtattgtatttgattggcagcaacagtcgggttatctgtatgcatctggtgacatgtcctctatccttgtatgggatcttgacaaggaacaacttgtcaacaccatccagtcaactgctgatagcgggatttcagctctttctgcatctcaggttcgatgtggccaattcgctgctggttttcttgatgcatctgtcaggatatttgacgtgcgtacacctgataggctagtatatacagcaagaccacatgccccaagatcagaaaaggttgttggtataggatttcagcctgggtttgatccctacaagattgtaagtgcatctcaagctggagacattcagttccttgatgttagaagggcatctgaaccctacctcactattgaagcacataggggttcattaatggcattagctgttcatcggcatgccccagttattgcaagcggctcagccaagcagatgatcaaagtgtttagtcttgaaggagaacagttgacaataattcgctaccagccatcttttatgggtcaacgaataggcagcgtaaactgcctttctttccaccgatacaaatcactccttgccgctggtgctggtgataatgctcttgtttctatctacgcggaggacaattaccaattgcccactttgatgcaatgcgtccaaagatgttttgaggtcgcccttgggtttatttggcgccacacaacagttgaagaatcaggggttgagaactgctacgtcttcaagagccggctgcaagagtatgcgcagaaagccggcctccagactccagagtatcataccttcaaggagggaccttcccatgagcctgtcttcaagtccacagtggtgattaataacaccagctatgactccctgcccggattcttcaacagaaaggctgcagaacagtctgctgctgaagttgccctcatggaaattgtcaagtccataccagccaacgcaaacatcccagctgttgctcataattctactcagcaagagactggcctgtgcaacacaggaagtcagcaactgaacctgagggaaatgcaccgagaagctgaccaccaccaccgccttctggcaacccttgcacgccactgccgtcttgctgccgctgccaccttcttctcctccaccctccgcactgctcgtgccctcaactccctcctcgctgctatctgctcttccccagcgttcctccgctttgcccctaaagtcctcttgctcgctgccccatcagtctcccctgatgcgaccaccttccacatcctcatctccacactctgccaggcccaccgccccgctgctgccgccgacctcctttgctgcatgccctcgcttcttcttgaccctgacctggccagttgtcgtgctgtcctctcctccctgtgccagtacgcttccgctcaggatgcagtagcattcttggacaagatgtgccattggggcatttccccaagcagatctgactaccacgccgtcttcgatgcgcttctgcaggagggaaaggtagcggaggcatatgaggtcatgaagaataagatgggctctaacagggtggcacctgcacttgcatacttcaaattgacaatgcaagctttcagcgagtgcttggagttcgattctgtggaggaggtgtttgatgaaatgctcctgagagggctggtaccagacgtggatgtgtatagtgtgtacatcagcgcgctatgtaggaaaggtgaccttgccggagcgcggcagatgatgacctgcatggagcacgccgggtgcccaccggatgtaaggacatttggtgtggtagtcgccgggtgcatgtctgccggggacatgggcacagtgagggagttggtgcaggaggcaataaggcgtggcctgcagtgggatccaccagcattgtcggagctgataggcttgctgcaggcaggtgatggtgccacacagtcacaggagttactgttggagccactatttgtgcacgatgcaccagtgttggggcagctgattggagcattgtgcaagcaagggctattgggacctgctgctgtagtagatgattattagagataattattagaaagcattggaatggtctttttgtttcatacagttattggtcttgaattctcggaaatctgaagaacggcataagaatcataaaaacagagacagaaaaggcaaaccatggactataactccaggaatacttggagctttcgggtttgtagatcactagattgttggctatagttaggacccagtgagcaagaagggagcgtatttgtatagatgggccaggtaggaggagattgcagacagtctttattgttgtcttctgtcatgatttatttgtattttctcaagctcacaactctactaagttattcccatgaatacaataggaaattagtcgtttaat

SEQ ID NO: 24814 - DNA, 251 bp, Oryza sativa
  Clone ID: PAT_MRT4530_29762C.1
taccatctccatctcctcccttcacccccgatcgcattcgctgccgcccactccgtgctcgcctcgcctcccctcagagagattaaagcagcagcggctttctttcctctgcgtttcttggattgcagcaaaatcgatcccccccccccctccccccgcgttccaattttggtggtggattgcagctcttgcgccatcgctttgggtgggactctggccccccgtggtaaggagagggctcctctgggggg

SEQ ID NO: 24815 - DNA, 215 bp, Oryza sativa
  Clone ID: PAT_MRT4530_29763C.1
ggaaaaaaaaggagcaaatttattcttgaaaataagtacatacatagcaggatgacattttctttcttttcttggtctaactggtattagttctgaagaataaccgggcagtctagcagttatgggcagcaagatgttaacagcatctttacccaagttaaaggatctaacaaatctggtggcctacggtgcccaccggattggcagggatgcct

SEQ ID NO: 24816 - DNA, 796 bp, Oryza sativa
  Clone ID: PAT_MRT4530_29764C.1
gtgtgaacgaattgcaatggattgcattgctaaatgccaacgatcttcttgcaagatgaccagccaaattgctagctgggatacgaggtttgagttgggtacaaaagcatcattgttgttgccattttctcctattgttgttgctgcggatgaaaatgagcaaatacgagtatggaactatgatgatgcgctgccagtgaatacttttgaaaaccacaagttatctgacagaggcctatctaaacttttgctgatcaatgagcttgatgatagcttgttgttagttggctcaagtgatggaaatgtccgcatatggagaaactatactcaaaagggaggacaaaaacttgtaactgctttctcatcagttcaaggctatcgaagtgctggtcgcagtattgtatttgattggcagcaacagtcgggttatctgtatgcatctggtgacatgtcctctatccttgtatgggatcttgacaaggaacaagtcaacaccatccagtcaactgctgatagcgggatttcagctctttctgcatctcaggttcgatgtggccaattcgctgctggttttcttgatgcatctgttaggatatttgacgtgcgtacacctgataggctagtttatacaggaagaccacatgccccaggatccgaaaaggttgttggtataggatttgagcctgggtttgatccctacaagattgtgagtgcatctcaagctgggaacatttcagtccttgttgttagaaggggcatttgaacccttacctccttgttggaagcacataagggg

SEQ ID NO: 24817 - DNA, 575 bp, Oryza sativa
  Clone ID: PAT_MRT4530_29765C.1
ctggattttcactgctatcacagacactattgcatggaatgttcttcctcatgatctattccaaagacttttcaggcaggatcttttggttgctagtctctttcgcaacttcttacttgctgagagaatcatgcggtccgcaaattgttccccaatttcataccctttgttaccaccaactcatcagcaccatatgtgggatgcatgggacatggctgcagagatctgcctttctaagcttcctcaattaattgctgatcctaatgcagagtttcagccgagtccatttttcacggagcaattgacagcatttgaagtttggcttgatcatggctctgaagacaagaaacccccagaacagctacctattgttcttcaggttttgcttagtcagtcacacagatttagagcacttgttctgcttggaagatttcttgacatgggaccttgggcagttgatttggctttgtccgttggcatcttcccttatgtacttaaactgcttcaaacaagtgcaatggagttgcgccaaattcttgtgttcatatggacaaaaattctctctcttgataagt

SEQ ID NO: 24818 - DNA, 414 bp, Oryza sativa
  Clone ID: PAT_MRT4530_29766C.1
tttgtgggttttttttttttttttttttttttttttttttttttttttttttttttggtttttttttttttttttttaacccaacatgggggcaaattattccccaatgaaaaaaatttttttaaaaaaacttaatcttttaccgggaacaaaaactaccggggcttaaaaaaaccggaaggttgcaaccccccccgcaaggggccaatggggggtagctacttatccttcccgaccccttttacaagggcatttttttcggcttcggcttcggctttggcttggccctgagcaatttttcctttggaattaatccccctgggctttttgagctccttaactaaagctgggagggacccgtcggcattgtcccccaaactcttgggcggaagggttttggggaactcccccggg

SEQ ID NO: 24819 - DNA, 349 bp, Oryza sativa
  Clone ID: PAT_MRT4530_29767C.1
ttggttttttttttttttttttttttttttttttttttttttttttttttttttttttttttttttttttattcagaaaaaacaataaatattaaaaaaaaaaataaacacaaaaaaaaaaaaaaaaaaaaaaaaaaaaaaacaaaggcttagaaaaaaaagaaaaacgggcaagaggggtttatccaaagcgactggctcaacaaaaccacagaggaccaagatccaaaggacccaaagtaatcacactcaaagaagtaggacccgcaaaaactcgcaaccggaatgagaacactgattaatcaatgtccgcacttggagctggctacccggcttcaaatgagcccgg

SEQ ID NO: 24820 - DNA, 494 bp, Oryza sativa
  Clone ID: PAT_MRT4530_29768C.1
atccaaaccacgagggtatccaatctctttatgggaaggtttccccgttaaacgctgggttcccgaacctgcacaaagggagcctctggcccaagccatagagcctctgaatgtttgaaataggtttttttctcctgtccaggtgggtcgcttccaattggaaccactggaattccaatcggacaatgcaatgcaaacttgccgccacccgtggaagtcccgccttaagatgcttgcacaccccaatgtgccacctttggggcatgtggggaagatgtcctgaagaggtatcatcacctgttttctggtggcttatgtaatgctagtagttttgtgctgggacgcagctactcttgtgttgcctgccccttcacttgccctgaagctacctgcagcttgacgcaaatggctaataatggcacccccctgaacatactacatcccaataatgtttagctccttttgtcgtgagttaaaaaaaaaaaaaaaaaaaa

SEQ ID NO: 24821 - DNA, 134 bp, Oryza sativa
  Clone ID: PAT_MRT4530_29769C.1
tggtgctcggcacggactacctcgcctctgagtgtgccatcggcatcaacctagagtgcacatcaccgctggaggaaaccatctatactctacgtgcttcccacagcagcctaattcgagttcaccccgtttga

SEQ ID NO: 24822 - DNA, 352 bp, Oryza sativa
  Clone ID: PAT_MRT4530_2976C.1
aaaaaaagcttccttagttcccaatgggaagggtttcccttacataggggaaatttttgaactgggccggcttaaagtaaatttaacaacttagccttttaggggggaaattttttgccaatttaatccttttgaccttgggggccatcaaaagactggggggggtttgcccataaggaacctaatacggggttaattttttgaacattgtttatcactcaaaagactggggaggggctaacaatttccaattcggggcaaccttatttacttgaagacctgggccccaataacaaatttttggggcctttacataaggggggggtttcatagggggaacctgttttttttt

SEQ ID NO: 24823 - DNA, 437 bp, Oryza sativa
  unsure (1)..(437): unsure at all n locations
  Clone ID: PAT_MRT4530_29770C.1
cggacgcgtgggngaaaactattatatgatacataatatatgtctgaaatgtctatgttattatgaaaaaaaaaaaaaaaaaaaaaaaaaaaaaaaaaaaaaaaaaaaaaaaaaaaaaaaaaaaaaaaaaaaaaaaaaaaaaaaaaaaaaaaaaaaaaaaaaaaaaaaaaaaaaaaaaaaaaaaaaaaaggggaaggggtcaaaaaaaaaaaaaaaaagaaaagacggggaaaaacaaaggggaatggtaaaacacttggaggggcccaacataaaaccacttgtaagacaatcaaattttcggcagggggacggcaaaacgaagtggcccaacaccaattggccttccaaaaaagcccttaaagctgaacggtaaaagggacaaaccctgggggcgggccctaaggccaccgaggggagggggtccgcgcaagggg

SEQ ID NO: 24824 - DNA, 173 bp, Oryza sativa
  Clone ID: PAT_MRT4530_29771C.1
ggcacgagctgctcccaatagcattcccaccgacggtgtcatctggtacttgaattatagcagtatacgtaggcacaggcgatataaataaagtcatgcatcatcgtgtgtgacagttgcaaacatcaaggtcgatacaaatcaggatagagatgtcatgcatttttatacat

SEQ ID NO: 24825 - DNA, 184 bp, Oryza sativa
  Clone ID: PAT_MRT4530_29772C.1
ggcgaagagcaccgaaaggcgaatctaagcgcgtccagcgtaagcatcacgcgagtcgtcggcgcgcgcggatccccgatcggacggtccacgttgccccgtcgccctataaattggtccccccgtctcccccagccaaatcctccccgactcctcgcagcttcctcttgtttttcttggccga

SEQ ID NO: 24826 - DNA, 2190 bp, Oryza sativa
  Clone ID: PAT_MRT4530_29773C.1
cgcccggaattcggcacgcggcgcacgagggcgacgacggcggcggcggcggcggtggcgtgccggctcttcgtcaaaatttatgcttgtgcccgggtcaacttatccccggcgcaaaactggtacctcaggtgaaatcaccaagtgtacgcgatagcagggtacctctgctagtgcaccacccgccatcgccggtgactgagccctactctgctcgcgccggggtcggcgggcgagggggggctagcggcgcctggactcttccacagacctgcgcctcgtgtcgaaccgtatccaaggtccactttttcctcatctataaaagctcgagcagaattcagcattcatggcccgtgatatcctccgttgtctccctctccatagcctaccgctacccccagtctccccctctcgcaaagtataactggggaaaccatcacccctttgccatatctaccgctgctaatcaaaattcgatcttctagagcatatgctcccagccgcagcccgtgagtctattgggcgttttccaccaaatgaccccagctgttgctctagtgttggcattgagtataggttgtttcctggtgacaataattaaaaaaaaaataatgcgccttttgcttcttttttaagttgaagttgcattgcccatccttcctcaccatggcaaacatgcttccagacgatgcccttattgagatcttacttcacctcccaaaacaccccacgtgcctccttcgtgcatcccttgtctgcaagcactggcgctacctcatcagagataacaaatttatcaagcgctttcgtgcgttccatcaaacaccccctgttctcggcatcttcaccaattccaccagcatccctcgctttctacccattgggaaccctcctgaatgtgtcacggtaggagcattctccctacctgacccctactggcatgtccttggctgccgccacagccgtgtcctcctcattagctcaagctggaatagtctacaagtgtggaaccccatgactggcaaccggtatgctgtaccagttacacctgatgtgaatcctcgtatcaattatggacgtgtgcccgagagccatgctgcggtgctttgcgcagctggccacaatgaccatggtgactgcagctcatgccccttcttcatagtatgggtattcaccaatataggctatgcttatatctctaggtactcgtcagagaaggacacctgggacatgatggcatcttcaccagcaccatcggaggttgattccaggcctagcattcttgttgggaatgtcatatattggccacttaagtcaaagcatattcttgcattcgagctggccacttctagattatatcatattgagtgtccaccagaaacacatagtgtatacagaaggaatgtccatatcatgaaggcagaggatggtgggctaggtctggctaccatgacagggttcaaccttcagttatgggcattggagattaattcagggggcgttacaggatgggtgctgcgcaagaccattgagttgggtgcagtccttccgctggaagtgccctctgtaccgttgacggatagtcatttggttagaaggcctccagtcaggatattaggtcttgtggaggaagatgatttgttttttatatggacggcagttggtgtctttgctgtccagctcaagtcactgcagttcaaaaaggaagaaacatgcacccaaattcgcctcgacgagggcttgaacttgggtggtctgggcgtacatccacgccctcgaccaacttatgtcagtatggaaggccctccatcaaaaacaatatcaaatattggtggtttgcatcatatgttgggtcttcctgatcatatcctcatagccgcagctgatgaggttccagcttgggttactgagaaacgaaataaagtctctgttgagcgcacattacgctggcttgatgcatgtattgctttggatgaggattctggtgcaaatactttaggtgtagttgtgggtggatctagtatagaactacggaagctatgtgccactgaagtgtcaaagaggaatgtgtcagtcctgaagaacgttgcagtatactcgatgctgcagtgggttgcttgcctccggagaaacctcgagttgtctctaggcttggtcttccaggtgcttgtgatgtctcttgtccactag

SEQ ID NO: 24827 - DNA, 513 bp, Oryza sativa
  Clone ID: PAT_MRT4530_29774C.1
atggcagcgccggcgcgccgctccgccgccgacgagctggacgaggcgacgagggcgcaggccgacccggactacctcctcttcctcaggcacctctacccagacggcggcggcggcggcgccgccgcgccgtcgccgtcgccgtcgacctacgtcctcgacatccccgacctcggcctcgtcgtcaggtacggacccttcgtcatcggcggcgacggcgatggcggcggagatgctgcttcgaacaagaacgcgacggtagggcgccggcagctatcttcggccgtggtgatcaacgacgacgacctcccaccgccgtccgccgcccgagaggcggaggtggccgattcggcgccgtcgagatcgagcgtcgcgagcaacgacgacgacgacttggcggccgccggcaccgtcgacgacggcgaggaggtcagcaacgacggcattgccgttgccggcgaggagggggcagcgcgcggcggccggcaagtagaagaaatgcgtgctatctaa

SEQ ID NO: 24828 - DNA, 829 bp, Oryza sativa
  unsure (1)..(829): unsure at all n locations
  Clone ID: PAT_MRT4530_29775C.1
gcacgaggggtcccccgcgccgcggctccccccacctccggccccttgcccccaccccccctcgccgcccccgtcgagtcccatggcgaagtcgcggccgcccaagcggatcctcgagtcctacaccatcaagggctccgacaaagtcatcaagcattatgggagttcagtctctggggactgtgtgctaatgagggcatctgatacatcaaagccaccctatgtggcaagagttgaggctattgaggctgcagggtcacgaggcacaaatgtgagagtacgggtgcggtggtactatcggccagaggagtccatgggtggaaggcgtccatttcatggtgccaaagaggtgttcctctcggatcactatgacgtacagagtgctgacaccatagagggaaagtgcaacgttcacagcttccgtagctacacaaagcttgattctgtcaatgctgaggacttcttctgtcgctttgagtacaaatcagccacaggaagcttcgtgcccgaccgcattgctgtgttctgcaagtgtgagatgccatacaatcctgatgaccttatgatccaatgtgaggaatgctctgattggtttcacccttcttgcattggaatgactattaaagatgcaaaaaaactagagcattttttctgccagagctgtactgcggaaaatggaaagatggctgagaattctcatgaagctacagcgcaatccgaagaaaaggtgacttttgtcctgttcgtaatgtcgcaaggctccagttgggaaacagtaccaatttattcatatggcagtanaaagtctggtgtgattttacaactataa

SEQ ID NO: 24829 - DNA, 331 bp, Oryza sativa
  Clone ID: PAT_MRT4530_29776C.1
aatttatatccatagcatttattacaagttgacaagaacttaagtttaattccactataaagttcaaaattattactctcccttgtgatgttttatgttttttgatgtctcattttacatctttttatccagtgtatcccttgactaattatagtagtcaaagttatttttactactttggtctgttaacccacatactagctttataaaagttatcaatccactacttttattatatatttaccagtccagtgagatttattccttcatatgtgttcttgttactaattagtgccctgtcttttcagcttaaagcagtccctttaacatc

SEQ ID NO: 24830 - DNA, 711 bp, Oryza sativa
  Clone ID: PAT_MRT4530_29777C.1
atggcgaagtcgcggccgcccaagcggatcctcgagtcctacaccatcaagggctccgacaaagtcatcaagcgtgaggctccccctcccacctccccaaccgattatgggagttcagtctctggggactgtgtgctaatgagggcatctgatacatcaaagccaccctatgtggcaagagttgaggctattgaggctgcagggtcacgaggcacaaatgtgagagtacgggtgcggtggtactatcggccagaggagtccatgggtggaaggcgtccatttcatggtgccaaagaggtgttcctctcggatcactatgacgtacagagtgctgacaccatagagggaaagtgcaacgttcacagcttccgtagctacacaaagcttgattctgtcaatgctgaggacttcttctgtcgctttgagtacaaatcagccacaggaagcttcgtgcccgaccgcattgctgtgttctgcaagtgtgagatgccatacaatcctgatgaccttatgatccaatgtgaggaatgctctgattggtttcacccttcttgcattggaatgactattaaagatgcaaaaaaactagagcattttttctgccagagctgtactgcggaaaatggaaagatggctgagaattctcatgaagctacagcgcaatccgaagaaaaggtaagttttgatgtgatggaaaagttgaaagtttaa

SEQ ID NO: 24831 - DNA, 594 bp, Oryza sativa
  Clone ID: PAT_MRT4530_29778C.1
taagaagacatagaaccctagaggaagccctcttgcttctgtgactgcttgcttcttaaaaggaatgcccggccagttcccaagccttgtaagaaagttggccaaaaacctggattaggccaatcccaattccaataaccaaccaaccttggccaggggggaaattccgggacccaagtttattccaattggccaaaggaaaagataagataagaccggggtgccatttattggatccacaactttgcctgtttgttaccggaagaacaaacaaaccttgggttactcgattcgtaaatacgccgaacttatccaacccatagtaaccattagttcaacccaaaccctgagcttacccattcttcttataccctccatcccctgatccttgtattttgaatgtacaataaccaagagaggaaaccacctgtaccctttttttagtttccacctaacagggtagaataaaccgtgtggttctaatttaacaccccccggattttgacccaggaatgtaattactctgtaatgggaccaccaccattatccaatcatccattcagccatattcaggaggtcaaaaaaaaaaaaaaa

SEQ ID NO: 24832 - DNA, 705 bp, Oryza sativa
  Clone ID: PAT_MRT4530_29779C.1
atgagtcgtcgaagcaccctcctccaaatgctattggatgaggagtctttatcggatggcgaagaagaatttattttttcggcggttgatatagtgcacggtgagttcgatgacgatgaagttccaaagcgtagtgaatctgtcttaggtcatgcagtaattaatcgggaaagattggctggtcatcgaagattgtataatgattatttttccgaagaacctacgtacctcgatgttcagtttagacgcaggtttagaatgaggcgacctctctttttacgcataatgaatgctattgaagcacatgatgaatattttgtgcaaaagagaaatgcggctggtatcctaggactgtcatgtttgcaaaaggtaacaacagtgtcacgtatgttatgttatggaatagcagcagatgcagttgatgagtatgttcgtattggaggtagtaccgttattaggagttttaaaaggtcgccgttgtttgcaaagctagctaaagggcaggctcctaaagttaatttcagtatcaacgggcatgactacactatggggtactatcttgcagatggtatttatccttcatgggcaacacttgtgaagagcattaagctgccacaaggaaataagagaaaatattttaccaaagcacaagaagccaataggaaggacgttgaatgtaacgcttcacttttcgtgtggcgttaa

SEQ ID NO: 24833 - DNA, 3186 bp, Oryza sativa
  Clone ID: PAT_MRT4530_2977C.1
ttataacaggccagctgtgcaggcggtgacaccagtcagcggcggatgcggcggccggtcggtgaagacgtagacgcccaacaacggcagcataataggccagccgtgcaggcggaaacaccagtcggcggcggtcgaggcggccggtcggtgaagacgtagacgcccaacaacggcggcataaaggccagccgtgcaggcggaagcaccagtcggcggcggacgaggcggccggtcggtgaagacatagacgcccaacaacggcagcataataggccagccgtgcaggcggaagcaccagtcggcggcggacgaggcggccggtcggtgaagacgtagacgcccaacaacggcggcataaaggccagccgtgcaggcggaaacaccagtcggcagcggcgaaggcaagccggtcggtaaagacgtagacgcccaacaacggcggcataaaggccagccgtgcaggcgaggacaccagtcggcggcgacgaaggcaagccggtcggtgaagacgtagacgcccaacaacggcagcataataggccagccgtgcaggcggaaacaccagtcggcggcggcgaaggcaagccggtcggtgaagacgtaggcgcctaacaacggcggcataataggccagccgtgcaggcggaaacaccagtcggcggcggccgaggcgagccggtggtgatgttctgactgatccattcctggagcgtaagagataagcttaaagccatgaatcccttttatgcatatctggatctggatcttcagatatggcactacagcatcacagttgtatagcacatatctatgtgcttgcaatttctctctatcagttaaggagtacgccgatggttttcccaatggttttcctactggaggaaacaaagtggattcttgcctactcatgggagtctcaaattgatctggtttgtcattattccttgatggtatgttatgcttggtagggaaaccttccaagtatcgtgaacaaaatgccatgcactcatctgccaaatatgattctgcaattgaaccttctggacgcgctttgttgcgaacatacgacttcaatttacccaggtacctttcaataaagtacatccatcgatagcaaactggcccagcaatcttacattcagtagctaaatggacgactaagtgaaccataacagtgaagaatccaggaggaaatatcatttccattctgcacaatgtgattttaattgcttcttccaaacggtcaagctcatcaacatggagaacttttgaacatattcctcgaaagtaagcagataagtcaaacaagacagatgtgatttcatcgggaagaatacccctcaaagcaattggcatcaattgttgcattagaacatggcaatcatgtgttttgagcccatgaatttttccttcagcagagttcacacatctagatatgtttgaagaatagccatcaggaacttttatatccctaagaactttacagaacaattgcttctcacttttggacatagtaaagctggcaggtggtaagtagaacttgcttgaagttctttgttgtggatggagctcccctctaatgttcatttccttgagatcaagacgagcttggagattatcctttgactttccttctaaatttagaagtgtaccataaatattatcgcacacatttttttctatgtgcatcacatcaagattatgccgaagaagattgccatcccaataaggtagtgtgaataaactacttactgccttataagtttttgacttcttaaaatcaccgatagcatttatttcatccaataccggacgcccatagtaagtcataggctctgtactaatctctgtggttccatcaaaagaatttctatcaaaacgaaattcatgattaggtggcaaaaatcgacgatgacccataaaacaagatttcttcccatgtgccaaacgtttggaccatacatttggaccacaaggcgggcatgcaaattctccatgcaccatatgtgaagcaagcattcctaaagctggcaagtcatttatagtccacagtacagctgccctcaaattaaaagtttcatttctagatgcatcatatgtggaaatgccattgacaaatatgtctcttaaatcttctagaagcggctggaggaaaacatgaatgttatctccaggacttttgggcccaggaattattaatggcattagaagattaggttccttcatgcagagccatggtggaagattatatattactaaaacaactggccagcaactataggtagagctcaacataccatatgggttaaacccatctgtagctaacccaaatcgtatattacgagaatcagatgcaaattgcttgaaccttttatcaaagttcttccatgccggagaatcagctggatgtcgaagcacaccatcctctactaagcgctcttcatcatgccaacgtgggagcgatgctgtttctctacacatgaacaatcttttcagcctctcctttattggaaaatatcgtaagactttgcttggcgttgctttctttctttctttcttcgttaacttggtttctggttttttatctttccatctagaagccttacaagttgaacaaaaatcatcattaaccttctctttccaaaacagctgacagttattgggacatgcatgaatttgttgataatctagaccaaattttgaaaccaccttcttagcctcataaaagttttttggcaattcttttccatttggaattgccatgtgaagaatatcaagtagatctccaaatgatttatcactccatttgttcatggatttcatattgaacaaaagcactagcagagataagtgtgatagttcacttccatcccataaaggcttctctgaatctttcaccaacttataaaatgcttgagcttctaaatttggtccatcagtgtgtgtacatggcgaatctgcagaatcactcataggcatgtcgtcatacacagtcctaagtgcatcattaattaattcgtgcatgttagcacgcatgtcttcattgtgaggctgtggttgttggttcctaatttgctcctctgaagactcaccatgaaaatcccattggtcataacttccagctaagtactcaacagaacctctagggtagcgcaaaagaatcttgatggtttctaaatccat

SEQ ID NO: 24834 - DNA, 1752 bp, Oryza sativa
  Clone ID: PAT_MRT4530_29780C.1
atggcggcgtctagcggctggtcatcgttttcccctttcttgctggtggatggacggagggtggaggacggcgcttggacctggtgcgggcgtgcggcggcgtcggggcgtggcggagcagcgagccagtggccctacacgggcacgccgggaccttgcggcgcgggcgcgccgcgacctgccggcgcgggtgtggcgagccggcagccctgcgcgggcaagcctggacctggcggcgcggcgagccggcgacctggcgcggacgcgctgggacctgccggcgcgggtgtggagagccggcggccctgcgcgggcgcgcggcgagccgacgacctagcggcgcgggtgccgagcggcaggcgcgcggcgggcctgcctacgagatcgggagtcggcgccgacgtggggactagggaaggaacacagaagggagaaggattggaatggctaggcgggcggcgacctcgcacgtcaccaccgcacaccatctccgagccgtcgccttgctcccgccgtcttcaccgccgtcgctctgctccctccctcgccgactacccctacgacaccgtgcccaacaaggttgagcacctcttcttcgcccagctctaccgcgaccaaaagcagcgggagacgcgcatgtcgatgtccagggcagagcgcgcacacgagctgtacgtggactacctcaagcccatcatcactgacgtgtccaggctatgggagttgctggagtggataccgacgccggagattgagcgcctctgcgacggcgtgcggctggtgaagagaggggaaaggaaagaagaaaggaatgcagttgatgagtatgttcgtattggaggtagtaccgttattgagagttttaacaggtttgtggtggctattgatgaagtttttggagaggagtatttaagaacaccaaacgagaacgacatagctagattacttgctcagggggaagaaagagggttcccaggaatgttgggttctttagattgtatgcattggcagtggaagaactgcccgactgcatggcaaggccagtataaagggaaagagggagttcctactatagttttagaagctgttgcctcacgtgaccgatggttttggcatgcgttcttcggttcacctggatctcacaatgatattaatgtccttcaacgctcaccgctgtttgcaaagctagctgaagggcaggctcctaaagttaattatagtattaacgggcacgactacactatggggtactatcttgcagatggtatttatccttcatgggcaacacttgtgaagagcattaagctgccacaaggaaataagagaaaatattttagcaaagcacaagaagctgctaggaaggatgttgaacaagcatttggagtgcttcaagctcgctttgctatagtccgtggaccagctcgtttttggaaagcacttactctgaatcagataatgagagcttgtataatcatgaataacatgattgtggaggacgagcgcgatggtgattttgatctagtttatgatgagatgggagaacaggccattcaaagtatttcagaagtggaggatgagggacttactggtgccataactgaaggttttacatgccaatcatcatcgaacattgctactagttctgacagttactttaatggactgaaacttatttcaacccttgtaaaattgatgcctgaatggctctgtaacaaccgggttatttcagcactagtggacaacatggactga

SEQ ID NO: 24835 - DNA, 357 bp, Oryza sativa
  Clone ID: PAT_MRT4530_29781C.1
atggcggaagtcgacggaggaggagtggacgaggtagccctcggccgtgcgaacccgaagacgacgacggcgcggctcggcggcggtgctagcggcggcgagcggtggccggaggcggagcggggaaggcgagtcgtggctgggagggggccctattgcgccggcgaagtggggaaggtggaggaggagagagagtggggttggggatttcaaatcccccgccatttgtgggcgtgcgggcttgcgggaggcgtggggaaggtgggcagcgacgtgggtgtgggggcgtgggggcgagtggaggaggtggggcgccggcggtgcgggcgtttggagctccggctccaacggccgaag

SEQ ID NO: 24836 - DNA, 329 bp, Oryza sativa
  Clone ID: PAT_MRT4530_29782C.1
gtaaaaaaaaataaacctcaatgataatcatgtttgattttaaaatctcaatgacaataaagaagggcggcagatttacttgttatatatttgaacaaccgttgctacataataagtttcgtgcgttttcgtttgtaaaggtacttgcttgggcgaaagaagcgaaagaaaagagaccgagcgtaataaatgcatggatgattaaagaaattgattggggaccaaaccaagaccttctccaagtctacttctacctcaccatgtcacttttggtccatagaagacaagagataaagttccacacatattggattcagatctcctgacag

SEQ ID NO: 24837 - DNA, 680 bp, Oryza sativa
  unsure (1)..(680): unsure at all n locations
  Clone ID: PAT_MRT4530_29783C.1
tccccgggctgcaggctctcatataatagcatatatgttttctcaatgtattattcaaatatattaaaatgacaatacaattttaaattttgtactaactttacgaaactactaatgtgtaatattcatattgtattttantatacgtgttagttattaattatttttaatatcaaattttagttatttataaattatattcctatatggactctagactcgtcttttaatatttcttttttttattctgaattttcgttatctgtaaattgtatttctatatagactctaggctcttcttccaatattatttatttttaattctgaatttttattatttctaatgtatttctatgtggactctaaacttatctttcaatattctttaatttttaatttcgaatttcagttacttctaaattgtattcctatattgactttagactcttgttcccatgtttttttaatttcgaattttagttatttgtaaattgtatttttatacgaactctaaactctacttttaattttattatgtttattccaaattttagttagttttagattcctatatggactctatactctacttctaatattccttattttcaattccgaatttctattatttcttaattgtattcctatatgtactctatactctacttctaatattcgtt

SEQ ID NO: 24838 - DNA, 604 bp, Oryza sativa
  Clone ID: PAT_MRT4530_29784C.1
atggaggcggccgccgacgaggagcaggaggggatctccgcccagtcgccggcccaggcgccgccctcctccgcctcgtcccttcccaaggagcaatcgcaggtggagctggagctgcgggtgcttcaggctctcgagttctaccctccgtccaaactgaaaggcattcatcgtcactttgttatctatggtctaatggaatacttgagaaaaagtcttgatagacaattctctgctgatgaagttttacaactactggaccgattcttcaacctagaaatgctgaagccagaggacgacgagaaggataacttcactcaaggagaagaattttccttacctgaaagtttctttaacaaggacgaatgatagcccagtaaccctgcagcgcaacatccttcgtaatttaacagaggggactacgaatcttatgatgtttccaatgattctcttgcgtagacatctcttgacggcacacttcgaactgaaagaacacattttgctcggccgtgtctttgtgttagtgcttactgtgacttgtacagcttctgttgacttaggatatgcagtcaatggtacgggatctcagtacccgttaactatc

SEQ ID NO: 24839 - DNA, 237 bp, Oryza sativa
  Clone ID: PAT_MRT4530_29785C.1
cccacgcgtccgataatttgtgtttccttttatctggaagcatgtatgatgaataagtgatgaactcagatgttcttctgtttaaaaaaaaaaaaaaaaaacaaaaaaaaaaaaaaaaaagaataaaatcttgcggcattgcacaaaaacgcgctgcggccaaagccatggcgcaagggccagcccgactaccagaatgaggataatgccccggccatcagatagtacagcctgata

SEQ ID NO: 24840 - DNA, 180 bp, Oryza sativa
  Clone ID: PAT_MRT4530_29786C.1
atggcgcgagctttcactgttttcacagcctttttcaccggtggtcttcgtcttctactcttccctctcctcgtctgatctcgaacaagtgtttgcccgtctgtccatgagagttcagagaatgcgtcggcgagactaccacaaaagaacagcagcgccaacggcatgtaccacgtctga

SEQ ID NO: 24841 - DNA, 595 bp, Oryza sativa
  unsure (1)..(595): unsure at all n locations
  Clone ID: PAT_MRT4530_29787C.1
agggaaagctatagcaagngacatttacagttccccatgacaatcagacagaaattacagataaagagttaacaccgcatggaaatatcatttcaacgcaaatgagtgattggcatgcgttgtacaagatgcaaccagatagtctgtgcagtaaaacaaaagctaaactcctcaaaatcgcttaaatttctctggccggtaaaccaagtgactagctgatataaaacctccacgatgccaactaccagttttgcagaataggcaagaaaccttagatgctgctagggtacatgaagacgcggaccttcttgcccatggaggtgggcgggaggttggaccggaacttggcgcggacgacgccggagttgccgtgcgggcgggtgaccttgccccagatgcagcgcacccccacccgttgctcttcgtcttggccttgtagacgtaggcgatgcgcttcccggcgtaccacccaacctcctccttggtgttcaccccctcgatctgcagcagcgacgtgttctcgtactggttcgacttcgacttttgtagccgagccgcccccctcgccgtacagctncacgcgctggccgaacgc

SEQ ID NO: 24842 - DNA, 683 bp, Oryza sativa
  Clone ID: PAT_MRT4530_29788C.1
attaacaacgtcaaccttaatataatcgaacaaatttcgttgcaccaaaagactctctcttgtattaaaatcagcaacagtttaattaattgctcacaagatcatccaaatgaatagcgccaaagacataacctcccgtctctggtcgatactttcttcaatgcttcaagctaaaggagcaacagctagtgagacgatggcatagcaaccaggcaaacgcatcagaaatccaatcactttccagccctcttctggtactggcccttgacccacttgatgccactgctcgtcccggacttcaccttgtgcgctccgaccagcgccgccgccttcgccttcacgaggccctccgacgccgcggccttcacgttgccggccaccgtcttcttctcgctgttcccgctgctgcctcctcctcctcctcctttcttgaagcttccgtcgccaccagatgagccccactggtctgcccaggttggggcatccttcttggaacccatggagacgctagctggagctggagtttcatctggtgccgctcggtgtttcgctagttttacaataagagaagaatattttttttatgtgtatcaaacagaacagtgttttctgaagcagaactcgagcaaatgaatagagaaaattctcactgctctggtgagcagtatgtgcaatatcttaca

SEQ ID NO: 24843 - DNA, 2054 bp, Oryza sativa
  Clone ID: PAT_MRT4530_29789C.1
ttttttttttttttttttttctagttttttcttttttttgatctaatggcctttttattattgtcttgaaagagaacacgacattgcaacagcagccgaatcggatctggaagagaaatgtcatatttttgatagtccgaaagatggcaacaacagccattccaattttaaatcgacactgagtccaggttcacatagacatttaactcatctgaagtatttttgaaactgtacattattgtaaaccaggcattttaaagccatacattgcttgtggatacaagaacactaacaatacagatatcgcgagcagctcaattcgaatttgagccggttcgcacagaagccacgcagattcaaccatccaattcattcgagtgactggaacctcgaccgctgaccaagaaatcttcgttcgctggattccaggaaataatttcccttcacagcatctgtgtctcataacatgaagccacgcttccttcatcactgatatttgatgacattcctttggagtctgacattcatgcctcctcttccttacggaagatattcattgcatcgctgtataaagcaacagaattggagaggacagcaagcacgatcatggttacagccaagatcttgtcacgcttggatgcgattccataaggatccctaagtataaccatggcagggaagatgaaaccaatcaggacagcagcagttgcaccagtaaactggaatgcatcccaaatgctcggtatgaaaatggcagcaagataaattactgtgaggagtgagatagtgattatggcaaatctcttgttgtcacgagaaatgtgccttgatgtggggaagagcagtccatccaagttgagcctaagggcaaagaagactatgggaaagacaagcataacgtgagcagcatagctcactcgcactatatcatcaaagacggaactaaatggaatcccaagatttgcatcgaagttagcgagaacatcatctagggtaccctcgccgaagaggagatatgcaaagaaacttgtagcaatgtaaacactggagcagaggaacagggatgttcgcacaataggtttaatttgtgttctgtcttcaagctcattgtcaatgctgtgaacattgtaatggcagatgtaggcagtgacaagaacagggacagctgtgaagagcttccagatggaactaagaccatctagttctggaaaaagtttgggcatcgctacagttccatagatacattctggacacaagaatacgttatctgaatattagaaaaaaaataccaaaagcaaccgatagggcagaggtgtatctcaatgaatccagacgcttaaacaatcatcacgccaatgtgtttatgacgacagaggcctgcagtgcaattcttccccactgtccgtaagcctcacccattagccaaccataagatgtaatcttgccctggtggctgcacctgacaagcatgtcaattgatgcctctgtgagcaacgccacaacgatgatcatcagaatccctgggatgatgcccaacatcttgatactggctggcaaggccataattccagccccaacaatagtggtcgataaattgaaaaccgccccggaaaatgaagctccattgaactcatgaaacccctcctcctccaccttgaccggcagaagtggtgttgtctcatctcgtgtttccttttgtacaatctgctggctcccattcggcgattcgctgctgatccccattatgtctttcactctcctgataacttcggaggctcagtcccctcccggatctgaaaccagcaagagcaggcagaaccagacaaatcgccaagaaatctgtggagggcggcctcgccgcagcccggctctggcacctccagtagcaccatcaccaccaccacctctagctctttccctacccctggcaccttcacccccaccttcaccttcaccttcaccttcagaaccaccttcaccattaccaccaggaccaccttcaccttcaccttcaccttcaccttttgcaccaccaccaccaccaccaccaccat

SEQ ID NO: 24844 - DNA, 1536 bp, Oryza sativa
  Clone ID: PAT_MRT4530_2978C.1
atgccgccgctgttgggcgtctacgacttcaccgccggcctgcctccgtcgccgccgagtggtgcctccgcctacacggctggcctaatatgccgccgctgttgggcgtctacgacttcaccgccggcctgcctccgtcgccgccgagtggtgcctccgcctacacggctggcctattatgccgccgctgttgggcgtctacgacttcaccgccggcctgcctccgtcgccgccgagtggtgtcctcgcctatacggttggttggtcacaccaccgttcatgggcgtctacgacttcaccgccggcctgcctccgtcgccgccgagtggtgcctccgcctacacggctggcctattatgccaccgctgttgggcgtctacgacttcaccgccggcctgcctccgtcgccgccgactggtgtcctcgcctatacggttggttggtcacaccaccgttcatgggcgtctacgacttcaccgccggcctgcctccgtcgccgccgactggtgtcctcgcctatacggttggttggtcacaccaccgttcatgggcgtctacgacttcaccgccggcctgcctccgtcgccgccgactggtgtttctgcctacacggctggcctattatgccaccgctgttgggcgtctacgacttcaccgccggcctgcctccgtcgccgccgactggtgtcctcgcctatacggttggttggtcacaccaccgttcatgggcgtctacgacttcaccgccggcctgccttcgccgccgccgactggtgtttccgcctgcacggctggcctattatgccgtcgctgttgggcgtctacgacttcaccgccggcctgcctccgtcgccgccgagtggtgcctccgcctacacggctgacctattatgccgccgttgttggatgtctacgtcctcaccgttggctcaccttcgttgccgtcgactggtgtttccgcttacacggctgacctattatgccgccattagtgggcatcttcgctttcaccgtcgaccgccttcgtcgccgccgactggtgtcttcattgttattgatggacgactttgttcccacattggccacttctgccatcaccaaggggaatattacaaagctaagatccagatccagatatgcataaaagggattcatggctttaagcttatctcttacgctctaggaatggatcagtcagaacatcaccaccggccggctcgtccgccgccgactggtgttttcgcctgcacggttggcctattatgccggccgttgttgggcgtctacgtcttcaccgaccggcttgccttcgccgccgccgactggtgtttccgcctgcacggctggtcttttatgccgccgttgttgggcgtctacgtcgtcaccgaccggcttgccttcgccgccgccgactggtgtttccgcctgcacggctggcctattatgctgccgttgttgggcgtctacgtcttcaccggccggccgccgcatccgccactgactgatgtcaccgctagcacggctggcctgttataa

SEQ ID NO: 24845 - DNA, 1224 bp, Oryza sativa
  Clone ID: PAT_MRT4530_29790C.1
atgacgagaaaaccagaggaatccttggattgcgcagctaagaacagacaagggagaagatcaggcctccaacttaacgatcttcccatagatgttttgggcttgatcatatcgcggctgccaattggagatgctataaggactggacttatatcaaggcaatggaaggatctttggcgtgatcatactatgctaacattcagtcgcgccacatttcctagttgcagaatgcttaaccagcaaaatttcataaggagagttgattcaatcctgcagcaacatagtggtgtaggcgttgagcgcatggagatcaagttcttattgcgcaatgcgcggcgggacatagatagatgggtgaaatttgccgtcgcatccaagacgaaagaactcattcttgatctatcagatcttactaggttcttcatgttgccagttatgtgtctgcagcttacctctatgtatctgaaaccggctgctgatttcactggatttctgaaccttaaaaggcttaacctgataggtgtaaatatcacagatgaaggggttcagaatttgctgtgcaatcccaatgtcctggagttccttgagatctccttctgcagaatgctcacaaagattcatgcacctcattttctgaaccggctgaagcatctgcaagtggattgttgccctgtacttgagaagatagagatgaactgtgatctggcaacacttgatttcactggttcatcaatgacacctttgatttttgctacaacttccagcctgacaaatgattcatcagtaatttgccggttgttcgaatgctcgaatttcatgttgttgaatataaggaagactgatatccttgactatgcatatcttttagaaattgctccttttatggaaaaactggaactacatatgtggatagacgctcctcacaaaccatacagtgaagaggatggtgatctaagaagccttccattacaccatcacaataatctcaaacaggttcagatcactggaattttcggtcagaaagatcaggtagagctggcacttcatatcctttgcagctcaaccgtgctcaagaacatggtgataaatccagaaattgcaatagtgcctcacgatgcttatcgaccgccaaaaagaggggcacacaattttgtggatggtcgtgacgccgctatggagtttgtttgcaaagctgaccatcgaaacgtcgtcgaagttgtatga

SEQ ID NO: 24846 - DNA, 204 bp, Oryza sativa
  Clone ID: PAT_MRT4530_29791C.1
atggggcgccgtagagtggttgtggacgcatgggagggcgtcgtggaccaagttgccggagaagagcgaagtgtagtcgaggaagatatgacgacgctggcaatgagacatgttcgacgaagaaaaaggcgcagtagcgggaccaacggcctggacggcgtcgtcggtaacagccatgtagaggtagctggagcaccggcctag

SEQ ID NO: 24847 - DNA, 375 bp, Oryza sativa
  Clone ID: PAT_MRT4530_29792C.1
atgagttcaagagatggattctccgacaacaaactacttgacgacttcggctgtacggggatacgactcgagcgaagtgcgttctccgacggattggagccctcatcacctcaagttgattttacgacaagggatacttcaatgacttcggctatagggggatacgacccgaacgaagtgatcaagaaatgcctactcctggttaccgaccagtcgattacagcaatctctaatcacctaaaagttgccttcagcgatctctcgacgcataacacagcaaccgacgcagttgtgataacaacaaccaagaccgataggatcgccgtagtcaccaggacgacaacgtccaagtgtaggatcaaggaggccgactag

SEQ ID NO: 24848 - DNA, 584 bp, Oryza sativa
  Clone ID: PAT_MRT4530_29793C.1
ggagagaactagtctcgagttttttttttttttttttttttaaagcaaaaccaattggattttattcgcactctgctctatacaagataatgattccttgaacggagaaaaatcaggaatgctctaaaacaaaattgggaattcttactccagccagaatgctacatgctatgcctctacatatacttcgtgattaggtaggatacctccaccgatgaatattgttactaagaattgatcgaactaaatagagccttcagattgcttatatccttcataacatccatgtattctgaaatcttatactgtaattcagattccaaaactgaattttccatatttagctcctcaagaatgtcagcaaagtaatcacgtgacgaactttctattgcgttgatcttcattttcaagttctcactctcatcccctagcgaacctttctccttaagtaaaagaactaaatccttgttcaaatctccaagcatgttagcctggaaccccttagattcattgatgaacttttccctgataaatataatgtaaacaatctgaggcattatttcctgttcagctctttttggaag

SEQ ID NO: 24849 - DNA, 182 bp, Oryza sativa
  unsure (1)..(182): unsure at all n locations
  Clone ID: PAT_MRT4530_29794C.1
aataacttcctcaaatagctatggcgaccatagctttctctcggttatctatctacttttgtgttcttctgctatgccatggctgtatgggccaactatttggnccgaagcgagatccatggcacagccgctagacgggggcgagctccacgctctgatcatcaagtacaacccgggggggg

SEQ ID NO: 24850 - DNA, 157 bp, Oryza sativa
  Clone ID: PAT_MRT4530_29795C.1
tgttatcgtcagtcctgccgaagcatacgtgggacaattcgacaccaagccactctcaaagatggcatgctttagatgactagagcgacggccttatttacttctgattcttatttaataataattcatttattaatttaccttttccttattaatt

SEQ ID NO: 24851 - DNA, 219 bp, Oryza sativa
  Clone ID: PAT_MRT4530_29797C.1
atggccacggagtggacgggtggtggcagagtgtcgatgctcacctatgtgacgcggacaactgttaattttaacgcgctggggcggacaccgaccgggcgacgtcacatggtctccattcaccatggcgacactgaggccgagataggggtggagcggaacgttcgcccgtcatgccgtggtgttgcttatgaagttgtgggtggagctaaagtctag

SEQ ID NO: 24852 - DNA, 1610 bp, Oryza sativa
  Clone ID: PAT_MRT4530_29798C.1
ataaaatatttaatcatttgcttgtaatcaagcattcaagctaacagatatcaggtgtacaaaatcaacctcgaaataatgaggtgatatgttgatacatgccaaacatttcaacattgaacagagttgtttaggtgtttaaaagtggcacacaactatatcacataacaatagaattaactcatgtaagtttatcagagtgttaatacaaaagaatgatcaaatacaatcaaatagcttgtaaccaaacagatgtctccaactcttcacacatagaacttttttggcttagccctacaaactggaagacttaaatctgatggtcggtgaaacctgatagaggctctggaatgaaatatggctcaagcatacatacgtgttctttcttgcttgatacagcagagtgaataaagttctcaagtcaagggcagaccaatatacaagccccaatcaataaccactcactccatgtcttcatctgctttacagaatatgatggtagaaggcatgcccaagcagggtgcacgtagaacaaaattagggcccattcaataatactgcaggccatgctgttctacggaaccaagtagaccaacgtaatacccgattagtgtatgaactgtctgctcataatcctaagaaggcacattgcttcttagcatgctgtggaaccaacttcacaagaaattccattgatgctcctttcagctcacgaggcttgaaattgaatagtgggggaagagtacggccatttggtaagcgagcatttggatctcgtagttcatcgaagaatggatgaattaacacctccaatgcactgcaccggaggtgtggtgagtactgcagaagccgagacacaagatctacagcttcagatggcattcttttatgaaagatcttgtgccatgggtgagctttgatttgggggaacttaaactcagtgtagttcggattcatatgtttgatttcttcccttgttggagtacccagtaccttgataatttcaacaagttggtcgacgccactgtcaccaggaaaaacaggctgccctagaagtagttcagcaagaacacagccagcagaccacacatcaatagttgtcatgtactatgctcatctcgctgatatcatctgtcagacgatcagtggctccactagtactcgtttccgggaaacctgatgaagaatctactagacccaccgatgtcataatagccaagaagttttgtaccttctggttcactcctatggaccaagatcctttgttacagagctacacacaatccaccaacggatcgcttcggcgacggcaacgcaaacccggaggaggaggtagccacggacgcgggagagcgccgtccagcagcgggcacgccctggaggccggatctggagcctggagccgagcgggcgtagtacgtcggcgatgcggcgggctagggcaagcccgcagctgcggcgagggagcggggcaagatcggcgcggggggaggaggaggaggaggaggaggcgggattcggattcgatctaggcggagggcgatgagcaaaatcgccccccttcacctcactaaccctagttcgactcctctcctccctgccccgtctcc

SEQ ID NO: 24853 - DNA, 422 bp, Oryza sativa
  Clone ID: PAT_MRT4530_29799C.1
cccaaaccaaaaaggattttttttggaaaggggcccagggaaaaccaaccccctcccacccatggggggagggcggcctttggaacataacccaaacagcccaaaaaaagaaagggcctggaaaaagttgggcctatggaaacccttattggcttcccccccaaacccccagggaaccccaaaatccggggttcacccccaaaaaaaaaacccgggaaattttttcttttcctaaaaccattcctaacccgcgggggaaaaaaaaaaaaaaaaaactccccaaccctttgggaaaaaaaaaccttgatttgggggaaccagcctttatgtttaagggggaaaacatttttttaaacttaaaggcttaaacccaaaaaagaaaaaccccggcaggggcccgaaaaaacccccattttccttcc

SEQ ID NO: 24854 - DNA, 808 bp, Oryza sativa
  Clone ID: PAT_MRT4530_2979C.1
atggctgccgtcagcaccgccttcatcttcggaccggcgattaatgctggtcatggagtcgaggagtctcagctttccggtcgatcggccgcgagtccactttgccggcttgtcttcgccaccgccattgctgataacaacaacgatttcaccgccggcctgcctccgtcgccgccgagtggtgcctccgcctacacggctggcctattatgccgccgctgttcggcgtctacgacttcaccgccggcctgcctccgtcgccgccgagtggtgcctccgcctacacggctagccttttatgccgctgctgttgggcgtctacgacttcaccgccggcctgcctccgtcgccgccgattggtgcttccgcctacacggctggcctattatgccgccgctgttgggcgtctacgacttcaccgctggcccgcctccgtcgccgccgagtggtgcctccgcctacacggctggcctattatgccgccgctgttgggcgtctacgacttcaccgccggcccgcctccgtcgccgccgagtggtgcctcgcctacacggctggcctattatgccgccgctgttaggcgtctacgacttcaccgccgacctgcctccgtcgccgccgagtggtgcctcgcctacacggctggcctattatgccgccgctgttaggcgtctacgacttcaccaccggcatgcctccgtcgccgccgagtggtgcctcgcctacacagatggcctattatgcccgccggtgggaggcgactacgacttcaccgccggcctgcctacgacgccgccgagtggtgcct

SEQ ID NO: 24855 - DNA, 1047 bp, Oryza sativa
  Clone ID: PAT_MRT4530_297C.1
atggcgtcggagctgagggcgatggcatggacggtgctgctcgtcccggcgtgcgcgtggtacgcgcgctcggcctgccgccgcctacggccaggactgccccgcctcgccgcgctcgccccgacgttccccgtcttcgtctacctgccgtgcctgttcaactccctccacttccgcctcttcagcaccttcttccacacctggctcgccatcaacaagctcgtcctcctcgcgctcggcatcggcccgctacacccgtccctccccctcgtcccgttcgtcctctgcgccagcctccccatcaagctccgcctcagccagcagccgcccgccgccaagcgttctccttcgtcgccgccgccaccgcccctcgctgacttcctccgtccctgcgcccggagctttttcttcctcagctgcctcttcgtggcgtacccgcacacgggctggctacccgtgtacgccgtccacttcctatactgcgtccaggtcttcctcacgctcgacctcgtcctctcctccgtcgcgctcgcctcggcgaccgtcctggacgccggcctggagaggcagttcagcacgccgctcgccgtcgcgtcgctgaacgacttctgggggcggcagtggaacctgatggcggtggacctcctccgggcgtcggcgtacgagcccgtgcgcgcgcggtggggccgcgacgccggcgtgctggcggcgttcctcatgtcgggcctgctccacgagctcctctacctgtacctgacgctgcggcggcccaggggggagatggtgctcttcttcatgctccacggcgtgtcccagatcgccgagcgctgggccagggcggccgggctgtggcggccgcccaaggtggcggcgtacctcctcgtcagcgccttcatggtcgtcaccatatcggagctcttcttcgggccgttcatgagggccggggccgacgtgcggctgatggaggaggccgcggcgatgctgcagttgatcatgggcgtctcgaggcgtctgctccgaccgtttggggtggtttcgagcctctaa

SEQ ID NO: 24856 - DNA, 1317 bp, Oryza sativa
  Clone ID: PAT_MRT4530_29800C.1
tcataatcctaagaaggcacattgcttcttagcatgctgtggaaccaacttcacaagaaattccattgatgctcctttcagctcacgaggcttgaaattgaatagtgggggaagagtacggccatttggtaagcgagcatttggatctcgtagttcatcgaagaatggatgaattaacacctccaatgcactgcaccggaggtgtggtgagtactgcagaagccgagacacaagatctacagcttcagatggcattcttttatgaaagatcttgtgccatgggtgagctttgatttgggggaacttaaactcagtgtagttcggattcatatgtttgatttcttcccttgttggagtacccagtacctgaatgaagtacagtaagtctcctgcatgagctaaaagaaaagggggaaacttgataatttcaacaagttggtcgacgccactgtcaccaggaaaaacaggctgccctagaagtagttcagcaagaacacagccagcagaccacacatcaatagctgtcgtgtactctgtagccccaaatatgagttctggggctctgtagtatctagaacagatatatgaaatatttggttcccctttcaccaggacttttgcactgccaaagtcacacaatttcaactgatgattatgtggattcaccaatatattctgtggctttatatctctgtggcatactcccacacagttatgaatgtatgccaaagccctacaaatctggtacatataaagtttaacataaatcaatggcatgcgttggctcatcttattgtaatgtctaataacacgatgaacagtttctggcacatattcaagaaccaagttgaggtatagctcctccttcgcagtagtcgagcaaaagtaatgcttcaagcatgcaacatttgggtgatcgagaacttgcatcgtttgcagctcccggttcttgtatctcgcatcttgaagaactttctttacagcaactctctcaccagtttctagacacttagcctggaagacaactccaaatgaaccacgcccaacagcacgctctgcgatgtaactaattgtctgctttggctgcccatttcttccaccaacagttgtcacaatagtgtgacctatgtccatactattgccactgaccactacagcttcaacttccttatctcttatgctcatctcgctgatatcatctgtcagacgatcagtggctccactagtactcgtttccgggaaacctgatgaagaatctactagacccaccgatgtcataatagccaagaagttttgtaccttctggttcactcccat

SEQ ID NO: 24857 - DNA, 202 bp, Oryza sativa
  Clone ID: PAT_MRT4530_29801C.1
atgccgaagtggatggtggaggcgccatgtgaacgcggcgttggccttggagctttgggcggcattgctccgtgcggctgcggcgttgtccatgaagcttcgggcggcagcggcagtgctttgtgcggcgcggcccacagcttccatggcttcgctgttgcctccgactgctacttttcggtaacggtgaagatcttccatg

SEQ ID NO: 24858 - DNA, 1104 bp, Oryza sativa
  unsure (1)..(1104): unsure at all n locations
  Clone ID: PAT_MRT4530_29802C.1
gggcacgagggcgcagttcgcttcaccgttcccggagttccacatcggcaacctgcagccgaatctgatgctctacgccggcatccgcctcccgcccgccgatcgcgccgcccccgctcctcgcccgccgagaatcatcatcagcaccgacctgacgattggcagcccgggtaaacccgacgacgccgcgtgctctccctcatccggcggcgagaagatcgacgacaccaagccgcgggggtttctcctctttggacaggcaattctaaccgaggagcagatcaagaacggcaactccgatggtcgtccggcctcgccgaactgggacgccgagaaggcgcctaacacctcggaaggctccgactccggcgtcacccagggcagccccaccaagaacaccacgccgtcgtggagcctaccgtattttggaggcaacaacatcagccgcgcatccgagtacgagctgaatcccgggcagtgcaaggtgttcgtcgagtcggaaaccgtcggccggagcctcgatctctcggcgctgagctcgttcgaggagctgtacgcctgcctgtctgatatgttcagcattggcagcgatgaactgaggagccatctggtgtaccgcagccccgccggcgaagtcaagcacgccggcgacgagccattctgcgcgttcgtgaaatcggcgcgtaagcttaggatactgacagatgctggcagtgacaacctgggagattagaagtaagtaataaatcagcccgaataacttagggcgctactcctagtcttttagaagncaaaaataagccgagagctgcatgcacgtacagctgcatgagctgcggtttctccttgctccagtccagtctagagatttttattcagggtaaagctgatgcagtcttcagttaattaggtgttttttagtcctttttacagctttctcgctaggggtttcaggtaacaactactagcgcaaagtgcagacagaatgtagtctttgcaccttggtcatcaaatcaaatgtactggtacttcttttattctcattcggcggatattgagccttaatttgtttcacgaaaaaaaaaaaaaaaaaaaaaaaaaaaa

SEQ ID NO: 24859 - DNA, 243 bp, Oryza sativa
  Clone ID: PAT_MRT4530_29803C.1
tgtagttcttgacagaacatgccctccttgtgcctcggggcctcgcctgtcgctggtgtacttgccgagctggccagctgagtttgtgccttggctgctggatgtgagccagcgctgtccttgctgcctgcttccactgttctccgtgcttgccctgccccatgtcttgaggcacgtgttcttgcagtgcctcgctgtactgagaactgacactgtgccactgggttgggcccctggttcatc

SEQ ID NO: 24860 - DNA, 167 bp, Oryza sativa
  unsure (1)..(167): unsure at all n locations
  Clone ID: PAT_MRT4530_29804C.1
ggtcgattcctttgtgacatatggacctgaagaaacaacacagccttgtgaggaccacctttatgtacctggtgtaaattgctggaccngcaacgtnaggaacggttctganccncacccgggactaaagatcttttcccactatttccaaattctttttgaacccg

SEQ ID NO: 24861 - DNA, 287 bp, Oryza sativa
  Clone ID: PAT_MRT4530_29805C.1
gtggtggacaagaatgaccggtctggcactggtcgcgtcatcgacagacagccacggtcccgcgtcatctctgccctcgggggaggtggggatccacaaaaacacaggagtagggtattacgcttcgcagcggcccgaacctgtatacatcgccgtgtctcgtgtgtcttgcgggcgggtgatctttccacatacagagagagagagagagcttgggattgcaccctaagcccctggtcgaaccggcaaaggggggcttgcgcagtctcccggtgaggggccacgag

SEQ ID NO: 24862 - DNA, 1869 bp, Oryza sativa
  Clone ID: PAT_MRT4530_29806C.1
atgctgagcgtggtgcgggtgcacctgccctcggagatcccgatcgtgggctgcgagatcacgccctacgtgctgctgcggctgcccaccggcgtcgtctccaccgacgatgtcccggaggccgcccctgcggatggctacttcatgcggtacagatggtaccgtatacaaagtgatcgaaaagtcgcaatctgcagtgtacatccaatggaacaagcaacaattcagtgccttggttgcgtcaagtcaaaaatacctgttgctaagagctaccattgttctgctaagtgcttctctgatgcatggcagcaccatagggtcttgcatgagcgagctagtagtgcattaaacgaaaatggagctgaagaagaggagctatttggcagatttggtagcactggttctggggttcttagtactactggttctggatcgatgtcaaatcttggacagagtcctggtttgaataatggccccgtgcctttatatccttcaggcactgataagaactcgggtgaaacttggtatgaagtggggcgcacacggacatatacaccaactgctgatgatattggacatgttctaagatttgaatgcgtgtctgtggatgctgaaaaaaaggtacctgttggacctccaacttcaattatgacatcccgtgtgattccagcaccaactccaactccacgtcgccttatccaagtgaatggagatgttttgagtcacttagatttggacagccaaacatctttcgggacattctcagtgctgtcctacaatattcttgctgatgcatatgctacaagtgacgcgtatagctactgcccaacatgggcactttcttggacatacagaagacagaacttgatgcgtgagattattggttatcatgctgatatcatctgtcttcaggaggtgcaactgaaccacttcgaagattttttttcacccgagcttgataaacatggatatcaggcactttacaagaaaaggacaacagaggtatatactggagctcctcatgccatcgatggctgtgccacctttttccgtagagacaaattttcacacgttaaaaaatatgaggttgagttcaataaggctgcacaatcattgacagacgcaattattccctctacccaaagaagagttgctttgagtcgattgattaaggataatgttgcactgattgcggttttagaagctaaattcggcaaccatggaactgacaatcctggcaaaaggcagcttctttgtgtggcaaatacacacgtaaatgtccatcaagacctcaaagatgtgaagctgtgggaggttcaaactctcctaaaagggttggaaaaaatagctgttagtgcggacattccaatgttggtctgtggggatttcaattcagtccctgggagttctccacatggacttcttgctatgggcaaagttgatcaattgcatccagatctggccatagatccccttggaattttacgccctgcgagcaagttaacccatcagcttcctctggtgagtgcatattcttcatttgcaagaatggtcggtgtcggctatgatttggagcaccagcggaggaggatggaccctgcaacaaatgaaccacttttcacaaactgcacacgagatttcactggaacggttgattacatattttacacagttgttgcagggttgacaaatggggagatgaatggttggtgctttgctgggcacctgctctcttcgccggttggtcaggtctattgggacccacttgcagcgagaggagtggtgggcccacccctcgtggcgcaggtcgatgctggactgggagtgacgggcgcgaatttttgcgcggctggccccgcaaccgcgtga

SEQ ID NO: 24863 - DNA, 271 bp, Oryza sativa
  Clone ID: PAT_MRT4530_29807C.1
atggtgcgggggagcggggagtgggaggaggagcgtgtagcgcgtgtgaaggggggctcgcgtgaccgtgataaatgggagtcgtgcgtgaccgcgacgtcgtgggagtccaaaatttccaaccacgagcgggggttggggacttggggtttcaacgcgacagcggcatgcggaccggcgagggaagggacgggcgcgtacgcgtacggtagctttccccccgcgcgcgtcgcgtcgcggtggcggtgccccgtgcgtgctgtcgccgcgc

SEQ ID NO: 24864 - DNA, 273 bp, Oryza sativa
  Clone ID: PAT_MRT4530_29808C.1
atggtgggctcgggcggcagcagcgtcactgccgcatacggatcaagcgccgtcaacgactacggcgggcagtgggggcgagtggatccaacgccggtgacgacggtgggtggtgggggcagaagatccgatggcgatgatgatggtcagaagcaagcacaccacggctgcaccactcgtggatcgaggaaggttctggggttcatcagcgagacgtcgagcagtgcctcctgtactcgttctggccccggcaaaggcaacaagtacgtctga

SEQ ID NO: 24865 - DNA, 453 bp, Oryza sativa
  Clone ID: PAT_MRT4530_29809C.1
atggccgatgaacagatcagagacctgaacttgtcggagacccatacgttgctgctcatcaacctttatttgtcacacgtacaggggccgagctacgttccacacggtgttgaatcagcatacatccacatcaatcgtgatatcgaagaagatgacgacacgtacagtgatgacgggttctgcgccgtcccggcctccagcgacgccatcgctgcgctgccagtgccagagacgacggtgagtgagaccgagacgagggaggaggaagcatgtgcagtttgcctagagggatttaaggagggtgacagagtcaagaagatgccttgctctcatgacttccacgcgaattgcatctctgaatggcttagggtgagccgcctctgtccacactgccgttttgctctgcctgctgagagggattctgaacagaaaaacccagaaggggaagcgtga

SEQ ID NO: 24866 - DNA, 822 bp, Oryza sativa
  Clone ID: PAT_MRT4530_2980C.1
gcacgaggcctcgtgccgaattcggcacgagcccgcgcggaaaccgcccaccaactttcgccgtatggccgccggtcgccggggcggcgtctgagagggcgcccgcgcggcgcgcggcgcgggtcggaagcggaggagggcgatcgagatgagggagctcgccggcagccccgggacgtggagcggcctctcgctgcgggtggggcagctcgtcttcgccgccgcgtccgtctgcgccacggcctccgccctcggcttcgccgcatacaccgccttctgttacttgattgcatcgatgggactacaggcactctggagcttggcacttgcttcccttgactcctttgccctgaaattcaagattgatcgcctctgtgctgttctcctgagcccactggtggtcggcgtccgggtaacagcaatcctgtcgttcgcggcatcatgctcagcagcaggtgtagttgttctcttcgatagggacatatacgcttgcaggaatccccaactcccttgtggaagatttgaactagccatagcatgtgcttttctttcttgggcgtttagtgccacatctgctctcgtaatgttttggctcctcgcttcattgtgaataaatttgtacaacttctgtctgtagctcccctctgtttgatcccttctctgtatacgaactaatttttgaagacaacacacagaagttctgaaatgtcatacaagctccatgaactctgtttccgagaaactaattgaatgggacatctgcagaaaatttatgttccatatgctccagcacgtttccttctcaaaaaaaaaaaaaaaaaa

SEQ ID NO: 24867 - DNA, 356 bp, Oryza sativa
  Clone ID: PAT_MRT4530_29810C.1
gaaaaaaaaatgaaaggaaagctttaattttataaatttgaaaaacacgttaaaaaaaaattaaattaaaaattgatgggaaaataacctaaaaaatgtattggattcaaacgtttaagtccaaaaccccaagtacatgatctagcataaaaaatattattattaagcagggactgggtatttaaatgtaaacccaggaatgaagtgcagcatgaagcttaaattctaattaaaaaaagccttatttttgttcaaagaaaaaactttgtaaaaactgaaaaaaccatggacaaaaggatgtgtggcgaaaaaaaaaagatatgttaaaacaaacaatggtttaaaattaatggggc

SEQ ID NO: 24868 - DNA, 381 bp, Oryza sativa
  Clone ID: PAT_MRT4530_29811C.1
ggggaccgggcgggcgcgccgcgacctcagccacctgcgcaactccgtgctgcggatgaccgggttcattgaaggatgacccggcacggctgacccgtcgtttgtgcacacatgcatgcagaggagtggacgacgactggtcgccaaacacccgtccgtcgtcctctcggcttgcactgggtgctcccatttttgttcgttccccttaattagttgcggtgtcatggtgtggacgtgtggtccatgagcaaatattgctcttgtaggaaaggaagcttcgccatgtgtgcctgagttaggattctgattatggactaattcaagtgtgtcttgtgtacagttcctgaaaatgcattttgaaatatcgacctttttgtttgg

SEQ ID NO: 24869 - DNA, 774 bp, Oryza sativa
  Clone ID: PAT_MRT4530_29812C.1
atggctcgcccgatccccatcgccgccgttcgcgccgccggctcgcccgatccccatcgccgccgtcgcgccgctggctcgccctcgccagcgtctccccgcaggattgacatctttggattgcataccagaattttccatgttcttcagctcgcaataattcatcttcaggcttgtgtcgaggagaaagggaagcgaggaaaatttgtaggtgaagaaattgacagattgcaatgggcaccagttgtgctggttacactcttaatccaagccacaacaaattcggtggaactgaacctggctctttctattcagatacagcgtgtaggagttggagggtgtaggactggggttcgcattgccaatgagaggaggaagaccgcctccaagagccttgtccccatcctgtacatggccgtgatgatcgttgacatcgaccaggatctcttcagggcgccgtcgtggatctcccgccatgctcgcaccagcattcagatcgacgccacctcgccgatctcctctgtgccgccgcccacgatccgccatcacacacaaatcatcgtcgaagattcgctgcccgtcgtcgacgacttcatcgctgccatctccgacttctttgccctcgacctccgtcactgggcgccatccactggtatccagattgccgtgtgtagtcttcgctccgttccaagagatgtcatcaggacgcggggtaagcatgactccctgaagcatgctcccaaggtgaacaagttcgtggatttcttctattga

SEQ ID NO: 24870 - DNA, 417 bp, Oryza sativa
  Clone ID: PAT_MRT4530_29813C.1
gtaaatgatgccatgatgatacattgtggttgtggcaaaccttattaaaatggtagtagcagtagtagtacaaagtagtaggaagagtaatctgaaaaagaactaggaaggctccatcatgtgagacaagtccagaacaaccggatgcaagcatgattctgatcttatagaataatgcaagcacacatgcacaacagcacaaatagttgtaaaagaacagccttgaacccacccgggcacaaaataagtgaagcactgaatctttcccttttctttaccagaacacggcatccatgcaaagcttaacaaagacatgaacggatcctttcagcttaaatccggaaccgcatgtacaccacacaaatggaaaaatgcaatgcatgaaccgctgtcccaaaggaaacctatcatggtgct

SEQ ID NO: 24871 - DNA, 113 bp, Oryza sativa
  Clone ID: PAT_MRT4530_29814C.1
atggctccgtcttttccggcgtgcgttgagagccccggcaccaccgatgtttcggttgaccttggcggtcagaccggtcgtgtgccgccggtcagaccacaggtgttgcggcg

SEQ ID NO: 24872 - DNA, 607 bp, Oryza sativa
  Clone ID: PAT_MRT4530_29815C.1
cacgaggggaatcccccgcaaaagatctggcgaacatcgcacccagatctatgagcggtgtcattggtttgcctgggatgttcatccagccgggggggagccccgcgctgccggctctcctgttgtctgtccctttcgcgctctctgctgccgaaggtctctgggtagaactatctgatcatatagcactcctactccaaagaacacacagaaagcaatcacaaagacgaccttgttgacgtactcttttgttgagttcggggaagacaggtcttcttctgctgcattgcaacggtgcaaaagcatcgggctgcatagctctgggtttccagcaaaactagaacttggaaatgtgctgaactggcctccaattggtacgggcccttctaggtcattgtgggaaacgttgaattcagaaaggaagtgaaggttcaccagtgccggagggatcgcacctgtcagatggttgtatgacaggtctagaaccatcagattcttgaggttgctgatcgattgtgggatctccctgtttaggttgttgaagctcaagttgagtgaaacgagtgctttcaactcaccaatctccatcgggatcgcaccagtgaat

SEQ ID NO: 24873 - DNA, 494 bp, Oryza sativa
  Clone ID: PAT_MRT4530_29816C.1
aatacacaaagccttaacagttagctgttgcaatgtaaaaaatgttggtacatctatctacaaaaaagcaggcctgttttttacataccatggggcgacctgatatgctatagccacaacccctcccctttagtttttaataacacagtgagcacttgaaattattgccgaaccactaacctatttgggctggagccctcctacaagatagggtagttcgtcccttataccatatttcaaaccaaacctcaactctatccgaggcctgtgccttgaaacaaacgggaacctaaaggcctcccaccttaaagttgttgtttttgagaggggaacaacacttggggggggggaactacctttggacccattcttagggggggctcttggcggggcggaccctcgcacacttggtgaggaccttgtcactatttgccacaactgggagaaacaaaaagcggttgggtgttaaggacatgttgtaccaggccttgtcc

SEQ ID NO: 24874 - DNA, 454 bp, Oryza sativa
  Clone ID: PAT_MRT4530_29817C.1
cccacaccccctctcggagcccatctaccagcgactcatcgtcctgctcatgttcaaggccccgatgtaggccgtgacgcttatcctgccagggatctcaccagataatacaacttattcgaagactattgaagagagggatgacgccagggtcatctacatttgcttggcactgtgcgtggcgtgcggggctggtcctggagctgtggagggacgaacgcatgggccaaccctgatgccgtcgacgttgctgatgacatgctgtcctccagataggcctctaaatgggcgatgcattcagagatgcaaacaaggctggatgcagaatgcgattctgaaggctattaccgtggttcttaccgcgatacgttaagccacaggtagaaacgctaatggcaacctaagcgacatgcacacctatctattcattactgtcatatacacagtggcacac

SEQ ID NO: 24875 - DNA, 290 bp, Oryza sativa
  Clone ID: PAT_MRT4530_29818C.1
ttaaaaaaagctatgcaaatcgaaacccctctcttagatctcgtccacggggaattaggatgagagagagctatggtcgatgatgagggagtcacgatcgcctgctacagcaaggaccagttcaactactagatgaccaacgccaaggaggtcggccaaggggtcataattgtctacagtgctttgtggggtggcctttgccggttgatcatcccagtgttctctgaatacgccaaacaggtaactggtgctgactttctgcaggatgatgttgatgagctgaaggaaga

SEQ ID NO: 24876 - DNA, 103 bp, Oryza sativa
  Clone ID: PAT_MRT4530_29819C.1
gtcttcctccggcgaagccaaaaccatcgaggtctactcttacaaggctaggacgagagttccctctgaaccaaatatttagttcgtctttaatagtacgatt

SEQ ID NO: 24877 - DNA, 286 bp, Oryza sativa
  Clone ID: PAT_MRT4530_2981C.1
atacaaactagagagagaaagaaaccaccaccgccccaagaagagagagagaggacgcgacggttgccaggaggaggcagccaacggcgctcgaggcaagaaacgacgcggccatggtgggcttgccttgggagtcgtgacgcgctgtgtttgctgccgttgagagatgaaggtagtatccaagaagcatcatcagcaaggaggagggacgacgacgatggaggagggcgccatggacggcgctggcggaggagtggcggaggaagggtgctccggggaggagagg

SEQ ID NO: 24878 - DNA, 621 bp, Oryza sativa
  Clone ID: PAT_MRT4530_29820C.1
atggcgcaacttgactatggcagcgtcaccacgataggtggccaaccacttatatcagatgcaaccctgcaagtgcggtccagccacgactcgacgccgccgccgccgtgcacagccacgatctcaacgccaccgccggcgcagccacgacctcctcgatgcggcgcagaagggcgggccggcggcggagagaacaacggcgcgcgtcttgaacccacgccaaagcgccaccatcgtcgtcgaggtcgccagccgctgtcgccgtcggcggcgcggcgtggattcgggaggagggggcaacctctgtcgcgcggcctccgccgcctccgcctacacctccccggcgctgcgagtgcggctcgggagggcggcgaggaggcaggcttcgccctgcacgccatcgccgtcgttgaagctggaggtggcggcggcggcgggtcccggatgcgcaggagcaggatggccctcgccttcggcggcaacagcggtggtgggctggacggcgccggcggcgtctcgcttcgttgtggtggtggcagcggcgccccccggcctgcgtcagccttgagaaggggaaaaaaggagagaggggctgacgtgtgggtcccatggctaaaatag

SEQ ID NO: 24879 - DNA, 1367 bp, Oryza sativa
  Clone ID: PAT_MRT4530_29821C.1
ctaagagctagtgaacttggtgacggccttagcaccctcggagacggcatgcttggcgagctcgccgaggaggacgaggcggacagaggtctggatctccctggaggtgatggtgggcttcttgttgtaccgggcgagcttggcggcctcaccgacaagcttctcaaacatgccgtcgatctcctcgtggtgggtgaccacgtcacgtcgctcgccagtctggcacgtccgcatcttatcaacctttggacctgccgcggatttctcagccatggcgggtgcatcgcctttgccggctgtagattccttgaccgcggccgtcgtgtcggtcttgccgggcgctgtagattcttttgccgcggtttctgtgtcggtcttgccggataccgtggattcctttgctgcggtctccgtgccggtcttgttagcagtggatttctttgttgcggcctccatgctggtcttgtgggatgcgggggattcctttgccgcaaccttcttgccggtcttgccagctgtggatttctttgtcaccgtagccgtgtcggccttggcaacgacagattccttacccgtcttatcggctggagatttcttagccaccgtggctgcgtcagccttggtaacggcgtattccttacccgtggcaggtgtgccagccttaccggctagggatttcttagccaccgtggccgcgtcggcctcagtgttggtcttgccggacatcgtgaattcctttgccgcagccttcttgccggtcttgccggcggtggattccttagccaccgtggccgcgtcgaccttggcaatggattccttacccgtggcaggcatgtcagccttggcagctggtgatttcttagtcaccgtgatcgcgtcggccttggcagcggcgtattccttacctgtggcagtggcagacgtgtctgccttaccagctggagatttcttagccaccgtggccgcgttggccttgccagcggcagattccttactcgtggtaggcgtgtcagccttggcggctggggatttcttagtcaccgtgaccgcgtcggcctttgcagcggcgtattccttatatgtggcagacgtgtctgccttaccagctggagatttcttagccaccgtgaccacgtcggtcttgccagcgacggattctttacccgtggtaggcgtgtcagccttactggctggagatttcttagccaccgccgacgcgtcggccgggtaatccttcactgccagggcgagcggcggccgtgctaccacggcgagggcgaccagcagcagcgacgcaacggcgaggccacgagccatcgttgttgtccgttggtcctgcgcctaaaagatccgtggcgagagagaca

SEQ ID NO: 24880 - DNA, 531 bp, Oryza sativa
  Clone ID: PAT_MRT4530_29822C.1
atggcgtgcagggcgaagcctgcctcctcgccgccctcccgagccgcactcgcagcgccggggaggtgtaggcggaggcggcggaggccgcgcgacagaggttgccccctcctcccgaatccacgccgcgccgccctgaacccacgtcacgccggaggcaacggaggtcgggcatatccggatccaaacgacggcaacggcaacctcggggacgacagcggtggatggcgacgactggcgacggtgcagacgacggcgacagcggctggcgacctcgacgacgatggtggcgctttggcgtgggttcaagacgcgcgccgttgttctctccgccgccggcccgcccttctgcgccgcatcgaggaggtcgtggctgcgccggcggtggcgttgagatcgtggctgtgcacggcggcggcggcgtcgagtcgtggctggaccgctggagagacgaaggagatggggggtggtggagaatctgtgtggggcccacgattggcaagtgatttgtggctagccaaatttggctag

SEQ ID NO: 24881 - DNA, 304 bp, Oryza sativa
  unsure (1)..(304): unsure at all n locations
  Clone ID: PAT_MRT4530_29823C.1
cgtgaccttcgctgacaccgtcgctttctctctcatcgatcagccatgcctactctcgacgctcgcctncgcctacctctcgccggactatcgccggcgacgacctccttcccgggatccacccccaagccgggcaggctctcgctcgccctcaggccgccctgcggctacctgtgatgctacgccagtgccccggcggcaggctggccgtcacatggcacaagaacgacaacaagcgctgatcgcggagcgcgccggaccggtgcgatttccgggcccggttagcaacgggtgcgacaagaat

SEQ ID NO: 24882 - DNA, 195 bp, Oryza sativa
  Clone ID: PAT_MRT4530_29824C.1
cccaggccggccgggaacaccagcgcgacgagcatccatcgcttctcctccgtatcctcctccagatagcggcggttgggtcgccttctccgactagctacaacgcagaaaaggcaagcctcgccagcagagggaggtggagcccacgaaggaaatggtgggctacatcatgcacaacaccagcaccaactacag

SEQ ID NO: 24883 - DNA, 244 bp, Oryza sativa
  unsure (1)..(244): unsure at all n locations
  Clone ID: PAT_MRT4530_29825C.1
ccacgcgtggggtggaggggggnccccacgctgtctgcagctacaccccattctccccaatgaccaataaatataaacagatcatgccatattgcaagccaaccataaaatattcgagagccgtgcattctcgacctccaccagaacgtgcaaacctgcggttacaaggacgtgcaggtgatgtggaacatgctcagctcggagaaggaggcggcgccgcctcctcctcggaaagcttcgttgt

SEQ ID NO: 24884 - DNA, 390 bp, Oryza sativa
  Clone ID: PAT_MRT4530_29826C.1
atggatgggtttgggtttaaggagaggaagaaagcttgggccgctgctgatgcggagcggcggcttcgtttgtatcgaagggggccccctctgccgagctggccttgcagagcccgcgtcgtgacgctctccgctctcgcctcgcgccccgcggcctcggagaatccgtcgttgagtgggacgcgaatatgcggctgggtacggtaccgtgcaccggtgcgcgtgattctggtcggcgatggaattatacgagattacgtggtgttctgcacgccacgcgccgagcagtggacggggagtcggggacagcttgggcagttgggcgccgcgctagctgatagtggattcgtgggagcggccgcaggcgcgggcgcgcggctgaaccgctga

SEQ ID NO: 24885 - DNA, 1534 bp, Oryza sativa
  Clone ID: PAT_MRT4530_29827C.1
ctacaatgttccagtgctgctgctgctgctgtcactgatatccctgtggaagtgggtgctcctctgcagaatattctgaatctgcaaatgcacctctccagcaccacccagtgagtccatggagaaggacctcctcaatggaagaacatttctgtccctcctcactgcaatgcactcatctcccttactgatgctgacatgccatgcattctggttcttcgtcttcttactactgacctgttgatttgtactagtagcatctactgcaggatcagaagctgccgtattggcctcctgctgtggtgcttgtgcaccttcttcttccgcgccagtgatcacctgaatgactaccacctcaggtctcacgaactgatccaatggaagctggctgtcgttggtggctatggctgccctgcagagtggacagttggcgttgccctggagccaagtgtcgatgcagtcaacatggaagacatggaggcagctgggcaggagcctgaccctctcctcttcttggaactcactgatacacactgcacactcgctggaatcagcagtagtgtccttgatggccttcctgtacctgaacgccggcaatgattggatggccgcctcctccagcccacgcggctcggccactgccgggaggctgctggaggcggcaccgcgtcgacggcgggagatgaggccagccgtccgcgtgtcggaggagctgctgctgttccagttgaggcagcagcggatgacaaagatgtagtaggtgagcaggaggacggaggtggtgaggatgcccaggacggtgagcaccagtattgggaagctcgtgatggatggatggtgaggcacaaaagaagaagatgctgaagaagtggagtcgagtgccaatggccgtggcggcggtggcgggaacagcagtgatggcatctgttgcaccgggaagatggggtccctgtctgcatccatggtttgctgcaaacacgagcttaagcacacaagcaggtgagctactgagctagatagaccaggtttgatgatgctgctgatgcaacatatatactggttttcaggtatgaatggtgagaccaaatggtgatgctcaatgtagtggccaacgaggtaggagggaagaatgaaaaggcagcacccgatcaggttggaaaatgcagtggagttgtgaaagaaattgaggaaggaaagaaacccaacctgcttgctgtcggtggagtagagcgccagcaagagcaggacagcagcagtaggagcaatagttgcttgcacaacagcacaacacaaggaaaatgaactagatggagatgctgtgtatgatgatcacggcactggtggtgatggcggcttgatgttttggatgcgattgaagtgtggccgagtgacaggaacgcggctttggagctccaagaatgggaagcaggagagcttgagggcactacgtctctccagtactagagaactgaagcttctcttgtcttgctcgtggaaccttcttgctgtcggtggagtagagcgccatggttga

SEQ ID NO: 24886 - DNA, 718 bp, Oryza sativa
  Clone ID: PAT_MRT4530_29828C.1
aagagtgccagccaacgggatattcagaaagcgtttgacgagctttctctaaaatatcatccagacaagaataaaagcaagggggcgcaggaaaaatttgcggaaataaacaatgcatatgacattctgtctgatgaagagatgcggcacgaggatgatctctatggagatgaaaagggtaacccaggatttgatggtggaaattttggaaatcgtgagggctacacatacttcactggtggtggcgccaagactagccatttctcatctggtgatggatggcaaacgatgggcggccagggaaatacaaaaacattttccttttcatttggtggtggtaaccctggtgccggtggaggaaacccatttaactttgattttggtgatgttttttccaacatattttctggtggatcaatgggaggtagtcagcatactggatctgctggcaaagccagacgtggtacaaaatcttctggtcatgattctagttctgtcaacattcaggaggtcacgatgcaaattttcaataaagaaacagctgatcaaggaatcacttggcttttgttattctatacaccaaacacaaaaggtcaatttgtgctagaaagtgtcgtggaggatgtagctcgttcactggatggtgcactgagggctggtaaggtaaactgcgaccatgaaaaggcactttgcaagaaggctggtgtctcaataggaa

SEQ ID NO: 24887 - DNA, 1074 bp, Oryza sativa
  Clone ID: PAT_MRT4530_29829C.1
taacagataaacacacgctcaaaaagcaatcaacaaaatagagtacggtatatcagtacttgcacaacgatttctttgaaagggacatgatattcatggttcaccaatgtgatcgagtctagcacagcagaggacacgaaattgataggtcccggtatcctcagaactggaacatggcatacaagcaggttgtaaaacagagggcttccgaattttcgccctcaagcctcactggagatatggtacattcaggaggaatctgcagcggccggtggtggtgccggctgtgcttcggcgcgcttgactgatgcgcatttgatcagatggttgtagctccctttctccttgaaaagttgggagaaatggtgcttgcagtataggataccttccaaagctgcataattggatggcgaaatggcacagccaccgtgagaacatttgaagcaggacttgtggtaggcctgtccttcaactgtcaccttctctagaggatacgctgttttactgcaagtggcacacttctcctgtgtccctgaaaacatgcgtgcggctttgctaggtgatcttgtcagctcaggagtcaacttctccgatgcgggtttcgcgggtgattggaagctcttgttgtagctcccggtctccttgaacagttgctcgaaatggggcttgcagtatggcactccttcaatcgaggagtagttgccaagggagagggtggacttgcagtgttggcacttgaagcaggagcggtggaagacgacgccgtcggtggagagctggtccatcgggtacaccgtcttggtgcacaccttgcacttctgctgcgtcccgctaaacatcgtagcctcctcctctcctcaccctctctcttcctgctgcggcggcggaggcggcgcggcgagctggaagatctgagcccgatctgatctcctcccgcgctgaaacgagcacccctcgcggcgtccctcccaatggccggccgcggttatataacgcgggtgagcaatgggattttgaggattttttgggcgtctcaagtctccggacgcgtgggtcgacccgggaatccggccc

SEQ ID NO: 24888 - DNA, 2064 bp, Oryza sativa
  Clone ID: PAT_MRT4530_2982C.1
atgccgccgctgttgggcgtctacgacttcaccgccggcccgcctccgttgccgccgagtggtgccaccgcctacacggctggcctattatgccgccgctgttgggcgtccacgacttcaccgccggcctgcctccgttgccgccgagtggtgcctccgcctacacggctggtctattatgccgccgctgttgggcgtccacgacttcaccgccggcctgcctccgttgccgccgagtggtgcctccgcctacacggctggcctattatgccgccgctgttgggcgtccacgacttcaccgccggcctgcctccgttgccgccgagtggtgcctccgcctacacggctggcctattatgccgccgctgttgggcgtccacgacttcaccgccggcctgcctccgtcgccgccgattggtgtcctcgcctatacggttggttggtcacaccaccgttcatgggcgtccacgtcttcgccgaccggctagccttcgccgccgccgactggtgtttccgcctgcacggctggcctttatgccgccgttgttgggcgtctacgtcttcaccgaccggcttgccttcgccgctgccgactggtgtttccgcctgcacggctggccttcatgccgctgttgttgggcgtctacgtcttcaccgaccggccgcctcgtctgccgccgactggtgcttccgcctgcacggctggcctttatgctgccgttgttgggcgtctacgtcttcaccgaccggcttgccttcgccgctgccgactggtgtttccgcctgcacggctggcctttatgccgccgttgttgggcgtctacgtcttcaccgaccggcttgccttcgccgctgccgactggtgtttccgcctgcacggctggcctttatgccgccgttgttgggcgtctacatcttcaccgaccggccgcctcgtctgccgccgactggtgcttccgcctgcacggccgacttattatgccgccgttgttgggcgtctacgtcttcaccgaccggccgcctcgaccgctgccgactggtgtttccgcctgcacggctggcctttatgctgccgttgttgggcgtctacgtcttcaccgaccggccgccgcatccgccgctgactggtgtcactgcctgcacagctggcctgttataacgccaagcatcagtatcttcaacacaagctgcctacgtttgccatggctgccgactggtttcttcacttccatggctgcatgattctgccagcgttgattggccttatcttcttcaccgccgcacctctacgtctggtttatacagctaccactactgatggacatcatcgtcttttgttgccgactggttatgccgccgccgactagtgcttttatcttcacaactgcgcgtcttcgctaccagtttgcttctgttgccgccgactcgtgttcacttcatcacggcgatgcaactttgtcatcatggtggagcgacttcatctttattatcttcggcactggcaaactctattgctgctacttcgcaagttttactacttcaccaaccacgacgtctttgtgaacctcgacatctcggcatgcaatgccatgatattttactacaacaagtgactctccaatattcaggatttctacttggacaccttcaacacatatcttcaatcaagcaatgactactcgacgacaagaagctataattctcgactctatgttcagttgtttcccaactaaccaaagaacattctacttcaacaacttcaaatatttcggtttagacgagttgggcaacaacatcaactctcctccaattatttgtcttcacggttggcctactacgcaactgccgatagaggatctcatcgttatcatcggctgctacattgctattgactggatcaccgacatcgtcatcttcatcaacatcttgtcaagcctcatcaacatagcctactctgctgccgttgatgggaaacttcgtcatcatagtcggctatctctgttgccgctaatcatcattaccgttggatgcgtttgtcgccgccgattattttcttcatcttca

SEQ ID NO: 24889 - DNA, 333 bp, Oryza sativa
  unsure (1)..(333): unsure at all n locations
  Clone ID: PAT_MRT4530_29830C.1
gcaatcgtcctggggttcctctctcacaagagcgaggatggactgcatcgacgagatgccagaactccgatcttggaatcctgacgatgaggaggaggaggaggagaaggaggagatgcccgccgtcgtcgattactccccgcaccaacgccgccggccgttcaccttcaancgctgcggcgtcatattcgatacggacctcatcgtccgcaaacccgttgaaagcgccgcaaccggttggccggggcaagcaaccggacgagcacgggggttccccttctccgtgtcgcttaaactcgccgttccgccgggggttctccttcaatctaactn

SEQ ID NO: 24890 - DNA, 144 bp, Oryza sativa
  Clone ID: PAT_MRT4530_29831C.1
atggggccttgccagaataagaaacaattgagtgtatttgaccagaagcgagcaccacaagccgacggtggaagaatgtggaaccgcgtcggcatctcggcgagtggtgacatgcagcagaagccggcggtggcgaaaggctga

SEQ ID NO: 24891 - DNA, 314 bp, Oryza sativa
  Clone ID: PAT_MRT4530_29832C.1
atctcctattcatagtgattcagtagaaattggaggacctcaaaaccaaagtggggggcgccagaatatgtatgatgatatcatcatgattcttttttctccatattctattatggagtacttattatttgattctcgtttagcatgttgatctagttcaactggtatttttttactgtgaaatcagagtgtctataatgggcctttcattcttgcttcgcattgcctggtagaattttgattgtaacatcaataaattataaacagaatgcgtaagtctacaatgttctttgtaccttgtgttgaatttggtt

SEQ ID NO: 24892 - DNA, 301 bp, Oryza sativa
  unsure (1)..(301): unsure at all n locations
  Clone ID: PAT_MRT4530_29833C.1
caattncnncctctctccgacgaaanatagcgnnncacattnnngggtacccacgaannngccccaagagngggctgaagtttgccctggagtntgtctgggatgggnagagcagcnntgnggatttggagaagnttgcnaccgacctnagggccagcatctggangcanatagntnacgctnggntcangtacatnccnagcaacaccttgtcgtactatgatcangttcttnnnacggctgccatgnttagngctgtnccagagcgttantcatgnnctngtggagagattggggtcag

SEQ ID NO: 24893 - DNA, 316 bp, Oryza sativa
  Clone ID: PAT_MRT4530_29834C.1
aaaggccaaaggtttaacttaaatggacgggccaaaaaacaaggggcctttacaaatggggggctaaatcccgcgtggggaaaaaatcagccaaaggaaaaaattatccccgaatggaaatcccaacccacacatggttggggctggccgtttcggcctaaaaaaaaggcgtccgttgggcgccgccatggaccagttttggacccggagcgtaaggggcatgccgtcctgcaggggaacggccggaaacaccttgggtttgcatccgggggggggggggttccttttctgggggggcaccttgccgcccagccga

SEQ ID NO: 24894 - DNA, 659 bp, Oryza sativa
  unsure (1)..(659): unsure at all n locations
  Clone ID: PAT_MRT4530_29835C.1
gcttgaactgtttccatacatccattttaagtctgagtaacaatagtagtagccccagatgcgcctcatatttacatacgattcaagcattctgctactactagttctgcttatctacagtattcagaccattgtgtgaaaaaaaatctacaacattaagataaacccctacaacattcagataagcccagagtgcatacaaattgtctggtggtgcctgaaattgaaatttggcatacatatttcgcttctgcagttatgttgttgtacagtattcttcagacaaatcctaactcaactagcaaacaaaacatgactgcatatttccacaaattccacaacaggcacaaaacagtaggcatttctgaaaactggaaaatctaagtgttaaactgacatcacaaaatcagaaaagtgcacacggttgttcatgccaaatcacccttgcttacatctgcaaacaaaatgtctaagaagacatatcgcttngttcattccacaaaaatgacccttgctcagatctgaaaagcatggtgtctaagaaagacatatgacttggttcattccacaaatcacccttgtctcagatctgaaagcacagtgtcttgtgaatcgttgtggtctctttgttgcttgcctccggttcagaactcctggga

SEQ ID NO: 24895 - DNA, 354 bp, Oryza sativa
  Clone ID: PAT_MRT4530_29836C.1
atggaagttgatcacatctactcgggaggggagagtgagaaggtcgatgccaagaatgggagtagcgccgaatcccggagcatcgagttctggcgctcatggagctgcgcgcgcggtggagacactggaagaaggttcctggcatgctcccaagttgagcagccctgtgatttcaagtattggatcgatgaacaatttgaaggtagagcgaaaagggtgattcaggacctagtttccatgaggcacagcatgtcggagctttttgacgagcgcgtcacgccgcatgtatcgcagtacagcacgctcgtttatccggtctgtgaccagtcacagaccggtcagatcatgggttag

SEQ ID NO: 24896 - DNA, 525 bp, Oryza sativa
  Clone ID: PAT_MRT4530_29837C.1
atggagcatgggtccagggaggggagagtgagaaggtcgatgccaagaatgggagtagcgccgaatcccggagcatcgagttctggcgctcatggagctgcgcgcgcggtggagcttgaaacattgcttgaagaacattcagaggggatgctggtgaggacagggcttacatgtcggcatggattcttcccaattttgtgttgttgttggtctggtccagacactggaagaaggttcctggcatgctcccaagttgagcagccctgtgatttcaagtattggatcgatgaacaatttgaaggtagagcaaaaagggtgattcaggacctagtttccatgaggcacagcatgtcggagctgtacgaacattcatctagacaatgggatgatatgtatgctgatcgacagagagtaaaacaacaaattcatgaactaaaatgtactattaaagaacaaagagagtgcattgtaatcttaatttgttttagcattgtaattgcttgtggtatatggctcattgtgtaa

SEQ ID NO: 24897 - DNA, 316 bp, Oryza sativa
  Clone ID: PAT_MRT4530_29838C.1
aggagagtttcaatattgtgcgccacccaacacggtcgtggaaacggaagagtgttgagagaatcatgaaagcttgtattattctccataatatgatagttgaaaatgagagaggggggttaaaattcctattgatctgaatgtggaccctggagcatcggttgctcttcctcctgaagtaactactgggcacaatccatgctttgatcaggtgctgtgtaggaaaactgcaatacatgctcgtgcaccacattcccaactaaaaaaagatctagttgaacatatttggcaaaagtttagcaatacccgtcgtact

SEQ ID NO: 24898 - DNA, 482 bp, Oryza sativa
  Clone ID: PAT_MRT4530_29839C.1
atcgtagacttgcggactcctgcttactgcataccatcctacacctcctattcagagcgagggtgttaaagagcgtggacactgtccatcatctactcatatccttacactccgcctgatatgccttgtgcatctactcctctctagcttctgattcgttcctttcctcgtttacctacttcctcattctcttatctcctctcttctcttcattgtctctcattctttctacctccttctctttgttcttatcttcttccttcctctcttctttctctcttctttctttcttcctctctatcccttctcccctccttttctctcctacctcttcctctcctttccttctttttctcttcttcttctctctcctctctctcttcttccctttcttctttctctttccttcttcctcttcctctacttcttctctctttcttcctctcctttcttcccttttctttttctctctctcttctctt

SEQ ID NO: 24899 - DNA, 237 bp, Oryza sativa
  Clone ID: PAT_MRT4530_2983C.1
atggagcccggggttggctccaagggtgagctcgacaaccatgaattgaacctagaagaccttgaggatgccaagatgcaacaatctcgacggcccaaaatatcccgtccgtttgctccatcagcacggccacagcccaaggccattactgggctgggcttgaccttcacaatccgagatgcagtactaagactgaattgcccctggacggagcgcggagacattgaaaacgtgtga

SEQ ID NO: 24900 - DNA, 577 bp, Oryza sativa
  Clone ID: PAT_MRT4530_29840C.1
ccggggccgggattcatcggaggaaaaaaatagattccatttcagaggcagcaaccaaggcccgaggatctccttcccgtcccagtcagatcgatcgcgggaggaagaggggcagcagcggaggagatgggggagatgaactgggtgagcaggaagatccatctctacaacgtcaccatgggcctctacatgctcgattggtgggagcgctgcctcttcaacataatggtgctgattctgctctggttcatctgcttcaatggctctcgctttgccagtgacgtcttcgagagtcatctgaaggctcggattatgcccggtggaaactatggcatgggtgtaggcatgccatcaacctaagtctgcattgacaagtaaaaataaggaggaaggttatgaaattatggaagtggctttgataacttagaactgtatttttgtgtatgaaatagttccaaaatgaaatctgctcatgattaatttgttcttcctgcattgtgtgtaattcttcgttaaattttgtttatgagcataatgatcaccttttccccatcaaaaaaaaaaaaaaaaagcggcc

SEQ ID NO: 24901 - DNA, 148 bp, Oryza sativa
  Clone ID: PAT_MRT4530_29841C.1
aacatcactggagatagctagagactcggtgagatgtgtcagatagtagatgcaaacacgtggttctgtctcgtcaatggctgagtacacttgggacatctatgcgacaagatttttggcgagactgggaacaagaggggtggtggaa

SEQ ID NO: 24902 - DNA, 696 bp, Oryza sativa
  unsure (1)..(696): unsure at all n locations
  Clone ID: PAT_MRT4530_29842C.1
gacagaaacaataattcttttttatatatttttatcacatagaacaacctacggtgtcctctctacaaaactccagaaattaaccctgagacttgttcaaaacaatggtctgtaacttgtggactcaagccagtcttcagtgactcacattagatgcttggatgagcattggatcatccaaattcaacatagcagcagaaatgtaatggatgctaggatgaccattggatcatcgaatcgatcatgcgacaagtaaatcgtggcaaactggcaaccaatagacaaagaacacagctatagtatagagtatacccagttgccaaggatcaagcataagctatcctgaccctttgtttttccacatgaaactaacctgttgcttcttctatgtggacaacttctccgtttgaaattcctaagacctctcattcctggtagaaccttaaaaagaaccaagcacactttcacgaaatccataccaagcacattttcacgaaatccatgtctctcctagtctttctaggagatttctgaaaaagaagatataatagttgagctttgcccttggagatgtacttaggagaagcaagcatctggacatggngagatgtatttataggtttccaagattttggagaagcaggtatctagacatgtgctcatgtcatctctccagccattcccattacagaaata

SEQ ID NO: 24903 - DNA, 248 bp, Oryza sativa
  unsure (1)..(248): unsure at all n locations
  Clone ID: PAT_MRT4530_29843C.1
cccccatcgcgatccctctcctcctcctctttccccaatctcgcgcgacgcggcggaaccctagcccccaccgcgattcgctcgccggagagggagagggagggaagggaggctaggggaccccctcgccgccgactacgaggccgagtgcctnaagctcatctcccagttcaactccctntcctcctcgctcgccggcgtngtnaccatcccccggttcgtcgaggcctaccgnctngactgccccg

SEQ ID NO: 24904 - DNA, 549 bp, Oryza sativa
  unsure (1)..(549): unsure at all n locations
  Clone ID: PAT_MRT4530_29844C.1
tccnnggggggttggnaaggggaaattccggggaccggaaaagggggaaaaaaccnccgttctnccccttggggaancttctttcctcccttgggcccgggggttggcgggggttggnccgggaanaanngggttcaaccggggccttggcggccgccccttggcaaattccgcttccgttggcttcccaagggaacgttgggttcgccccacggggaacggggggggaaactccccaaaccgccattggcttcttccccggggttggccgaaaggggccaattgaaaaaccgggggttggggttgaattgggaaaagaaacattccccgccaaaaggggcggcggggaaaacaattccgttccattaannaacccccgccccttaagcccctcccnaangggggggggggnccccggggttncccccaaatttcccnccccctnattannttgaaagttccnttattttancaaatttcccantttgggcccggtcccgttttttttncnaaancnttccnttgnaacttgggggaaaaaaanccctt

SEQ ID NO: 24905 - DNA, 327 bp, Oryza sativa
  Clone ID: PAT_MRT4530_29845C.1
aaccataatctctagcctgcttcttgattgccaataagggtttcatcggggtttcaaccgatttcatgatatcggacctccagccaatgtgtgctttaaccttcggattaatgcttgtttatcatatcattatttgctgattggtttatactggattatattgttatgtcgttacatcatcttcagccgattgcctttatatcattatttacattggacatatagccgatagctctaaaccctatcgctatcggctggcatcggctattggctggtatcagcatcggctggaatctctacattggattatgagccgatcggctattt

SEQ ID NO: 24906 - DNA, 280 bp, Oryza sativa
  Clone ID: PAT_MRT4530_29846C.1
ctaaaagaaaaggagagaagaaattgagaattttttttcttggatagtgtttaatgtgttgttgtgaatgatgatggcataggggttgttttgggatgaggggtggtaatagctggatctctctttcttggcctctgagctgcacttcacggcggttcgctccaaccccctatgtcatcctgcctcctccccactcctcttcttctcctgtgacggcagatatgtccgatttctgttcttcctgtcggtttgctctcccgatgctttgctcaccattgcc

SEQ ID NO: 24907 - DNA, 1638 bp, Oryza sativa
  Clone ID: PAT_MRT4530_29847C.1
gatcaaattgtctctttgaacaccctgaagttacaagaaatgggttatatctctactaatgcactcagatgaagcaaaaaaaaagaacaaaaaaaatgtaagttctagttcttcctgaaaagaaatacagaaaacgtcaaacagtgttagatggcacacgcagtggtaaaattgatttaatctatccatctcatttcgccagttttggccactcaaaaagagtctcactgagacatcaaagcactcccccaggcccaacgctatgatattgtctttttttacatgtaaacgagtttttgatcaactaatgtgcaatatcgtcaattctgatggccttagcaaaaccttccagcaaagcaacgtcttcaggtcttaagcaatggatcctttacaagccacggaacttgggaacttggggaacatgagggccagtccatgtttcaggtaaatcatctgtacttgcctagctccatttttttcttgagtgccttctgcccgtgatatatgaacgagtcaatgatgccggagacggtgaaaacccctcccactatagcacataggttcgtcagatagtggagcagggaactattttcttctgtaaatattacctttatgggtgagaaatcatagaagaaaaatactccaggctggggtttggggcgaatattcccatctctaaaatgctctgttactgagaagttgaaaccatgctcaagtgccgacagctcaggcacatttatatttgactcataaaatcctttgcctggagcaaagtgtaagttccctgcaactttgctgacatctaaaaagccatgtacattacaaccttcaccttgttgagttttaactctttccacaaaatcttctctggtgcactggtcaatcagatcaggatttgtaagggcccatcctttcttcttatatgcttccctaacttcttcacaagaattacagcattgttcatccgactcctcagcaccataacacgtgccacagtattcttcacctttgctgagtcttcctccatgtttttgcaatggactctctatctttgctccaccaatgccttcttttctagcctcaatgacattaccatgtgcgtctaatcgcctcttttctatatcatgcctaatgtcatgatgctgctctccactaatatccatggtatcaacactgagaagggtgcagggaacactcggaaaagttacgtcaaaattaactcgtagcctttcccctcttgatgtgtcaaccactagcttagtctctgttgctgaataaaaatatgaccgggtctcggagacgaacagcagcagcatgacgacggaggcgacgaccgtgacgacgccgccggagagcgtccgcttgtagaagtcctcgttcaccttggggtacgcgtccagccccttcagcttctgcaggaacccctccatctcccctccacctccacctccccacctccgccacagccgccaagtccaccgcctcagctgcacgccgaaagcgagcgagcgagccaaacccctagcctcctcccgagcccgatcagcgctcccctcgccggcgaggagtggtttgaccggcgccgccgcgtcgccgccggggaagagagaagagaagatgcctccccccgtgccgaat

SEQ ID NO: 24908 - DNA, 478 bp, Oryza sativa
  Clone ID: PAT_MRT4530_29848C.1
gttgattctgctatattagggcatgaaggaacgtaggtgactgttaacacacctactggtggtggtcttcagcctgaactggtgcatagtagctggtttccaaactcgaaccggatctcaaggctacaaggcgcatggatatgccatcaagcaagtcgacaattgcactgtaaaatgccagaaacaaaatgggaagtttttgtgttcttatcaaggtccttccattcaaggttaaggctggaaatcccttgatggtccatttgtgtctgtttggatcagcaacgtgccatgggctgctgagagtatcatgatggctcctgaggccaaggtgctatttagaattaagagcaatagttgtatgttccatgttgctttaatttggcaattgctcagctcaagatgactccatcgcatacttacgtgaacaagctaaggtggtagactacagaatgtggcggctccgtgtgcattcttgtgt

SEQ ID NO: 24909 - DNA, 525 bp, Oryza sativa
  Clone ID: PAT_MRT4530_29849C.1
ctttcactttgctccaggcaaaggattttatgagtcaaatataaatgtgcctgagctgtcggcacttgagcatggtttcaacatcacacacaaaataaataaactgtcttttgggacagaattccctggtgttgttaatccacttgatggtgctcagtggacacaaccagcatcagatgggacataccaatacttcataaaagttgttcctacaatttacactgatctaagagggcgcaagattcattccaaccaattctcagtaacagagcattttagagatgggaatattcgccccaaaccccagcctggagtatttttcttctatgatttctcacccataaaggtaatatttacagaagaaaatagttccctgctccactatctgacgaacctatgtgctatagtgggaggggttttcaccgtctccggcatcattgactcgttcatatatcacgggcagaaggcactcaagaaaaaaatggagctaggcaagtacagatgatttacctgaaacatggactg

SEQ ID NO: 24910 - DNA, 3536 bp, Oryza sativa
  Clone ID: PAT_MRT4530_2984C.1
ataccaggatgttgtactaggatgtgttagagcatctccaacagcctctccaaatacctctgctagctactctagcaaaaattactcatccaaaagcctctccaactggatggccggctggccaaaacactccctccttatctcctacgcttcaggaatggatcagtcagaacatcaccaccggctcgccgccgtcaccgccgactggtgtcctcgcctatacggttgggtggtcacaccaccgttgttgggcgtcattgtcttcaccgaccggccgcctcgtccgccgccgactggtgtcctcgcctatacggttgggtggtcacaccaccgttgttgggcgttgttgtcttcaccgaccggccgcctcgtccgccgccgactggtgtcttcgcctgtacggttggttggttacaccgccgttgttgggcgaatacgtcttcaccgaccggccacctcgcgcgccgcacactggtgtttccgcctgcacggctggcctattatgccgccgttgttgggcgtctacgtcttcaccgaccggccgcctcgtccgccgccgactggtgtttctgcctgcacggctggcctgttatgccgccgttgttgggcgtccatgtcttcaccgaccggccgcctcgtccgccgccgacaggtgtttccgcctgcacggctggcctattatgccgccgttgttgggcgtctacgtcttcaccgaccggccgcctcgtccgccgccgactggtcttgccgcctgcacggctagcctattatgccgccgttgttgggcatctatgtcttcaccgaccagccgccacgtccgccgctgactggtgttttcgcttgcacggctagcctattatgccgccgttgttgggcatctacgtcttcaccaccggcttgccttcaccgccgccgactggtgtctccgcttgcacggctggcctattatgccgccgttgttgggcgtctacgtcttcaccgaccagccgcctcgtctgccgccgactgatgtctccgcctgcacggctggcctattatgccgccgttgttgggcgtctacatcttcaccgaccagccgcctcgtctgccgccgactgatgtctccgcctgcacggctggcctattatgtcgccgttgttgggcgtctacgtcttcacctaccggccgcctcgtctaccgccgactggtgtcctcgcctgcacggatggcctattatgccgctgtttttgggcgcctacgtcttcaccgccggcctgcctccgtcaccgccgactggtgtcctcgcctatacggttggttggtcacatcaccgttgttgggcgtctacgtcttcaccgatcggttgcctcgtcgccgccgactgatgttaccgcctgcacggctggcctattatgctgtcgttgttgggaaactacgtcttcaccgaccggctaccacgtcgccgccgactggtgtctccacctacacggatggcctattacgccaccgttggtgggcatcttcgctttcaccgtcaaccgcctacgtcgccaccgactggtgtcttcattgttattgctggatgactttgttcccacattggccacctctgccattaccaaggggaatattacaaagctaagatccagatccagatatgcataaaagggattcatggctttaagcttatctcctacgcttcaggaatggatcagccagaacattaccaccggctcgccgccgtcgccgccgactggtgtcctcgcctatacggttgggtggtcacaccaccgttgttgggcatcattgtcttcaccgaccggccgcctcgtccgccgccgactggtgtccttgcctatacggttgggtggtcacaccaccgttgttgggcgtcattgtcttcactgaccggccgcctcgtccgccgccagctagtgtcttcgcctatacggttggttggttacaccgccgatgttgggcatctacgtcttcaccgaccggccgccttgtccgccgccgactggtgtttccgtctggacggctggcctattatgccgccgatgttgggcgtctacgtcttcaccgaccggccgccttgtccgcccccgactggtgtttccgcctgcacggcaggcctattatgccgccgatactgggtgtctacgtctgcaccgaccggccgcctcgtccgtcgccgactggtgtttctgcctgcacggcaggcctattatgccgccgatgctgggtgtctacgtcttcaccgaccggccgcctcgtccgtcgccgactggtgtttccgcctgcacggcaggcctattatgccgccgatgttgggcgtctacgtcttcaccgaccggccgcctcgtccgtcgccgactgatgtttccgcctacacggcaggcctattatgccaccgattgtgggcgtctacgtcttcaccgaccggccacctcgtccgtcgccgactggtgtttccgcctgcacggcaggcctattatgccgccgatgctgggcgtctacgtcttcaccgaccggcttgccttcgccgccgtcgactggtgtctctgcctgcgcggctggcctattatgtcaccgttgttgggcgtctacgtcttcaccgaccggcttgccttcgccgccgccgactggtgtctctgcctgcacggctggcctattatgccgccgtttgttgggcgtctacgtcttcaccgtccggcttgccttcgctgccgccgactagtgtcttcgcctgcacggctggcctattgtgccaccgttgatgggcgtctacgctttcaccgagcggttgccttcgccgccgtcgactagtgtctccgcctgcacggctggtttattatgccgccattgtaggacgtctacgtcttgtccgaccggctacctcgtatgacgccaactggtactatcatcttcacggcaggccactatgccgccgatgctgggcgtctacgtcttcaccgaccggcttgccttcgccgccgtcgactggtgtctctgcctgcgcggctggcctattatgtcaccgttgttgggcgtctacgtcttcaccgaccggcttgccttcgccgccgccgactggtgtctctgcctgcacggctggcctattatgccgccgtttgttgggcgtctacgtcttcaccgtccggcttgccttcgctgccgccgactagtcctattatgccgccgctcaacctaccggagtatctatcttcacaactacacgtcttcgccaccggttcacttcatcacggctatgcaactttgccaccatggtggagcgacttcatcttcggcacctgtaaactttattgcctctactttgcaagctttgctacttcatcgatcacgacgtctacaagagcctcgacatctcggcatgcgtcaacaaatataatgctgtattattttactacaacaagtggtgttccaatattcaatatttctactcggacatcttctatgcgtatcttcactcaagcaatgactactcgacgacaagaagctacagttcctgactctatgttcagttgtttcccaac

SEQ ID NO: 24911 - DNA, 233 bp, Oryza sativa
  unsure (1)..(233): unsure at all n locations
  Clone ID: PAT_MRT4530_29850C.1
agaaccgttaggtgattaaggtttctaccgccgctgggtctacgtcattactagacactcctcagagtgttacatgttctgtacagcaaacagtaaatgaacgttcsasgaggtcacatgtctatagagacagtacgcgacgtgcatctgaactacgtatscatataatgacagtcansgtctactctactagtcgacctacgtctatgcactaagtactcagagtgtactag

SEQ ID NO: 24912 - DNA, 187 bp, Oryza sativa
  Clone ID: PAT_MRT4530_29851C.1
gtgggtttcttttccaccgccgttagaagaagagctcgggggggccttgtttttgagagaagatgcctaatcacacccatgagattaaggacttcctcctcaccgcgaggaggaaggatgcccgttcagtgaagatcaagaagagcaaggatgttgtcaagttcaaggtgcgctgctccaagtactt

SEQ ID NO: 24913 - DNA, 517 bp, Oryza sativa
  Clone ID: PAT_MRT4530_29852C.1
ctgggggcgtgggggggaacgcgggccggccccgggaagcccgcccgcggccccgagggggggccccgcccccgaaagggggacccgggggggggggggggacccgcgggcaaaggggagccccggggaaaaacgggggccgcccaaaccacaaccaaaaagacggaggccagggggaaagaggaaaaacccggacgcccaaaaagggggggaacccaaatgaaaagggcggggccgacaaaccggtggcccaacgaaaaaaaaggaaggcccccacccgcgaagaaaggcgcaaagcaaacggggaggcggggtgggtatagggaaccccagggggccgggtaaaagccaatgggccgggaaccaccgggggggccataaccgccccacccggaaagaggtggaaagcgcgggccacccaaaatcgcccccgaggggggaaaaccccgggaaaggacgtgaacagcccgcaaaaacaaaagccccctttgggggggaggtagccccaaaccaaaaa

SEQ ID NO: 24914 - DNA, 2859 bp, Oryza sativa
  Clone ID: PAT_MRT4530_29853C.1
atgcacgaaaaaggcaaaaagatagggagcgatgatttctcccctccactaggcgagtttgaacaacaaatgcaaccggaacttgaaaactgtacagataatttcgcccctccactaggcgagtttgaacaggagatgcaacaaccagaatctactcgtggtactcctcaaccagagggtacaagggcaattgaagaaaaaagatcaaattatagggcccgttatgcaaatttgacacccaatcaaaggcataaaagacgtgagcgtcaaaatgagcttaaggctttgaaacgcatgaatacagatgagaattcaactgcaatccaagcaaggcgagagagtgatcggatgaaatataagaatatggatccgaaagaaaagcaagctaagatagacaaggttaatgctaactatgcattgcgacgaaacactcctagcgaatattccattgcagtggagaaccctggatatgtcgcatcaaatatgtcgccctctgcccctataagaacagaaagaaagcacgtaacgcatggagaaagacaagcattggtagctcgtcgtaatgaaagtttcagaaatagaataaatacaagatcagtctcattagaagacccttttgaaagtgcacaactagaaagtggtgtagaatcccctaatgagccaagaataataaataacggtgatggtgaaatcatttttgaggatgatagtgatgatgacagtgacatgtatgatgatcaagcttgggagataaacgaggacgtagaaatccaagatgttgttgatgacatccctgaaagctttggcattcccgaaacacccgatacatcagaaatcgtgtatagcaacataccacagagaactcacatgctaaaaccggtggaaaattgtgaattttgtgacccaaagcacttgcaattatacttctatgatgatgatcctagcctagagcaccggtaccgtcgttgtcatcctgaattatatgaacaagataaagatgtaattggcattctggccaacgttttacgcagtaatccatactctgaacaatttaggagtttgggacaagctgaggatcttaagaactaccgtgtgatgttgaatcttgaccaaaagttggatcaaaggacgtacaacgcgtcgatcacttcagaagtggctgcggtgtgggttgaaggaaaggagcgacggaagacctttgataagggtgtaatcttacatggaaacaacaacgaaatacaaggaatccgatcatatcacgcatgctatgatccgttgtcttatccgctattctttcctagagctgagttgatttggcatactgatataccgaaaaatggtgttaacacagaagatgtaataagagcccgtgcaaatcgcaataataatgatgacccaggtaatagactgtgtgttttcgtgagagattactactgctataagttccaaatacgacctggcttattcaaccctatattgtatggtgggcgtcttttccagcagtttgcggttgacacatacatcaagattgagagctcacggctagactacatatttaaaaatcaaaaagagatacgagcagatctatatcaaggcttgctagatagcattcatgctggagagaataggggaaatgcagttggcaaacgaatggaagagattacccgtgaacttgaaaaagggcaaacccctcaggatcgcccagatctcatcgtgcgtgttttcaaggcaaagctagaggaaatgaaaacacagttagttgaaaagagcattcttggcatcgtcaaggcatatacctacgttgttgagttccaaaagaggggtttaccacacgcccacttcttattgattatgaatgaaaaatataagatcacatgtccagagcaatatgaccggatcatctctgctgagctcccagacccactcaagtacaaagagttacacacgatgatcgtcaaacatatgatgcatggtccttgtggcaatctgaatcgcaatttcccatgcacaaagaatcgcccatcatgcaagaatgataataggtgggtcgttccttacaacccttacctcctacggatgttcaattgccatataaatgtagaagtatgctcaagcataaaagctgtgaagtacctattcaaatacatatacaagggtcatgaccgggcttctgtatctgtgaatggggtagacaatgaaggcgacattgatgagatcaggcaatatagggacgcacggtgggtgacacctcatgaagcattatggagaatatatagttttgaactaagcaaaatacgcccaggcgcaacaagctttgaatatttacgaacagttgatggaaaaatactaccaaccttccgtgaagctgcggagaaaagagtgcaacagatggttctaataaatatcagagatatgttgcagtcaatggggaaagatatacgatcgtttcctttgcccgaaatagacgagttacatgacacgacaaatggtttacctagggagatcattgaagaatccacgattaaggtagaccctcaagatgtaccattatcagactccctcaacaccgaacaaagggttgcttatgatgagattctagctgcaattgatcgcaaggaaggaggcttgttcttcgtggacggcctaggaggcacaggaaaaactttcctatacaaggcgttgctagctacagtccgcaaacagggaaagattgctgtggccacggctacatctggagttgctgcttcaataatgcctggaggaaggaccgcacactcccgattcaagataccactaaggatagatgatggggctatttgtagtttcacaaaacaaagtggaacaaccaagttactttag

SEQ ID NO: 24915 - DNA, 1181 bp, Oryza sativa
  Clone ID: PAT_MRT4530_29854C.1
atgtctgagctggcttattcacccacacaggaggtgaaagtgaattccttgttttgcaatggcataacagaacggtcaagccgattctcaccctccatttggttagctcctgacatcacagagggctatcgcaaatgtcagcgtcaagtgttctggtattcttttctgaagctacacgtaactctagaagtatttcagcaagaagggtggaaagattcgttaccggttgattttccaaagcctagtgacaatgaaaattctgtggaagttgcacaccctaacataaagccattcagtgtgcacccgctgcccctgactaaaaattctgatgtacttctggaatcttcaaatgggtctgattctttaaaggaagagaaaaaccattactatccaggcaaggaaatcaagcgcagaaaacgacatagaagaaagcagtatgtggaccaagaaccatgcataatgagaggggtctacttcaaaaacatgaaatggcaagctgctataaaagttgacaagaaacaaatccacttaggtactgtcgggacacaggaggaagcagcccgactatatgatagggctgcttttatgtgtggaagggagccaaactttgaactttctgaggaagagaagaaagaactacagaattacacctggaaggacttcttggatatgactcgagacaccataaccagcaaaaaacaaaggaaagttggattaataaggcgcaataagacggactcgctggtaggacagagtgatggtgatactgagatgatcaatggtggcggctcatcgcactcggaagatggagatgctgagacctcagcatcttaattaagactgccaccagagttcatggacagccagattgggtctttcaacagattcgtttcaatgaagacataatttccatttaggtttttgttctctcaataattaatttcatgtgcataagggccctgatggtctgataaaggttaggctagagaaatcatgccatcccatataaagttggagatggtccattataggaacacatttctctgagcaaatgagcatcatgtatagaaacaccattcctgaactgtgtatatctttaccccaatttctctacatgtaactagattacacatttaataaagaatttatttttcctttcaaaaaaaaaaaaaaaaaaaaaa

SEQ ID NO: 24916 - DNA, 601 bp, Oryza sativa
  Clone ID: PAT_MRT4530_29855C.1
gcacgaggctgaaacagcagttggtggttggtgatctcggatgatttcactttagtctcgaggagaagaatctcgggtgtgttttgttgttttaaatgggatttagtttgcgactggattctagtttggtataaggaagtagttaagtgtacattgtgtactagaaactattataatgtgtgttttattagctcgaattttgtgtatatgggcttggagaggttgttctcgctggttaaatgtcttggtaaaaatgtgtatatatggcatcacatccattggaaataatgcaagtacgattgcctttgtatagttctatgttgaaacagtcgcatatccttgtttgcactatccatgctccaatctttctagctgaagtaggttcgcaactagttttcgacatggtgaaagcattaaggtttctgagatttcctaaataatcttgtacaatttaattattttatagcatttttgttcctatagtttattttatcagacagaaaatcactagtttccatgctttgttaaaactccaaagttgagttgcaataaatatatcagatgatacctgcaacttcatgagatgcttttacctgaaata

SEQ ID NO: 24917 - DNA, 5358 bp, Oryza sativa
  Clone ID: PAT_MRT4530_29856C.1
gctcgttcacggccggccgtgcgtccccggctaggccggcgagggcggcggcgcatccccggtcgacgaggggtcgcatcccactccatctacgaggccctgtacgtccacgtccatccaggcatccactgcgctgaccagtacatcctcgtcaagctgtgcagcaaggctccccagtccccgatcaagaagcagctgagcagggtgaggaatatgcggcgcttgagcttaggcaatagggaggcttccaattgttcagatcaggcagtgagtggtgctaccttgcccagatgcagtacaaggtcctcatgttcccaacaacctaatcattctcctaatttggatgaggagattttggaggaggaagaaacatctgaggaaatctggtttcgtggtcctacacgtgtgccaccacaacctacccgagaggaggacaaacctgtgctgactccagtaggagacaggcaatggcgagcaaatgattatggaggcaacattagggtccccaatagcatcctgacattacttcttaaacaatggttccctggcattgtcacattgaagggtaaagaggagccagcatggagttggaaacattacaggatagcgccggatactccaagaagcaatcaaatacggctgccaagctgtctccatcgtgttgaggaagacttctggctttacttcaggtgggcagagggaaaagaacaagaagctagaaaggttgtccacaattgtgtcaagggccttgttgatcgcttgttttatgaaactcgcatcctagctgtgcttaattaccaaaggaaaatcctgaaggtgaacacttccagagaaatcgcatgcagaacttatcttacagagagcgagtacctaaaggtagaaccatggtggttcctgaattcagaaaatgcatggcgggagttgatacgattgcggtggtgtaatccaaaatggcaggctgtctcacgtgctcataggatacggagggagaaaatgaaagggccatctcaccgccaaggcagtgctaacttgagccgttaccaaaaaaatttggagaagaagaaaaagcggccagttgctccactagaggcctacacagaaggaaggagggaaaatcgagaggatggacaattcagctgtgacccgcgtgtagctgagaagcttgaggcctatgctgcagcttatgttcagttgcatgggccagaaaatgattggcgcacttctcccattgatcctgtcgctgtgcacatggctggtggtggaaagaaacatggccgtttcatgattggtgatggactcattgactcatcagcagtgtttggtgataattcgcgtgatgatcaacgccctcgcagaagattgaggacagatcatgacaacacaaaccaggttgaagaccttctgcggcaactacaagaggagcgcgaggcaagggagcgagagcgtgaagagagggagcgtgagaaggagagggagcggcaggagaaggagcaggagaaggagtgtgagcgtgaagagagggcgcgagagaaggagcaggagcgtaaggagagggaggaagagcgcaaggagagggagttggaaaagatagcctctcaacagaaatcagcattctttgaagctgctttaagggtgatacaaagtaagctgaacatagacttgtcagcttcaggcacacctcccttacctgtcatgttgactcacctagtttacctgaactttaggccacatggaactctagtagatgttcgctgtgtctgttgccttaggttggctgcctgttgccttttggtcatatatgttgccatgttggcatgcgctggaacttgtgaactggaagttcggttcttttggtcatatatgttggcatgcactggaacttgtgaactggaagttccatactttggtcatctatatttgcatgcactggaacttgtgaattgtacaatgctagttgatcgtaattggatgtacaagggccatcgaaaccgcggcgaggttactgctgaatggattttgaagactacagaatttcttgacatggcattcagtcgggacacacgctgtgctgatgtattgtgcccttgtaactactgcaacaacacacgtccccaaacaagagatgtgatgatgaaacacctttgcaagtatggtttcaggcctgaatatactgtgtgggtgtatcatggtgagacacaccctacatgtgaagaggtggtatgtgaaagcactgaagatgaagatagggttgtggacatcaatcggatggatgatatggtggatgatatccgagatgcttatgtctcagttgaggaggaagatccagagcccacagcgcaatctttctttgaaatgttgtctgcagcgactaaacctctccacgaacatacacaggtatcacaacttgatgctaccacacgactactagcagtgaagtctcagtatgctatatcaattgctggatttgatgcacttttgaatgtggtctgtgctctcctcccccaagggcataagctaccacccaacttgtatgaggcaaagaaattccttagtgctttgaatatgccgtatgaaaagatagatgcatgccctaaaaattgtatgctctttaggaaggagaatgaacataagacacactgtgataagtgtggagagagtaggtatgttgaggtcgaaaacagtaagggccagaagagacaattaactgttgcaagaaaggtacttcgttatcttccaatcatcccaagacttcagcggctatacatgtcagaatctcaggccaagcaaatgacatggcacaaaactggtcatcgataccatcctgacaagattgtacatccagctgacggtgaagcctggaagaagtttgatagagactttccagcctttgctatggaaatgcgcaatgttagagtagcaatagccacagacgggttctgtccatttggtatgggtgcctcttcatacacttgctggcctatgtttgtcattcctctgaaccttccacctggtatttgcatgcggcagcacaacatgttccttagtttgataattcctgggccgaactatcctggtaaagatattagtgtattcatggagcccttagttgatgaactcatacatgcttggcagcaaggtgtgttgacatatgatcgtgccaccaagacaaattttatcatgcgagtctccttcctttattctatccatgaccttccagcctatggcatattccgtggttggtgtgtgcacgggaagatgtcatgtccaatctgtatggaggtgctccaaggaaaaaggttgaaatatgggggtaagtactcattttttgattgtcatcgccagtttcttccaagtgatcacagttttagaactgattcaaactcttttatggcaaacactactgttagtactgagccacctcgtcgtctctcgggtggagagataaaagctcagttagatagccttgtccttgctcctaatggaaatggttttgtagactatggcaaaagtcacaattggacacataggtctagtttgtggagactcccttactttcatatgctagtacttcctcataatatcgatgtcatgcacaatgagaagaatgttgctgaggcaatattcaatacttgctttgacatcccagacaagacgaaggacaatgtcaaggctcgccttgaccaagctgcactttgtaaccaccctgagttgaaccttgtccaaaaacaaccatctggtcaatgggtaaaaccaagagcggatttttgcttgaacagaactcagaagaaagaaatattggaatggtttcggacattgaaatttcctgatggatggaactaccctgttgaaagaggccaaaagtatcttaagagcaaagttagaaaccgagctcgtgttgaagcatccatagcagaggcttacatactagatgaaatctcaaatttcacatctatatattttgctgatcaagtgcggacaattcataatcctgtccctcgatacaatgtggctcagtccactgattgttcccttagtctcttctctattaagggagattctactagccgaggagtccctagacacttaactgctgaagagtgggatgctaccatgttgtacgtgcttacaaatcttactgaagtggatgactacattaggaagtttatagatgaggagtggacttcacgaggtgttccaactaggcaacagcaggagaacatcttacagaatggtgctgggagagatcatcctaattttgtttcttggttttgtaagaagaggatgatggatgagactatgagtgatgatttgaagcaaatagctagaggatgccacactcgagtcttgttatataatatatatgatgtaaatgggtatcgatttcggacacataaatatgagcaggagaggccaaatgcaactacaataaacagtggtttggtgactataggacagggagaaaatggtgaaatgactgagtactatggttacatcaaagaaataatagaaatcagctttgatggcaccaaacctctcacacttgtgctcttcaattgccattggtttgacccaagccaagtcaggtactcgccaagatatggcctggttgaagttgctcatgcatcaatccttcccaagtttgagccatttgttatagctcatcaagcgacacaagtgtattacatgccatatccatgcaaatctgtacaagatctcactaattggtgggttgtatataaggtgcagccaattggtagattagaagtacccactgatcaagattatgattttgtccccaacactgatgttgtccactatttccaagaagatggcctgcttggcagttttgtaattgatcttggtctgaactttgataataattctgaagaggctgccagcagtagggatactgaagatatttgcaatggcaaggacttggagcttctcaatggatcatctattcaagatgtcaactacgatgatgacgagtcttattatgctgactcatccaatgaagatgatgaatattccaccaatagagatatcttatatgatgaatatttctaaggcatataatgctatggcaaaggactggagtttatttttaccatcaatccggttaagacagccactagtgtttattgcctccctaggagaggtgtaagaaccattgtagtttctatggcatcatgtgtatctagtcggtggatatattcatatcatgttcttcttagcactgagaatctgcactaatgttcactaattattatgtggtgccaatttgtttacatgaaacatgcttattcaaaaaaaaaaaaaaaaaaaaaaaaaaacctgcagcccggggatccactagtt

SEQ ID NO: 24918 - DNA, 2100 bp, Oryza sativa
  Clone ID: PAT_MRT4530_29857C.1
atggcgcgggggtctctcaaagccctcgtggggttcatgacctcctacttccgctatctgcccactatggaggcgatgcacttcctgcgcgccgccaagggggacctcctcgccgccgtccacctcgtggaggcagaacgttgcacgagcgcgttcgacatcggctcctgcaccaccaagaccgccctccggtgcgccgcaggggcctcgggtcaccccgacccggacagattggccacggcgatgctctcgctctcttccaaagcccacaagatcgcccatctcttgtctaggaagggtcgtctcacctgctcagacgtggaccacctcagctaccttctcctagaagaaggaaccaatgaccaaatttgtactcaacaactgatggctcttgtgcctccaaggttgccacccgagctcgccgacgctgccgccaccttctccccactcgccccgcaaggtgtcaccgtcaaggacgagagaacactcgaacgatgcaccaagtctctgcaatgcgtgctcgtcgacaaaatccacggcttctacctcgaggcactcgctctcctacctcaacaccttctccgcggccgttaccaccgcagcgttgtcatggccggccactgctacggcccactcgaccccgtctccaacatcatcctcaacaccatctggtacgacgccgcgttcccggtccccaaggagcagcacctagacttggacatgattggcaggtgggcgctggtccgtgctgagcgctattccgttgctggcctcgtcgctggcctcattgcctttgccggggactacaacctctctgaactccaagccatcaggtgcctcctctacgccaacggggactttgccactgccatgagcgtactgcagcaagcactcctgaaccaagaacgtacaatgctgtctgactccgagctgtgccgcttcatggatgttatggctaagcgcttgcagctgtacagcgtgatggccattgctgctcagcacccgagcgctgatggactacaagagttcctcatatctgagcgcactcgtgctatgctgccgatggagtatcgcagattctcccgagaggatgtgcattccgtcatcgagtcactgttacatgaaccaccaccgtcacttgggatgccaccggagctggtacgtttgagcctggcggcagaacggaccattgaccagttccctgatgctaccaagcgcttctgggctgacatgagctctttccacagcaaggcgaaggccgcattggaaagctatgttctggagaacgggggccctcagtatgtgatccatgtcatctgtggtgcgaacgaaagtgtcgcggaccgcaatggcccagagcttagcaggattaactggccaagatcgcacaacaaatttcactattcccacattaacttcttggcgagccctactgggccaagtgctgtgggtgtgttgccaacccttttctttgcagagtgcgtaaatcacaatgaagaaagcgaccgtgccaggaagaacaattgctaccctgttgtcgtgccaccaacaaatgctgagaaggtccggtgcttctactgtgagtataaaggcattaatatcattcacccggctgatgggaactaccatgggtgcgacacagacttcgagaagatggcacgccggaagcacgttttgaccaatagcatcgagagcgtcttcaacaatggcctcttggtctctaatttcaggggtgcggtgcaagaagatttcttctactttgaccatgccagggaccatgccaaggggccatcatcttgttcagatggttaaaaattcatcacaacatcagacgtggtcgcgtcctagttgctagtctaatctgtttgttgtttatgattaatgatgatgcttgcgcaactgagtagcccaaattagcaggcagcgactaattaactttgactcttatttatggtcactggtgtaggtctgatggcagcattttaagtttgtgttgatactgaaatattggatgtgtttttctaaatgtcgcatgctggctactctgaaaaaaaaaaaaaaaaaaaatttctgtctcgacactagttctctccctcgtgc

SEQ ID NO: 24919 - DNA, 221 bp, Oryza sativa
  Clone ID: PAT_MRT4530_29858C.1
cgcacgaattgggatgaatttactagaaattacttcctcggcagggagaatttggtatcagtttttctcctagtagatgcaagtattccagctaagaagattgatcttgactatgctagctggcttggtcaaaacaaggtccccatgacgctagtgttcacaaaatgtgacaaacgcagaagaagaaaacggggaaaagacgaagaaatgaaaaacttcag

SEQ ID NO: 24920 - DNA, 1590 bp, Oryza sativa
  Clone ID: PAT_MRT4530_29859C.1
ctaatagctaggagcctcatcttctggtggctgatcttcataggcctccggaggaacataattctcatctcggtcgcaacgaccaaagtgtctatccgttaaaccgctaagccttatgtaattatggagagctatgcaagctactatgatatgtgtttgagtttctgggggatacgaaggcacatatttcaatatgcgccacttctgcttgagcactccaaatgatcgctccatgacatttctcagggaggaatgtgcataattgaatacctcctctttaccttctggttctacggcgttttggaactcttggagatggtactttgtgcccttgtacggcgccaggtacccaatccggtttggataccacgagtccactagatagaacttccctggaggtggatgagggaaaacatttttgtatctagtcattgcatcgttgaataccctcatgtcatgcacagaacccggccacccagcaaacacaaatgtaaaaatcatgtcaaagtcacaaaaggaatgtttctgaggcagcacatacctaacacaaatagcaccactaattgctaaacagacatagcttgcaacccacagctttggggtctcatcagtgaccccgcactctctactcaatcccatgatacgctcggccacctcccgcacgcgtgccatctcatcatccttcttcttctcacgcctgcccaagtagttgtccatggctgctactttgtccttctgcaactcgttgtggacccccatgaacatgcggtccagttcgtccagatacttgggcatcccattcttcggcttcttcaactcagcatggttcttcgtgttgtcatcccaccacttgtcagaagccacaacggtgccatcaggccagcggcccaacccagtatatgtcctcaacttcactctatgagccgacgccgtgcaccacaacccctgcctcggcctcgcgcctacgatgcggccggagcctgaggacggatgggaggcacgaagacgccttcgtggcctgcacctccaaatgaaggtggcattggcggttctaacccagcaccaatcgaatgcaggccgccgactcctggtgccgccatcggaccgccccatatccgcttgctccttgaccactggggcacccacgaaacccgaccgtgcggttcgcgctccgagacggacgtgtaagcccagagggcattggctgccctcccatccgccgccgcgaaggtcttggtagccatgcatggcggaccactcgtatgcggagttgaggtcgagcgtcctgaactcgagctgagaggggttttggctgctcgaagaccccttgccgaatcccccaaaggtgaaggacgtgtggccgccttcacgagaggggtgcagaggctgcgcgaggaagtctcgggtcgggatgccggcgccgaatctatgctcggcccagtagaggggcctggtgccgccgccgccgtagacacctccggtgttgtcggtgccgtaaccgccgacggtgctgccgtcgccgtacccgccaccgttatggctgtcgccgtagccgccaccgttgttgctgtcaccgtcgtacgcgtccat

SEQ ID NO: 24921 - DNA, 2361 bp, Oryza sativa
  Clone ID: PAT_MRT4530_2985C.1
atgggcgtccatgtcttcaccgaccggcttgccttcgccgccgccgactggtgtttctgcctacacggctggcctatttatgccgccgctgttgggcgtctacgacttcaccgccggcctgcctccgtcgccgccgactggtgtcctcgcctatacggttggttggtcacaccaccgttcatgggcgtccatgcctccgcctacacggctggcctattatgccgccgctgttgggcgtctacgacttcaccaccggcctgcctccgtcgccgccgactggtgtccccgcctatacggtcggttggtcacaccaccgttgatgggcatcgtcatcttcaccgccggcctgcctccgtcaccgctgactggtgcctccgcctacacggctggcctattacgccgccgctgttgggcgtctacgacttcaccaccggcctgcctccgtcgccgccgactggtgtccccgcctatacggtcgatactactcatcctatatgtttgttctgcaggatccagatccagatatgcataaaagggattcatggctttaagcttatctcttacgctccaggaatggatcagtcagaacatcaccaccggctcgcctcgaccgccgccgactggtgtttccgcctgcacggttggcctattatgccgccgttgttgggcgtctacgtcgtcaccgaccggcttgccttcgccgctgccgactggtgtttccgcctgcacggctggcctttatgccgccgttgttgggcgtctacgtcttcaccgaccggcttgccttcgccgctgctgactggtgtttccgcctgcacggctggcctttatgccgccgttgttgggcgtctacgtcttcaccgaccggccgcctcgtccgccgccgactggtgcttccgcctgcacggctggcctattatgccgccgttgttgggcgtctacgtcttcaccgaccggcttgccttcgccgctgccgactggtgtttctgcctgcacggctggcctttatgccgccgttgttgggcgtctacgtcttcaccgaccggcttgccttcgccgctgctgactggtgtttccgcctgcacggctggcctttatgccgccgttgttgggcgtctacgtcttcaccgaccggcttgccttcgccgctgccgactggtgtttccgcctgcacggctggcttttatgccgccgttgttgggcgtctacgtcgtcaccgaccggcttgccttcgccgctgccgactggtgtttccgcctgcacggctggcctattatgccgccgttgttgggcgtctacgtcttcaccgaccggcttgccttcgccgctgccgactggtgtttccgcctgcacggctggcctttatgccgccgttgttgggcgtctacgtcttcaccaaccggccgccgcatccgccactgccgactggtgtttccgcctgcacggctggcctttatgccgccgttgttgggcgtctacgtcttcaccgaccggcttgccttcgccgctgctgactggtgtttccgcctgcacggctggcctttatgccgccgttgttgggcgtctacgtcttcaccgaccggccgcctcgtccgccgccgactggtgcttccgcctgcacggctggcctattatgccgccgttgttgggcgtctacgtcttcaccgaccggcttgccttcgccgctgccgactggtgtttccgcctgcacggctggcctttatgccgccgttgttgggcgtctacgtcttcaccgaccggcttgccttcgccgctgccgactggtgtttccgcctgcacggctggcctttatgccgccgttgttgggcgtctacgtcgtcaccgaccggccgcctcgtccgccgccgactggtgcttccgcctacacggctggcctattgtgctgccgttgttgggcgtctacgtcttcaccgaccggccgcctcgtccgctgccgactggtgtttccgcctgcacggctggcctttatgccgccgttgttgggcgtctacgtcttcaccgaccggccgcctcgaccgccgccgactggtgtttccgcctgcacggctggcctattatgctgccgttgttgggcgtctacgtcttcaccgaccggccgccgtatccgccgctgactggtgtcaccgcctgcacggctggcccgttataacgccaactgatgctatcttcttcacggctggctacatcgctgtcactactaataggcatcagtatcttcagcacaagctgcctacgtttgtcatggctgccgactggtttcttcacttccatggctgcatgattctgccagtgttgattggccttaccatcttcatcgctggtcgtctcgtctgctgctga

SEQ ID NO: 24922 - DNA, 225 bp, Oryza sativa
  Clone ID: PAT_MRT4530_29860C.1
agaagaatatatggtgctatgagaattcatgacatcatacatgattagagggtgacactcaaacagtagaggcctgaagattgcagatctacaatggagcaacacaagaaatacttgaacaaagatactaacagaaatcatctttttatttgacaaaatggcagcctgtcctgtatgtaaagacgaacttctatcttataaaaaataatgatcaaccaaattcct

SEQ ID NO: 24923 - DNA, 375 bp, Oryza sativa
  Clone ID: PAT_MRT4530_29861C.1
atgcgaggaacggcgtcccgcgtccgtgacggcgcggcgtgcacccacgggcgccgggtgttggtggaggcgtggcgccgccaccgcttcctcagtaggacaagcagtggcgtggtagaggtcgtcggggagcaaggtcaaggtggcatggtggagaggggaaaggcgagcacagtggagcggcgatggcagatacgcgaaggaactcgcaggagcagatacggagaatcgtcccaagccgcggcggcggcgtcgatgcgtacactcgtgggaatacctagaagctggtggaacgcaatggaaaaaacaaacggctggatggaggctgacaatggatcgagcggctcctatcgtcatgcgacagtaaaacagtag

SEQ ID NO: 24924 - DNA, 666 bp, Oryza sativa
  Clone ID: PAT_MRT4530_29862C.1
agagagagaacttaacttgaaccataatttaatatgcgtgtgagacttctctttccccgggagcgccagaactcctctcactgctagaaacgtatgacgcctagagtgcatgagggctaaagttcatggagcgggtactgccaatgcgaggttatcgaaaagctttgccgtgacgcgtctcatgtgttgggacgaggctcatgtgttgggcagtcgcggagtgcgggtaaagtgtacatccactgcagtttgttggcctacctggccctaataggggagggtgccgccggctgccggctcccgcccccctcccatccgtccactgccatgctccctgccaccctccgcgcggccacgccgccagccgctgcccgccgacagccaccagcagccaccagccaccagcggcgccctccgcgccggccgccgccgtcccgcccggcctcggccgcctgggcttgctcgggtataggaggaggaggagatggggagggggaggagaggggaaggggagaaggtcggatcggatctgaggaggaggctgagagggagttgtttaatgagagggaggagagagaggaagggggagggataagatcgatactggcacgcgcgcggctcggggtggttttatttttggtccctgttgtttataccaaccgggac

SEQ ID NO: 24925 - DNA, 2154 bp, Oryza sativa
  Clone ID: PAT_MRT4530_29863C.1
atggcggacgccgccgccgccgccgccggcggcggaggcagccaccgttccgtccaccatgcgcacctcgcggcgctgctcaacccctccccgcgctcgccgccgcacccgcacccgctccagctccaccggcgccacctcccgctgtcccttcccgcggcccgccgcctcgccgcggccttcccgccgctcccgctcctcctctccctcctcgccgcgctccgcctcctcccctcgccgccgccgccgcgccccttcgacgcgctcatcaggtcgtacgcctccctccctcgcccctccctcgccgccgcggcgctcgcgttcgccgcgtcggccgggtacgccccctccgtcccggcctacaacgccgtcctcctcgcgctctccgacgcctcgctcccctccgcccgccgcttcctctcctccatgctccgccacggcgtggcgcccaacgtgtacacctacaacatcctcgtccgcgcgctctgcgcccgcggccgcctggaggaggcggtcggcgtcgtgggcgacatgcgtggcgcgggctgcgcgcccaacgccgtcacctacaacacgctcgtcgcggcgttctgcagggccggggagttggacggcgcggagagggtggtcagcttgatgagggaggagggcaatgcgaagccgaatctggtgaccttcaactcgatggtgaatgggctgtgtaaagcggggaggatggagggtgcacgcaaggtgttcgatgaaatggtgagggaggggttggcaccggatgtggtcagctacaacaccttgttaagtggttactgcaaggtgggttgcttacatgagtcattggcggtgttttcagagatgacacagagagggcttgtgccagatgtcgtgacgtttacgtcgctaatccatgcaacatgtaaggctggtaacttggagcaggcagtggctctggtggcgcagatgagggagaggggccttcggatgaacgaggtcactttcacggcacttattgatggtttctgcaagaaggggttcttggatgatgcattgcttgcagttgaggagatgaggaaatgtgggatccagccttcagtggtatgttacaatgcacttattaatgggtactgcaagttaggaagaatggatctagcaagagagctaatccgtgaaatggaggctaaaagagtgaaacccgatgttgtgacctatagtacgattatcagcggatactgtaaggttggcaatttggattctgcattccaattgaatcagaaaatgctcaaaaagggtgtgcttccagatgcaatcacctactcatcactcataaggggtctttgtgaagagaaaaggctcaatgatgcttgtgagctatttgagaacatgcttcaacttggtgtgcaacctgacgaatttacttatacaacactcattgatggccactgcaaggaaggaaatgttgagaaggctctttctctgcatgatgagatgataaggaagggagttctccctgatgttgtgacgtacagtgtgctcataaatgggcttagcaagtcagcacgtacaaaggaggcacatcggttactctttaaactgtatcatgaagatccggttccagacaatattaagtatgatgctctgatgctttgttgcagcaaagctgagtttaagagtgtagtggccctcctgaagggattttgcatgaaaggcttgatgaaggaagctgataaagtataccagtcgatgttggacagaaactggaagcttgatgggtctgtgtacagtatacttattcatgggcattgcaggggaggaaatgttaggaaggctctcagctttcataaacaaatgttgcggagtgggttttcccctaattcaacaagcaccatttcattggttaggggtttatttgaagaggggatggttgtggaagcagataatgccattcaggacttactgacttgttgtccactagcagatgcagaagcatcaaaggctcttattgacctcaatcggaaggaagggatggactacttccaagctcagggtgaaatctggtattcagaatcctccccctctgtggaatactggaattacatgatgaccatatgtcactttggagtttggagcacttatttttccatgcttcgcttaacaaaatga

SEQ ID NO: 24926 - DNA, 264 bp, Oryza sativa
  Clone ID: PAT_MRT4530_29864C.1
atggcgattaaggaccgtttagaaattctggttcgtgaatttctgggcgtgacacgcgagagccctgtttcattcctggagatctgcctcgacaacgacgggttccacggcggtagtgacaggggtcgcgccgccacgagacgaagggcagcctttgttgccatatgcccacagcaccgcagccacgacgacgaccaccaccaccacgggtttctggagggaggcgacagctgcttgagaagcccaattgagattgtaaattga

SEQ ID NO: 24927 - DNA, 405 bp, Oryza sativa
  Clone ID: PAT_MRT4530_29865C.1
taagctgagccgcctccccgggccgtaccggacctgcattcccgacccaacccacccgttcagttagaacctatgtaaggcggacccttacaagcgggctcatttgaaggaacttgcgactttttgctacaacatcggagcttatactgtttaactaataaatgctcacatttatggacatggatgtctcacttgacttatctgaacgggaatatatttaaagatgcagcctcttgggctaaacatacatacccccttatggtaactgatgtgctatataacacttgttctagcgtacgtagcacgactgatttatgaattctatttctctaatcattatgacatcgtggagagcttattacgagacaactaatgcaccaaatgagagcacaagaaggcccgtta

SEQ ID NO: 24928 - DNA, 741 bp, Oryza sativa
  Clone ID: PAT_MRT4530_29866C.1
ccggccgccgccgccgccgccctcctcgagttcgaccccgttcatctcatccgtcgtcctccgcgagataaccctccatcgctgtctcgggcgatgtcgaagcagctggtgtcgcggctgctggggatgttccgctcgcgggcgcaggtgggcgccgacaagttcggcaaccgctacttcacccgcgtcgaggaggtcgacggcgtcagtacgtctcccacatctccttcaattcaaattcagtctcgtaggctacatcaatggcggcggctcatttcttggatggctttgaccagtgaaggagaaacggtgggtggagttcaaggggagcgaccaggatccgaccactgttccagttgtgtcacacttgtagttgagtggatttgctggttgaatggacaaaggaagaaagctccgacaccagaggagttggctgagctggaagcaaggcgtgaacgtgtcaagcaaaatattgaattgctcaaaaagaaagaagaagaggaaaagaagaccggtgtccgaccagtcaagacggttgggaagtttgaatctccaaatctcaaaagttttattcagcagtttcctgatacttcgctagatcagagaaaaggacatgatgaggtatctagatcaaaggatggaactgatacagaggatgccaccatagatactgacaggtcttctgaaccgacaggaactggtgctaccttcaaaccagggacatggcagccaccaacttga

SEQ ID NO: 24929 - DNA, 426 bp, Oryza sativa
  unsure (1)..(426): unsure at all n locations
  Clone ID: PAT_MRT4530_29867C.1
gagaaaatacctttagtggttgaagacttcatgtgctatgaccgcgaaaataatatgtaccaggacatattcaaagaaggaagtacttacaagttggaagacttacatctgtcatgcaaatactcttggccatgtttttcttcttgtcaattgaggtatatattaacatgttaacatatcctgtcagttgagatatatactgcaacgaaataactatctgcttctgctactactaaaactgcggaaggtgctgacaaagaaatgtgctaccgtcctcctactctntcagacgatgatttttcagaggatgagaaccctgcagaccagcagcctagaagagagactgaaccaagctcgctcctncaaattattgattcttggcacaatagtaaggatgtctctagcaaaaaaaactcgagacattga

SEQ ID NO: 24930 - DNA, 333 bp, Oryza sativa
  Clone ID: PAT_MRT4530_29868C.1
atgaccacgacgacgacgggccggacgacgacgaccacggtgactggtgacgacgaccacggtgaccacaacgacgggctaggccacgggcggcggatgcgccgcctccgcctccaccgccaggtgcagcctccagccgacgcgtttccgcctccaccgccaggcgccgcctccaacgctgggcgctgcctccgcctctaccgtcgggcgccgcctcgagctggcgcgcctccgcctccaccgccgggcgccgcctccagtcggcgccccctccgcctccatggctccatcgccgggtgccgcatccagccggccgatttgcttcttgtctga

SEQ ID NO: 24931 - DNA, 342 bp, Oryza sativa
  Clone ID: PAT_MRT4530_29869C.1
accgtctcggaaccaaccaacctaacccgtgacttggctttggacctcggggccagttttaataacaaaaggcaaaaaaaccatccatgggaaggctaacgggcccggtggcactggaaaaaaaaaaccttaagggggggccgaacctttcaaaaaggcctgggaaaattaagggccacaggaaggttctgagggccaaccttttggcaataaggaattccccggctttgaaccccccccttttttagtgaacccccattggtttaacacaatccttttttagctccgcgaagtcacattttgggaaattccaaattaaggccttccccaatcttgggaaaa

SEQ ID NO: 24932 - DNA, 1464 bp, Oryza sativa
  Clone ID: PAT_MRT4530_2986C.1
atgctgcggtgccaactggtcccttcctcatggttggcctgcgacgccgttactgatggcgacatcatcttcaccgatcggcatgccttcgccgccgccgactggtgtctccgccttcacggttggcctattatgccgccattgttgggcgtctacgacttcaccgccggcctgcctccgtcaccgccgactggtgtcctcacctatacggacgtctatgacttcaccgacctgcttgccttcgccgccgccgactggtgcttccgcctccacggctggcctattatgccgctgttgttacgcgtctacgacttcaacgaccggcttgcctttgccgccgccgactggtgtctccgcctccacggttggcctattatgccgccgttgtggggcttctacgacctcaccactggcctgccttcgtcaccgccaattggtgtcttcgcttacacagttggttggatccagatccagatatgcataaaaggaattcatagctttatgcttatctcctatgctccaggaatggatcagtcagaacatcaccaccggcttgccgtcgtcgccgccgactgttgtcttcgcctatatggcatctacgtcttcaccaccggcttgccttcgccgcagccgagtggtgtctccgcctgcacggctgcctattatgccgctgttgttgggcgtctacgtcttcatcgccggcttgcattcattgccgccgactggtgtctccgcctacacggctggcctattatgccgccgttgttgggtgtctatgtcttcactgccagcttgcatttgcttccgccgactggtgtctccgcctgcacggctgacctattatgctgccgttgttgggcgtctacgcttccaccgaccggacgccttgtctgccaccgactggtgttttcacctatacggttggttggtcacaccaccgttgttaggcgtctacgtcttcatcaccggccacctcgtcactgccgactggtgtttccacctacacggttggatggttaccccactgttattgggtgtctacttcttcaccgaccggcagcctcatcgcctctgactggtgtttccgcttacacggacgtcttcgttttcgtcatcattctacttcttccatcactgactggtgtttttatcttcacaactacgcgtcttcgctaccggtttgcttctgttgctgccgacttatcttcacgtcatcatggttgtgcaactttatcaccattatggggcgacttcatcttcattatcttcggcaccggcaaattctattgcctctacttcgcaagctatttcaccaaccacgacatctccaagggcctcgacatctcggcatgcaccaccagattcgacaccgtgctattctactacaacaagtggttctgcaattttcaagaattctactcggatatcttcaacacgtatcttcactcaagcaatggctactag

SEQ ID NO: 24933 - DNA, 1465 bp, Oryza sativa
  Clone ID: PAT_MRT4530_29870C.1
atggagtccaccaccaccacgcgcgaggcgaaactgctgcggcgaaatccatctgatcaccacgacagcggcggaggcggaggcaacgacctgatcagtcacctcagcgatgacatcctggcgcacatcctcgcctccctacccagcatgacggacgtgatgcgcgcgtgcgcggtctcgcggcgatggcgccatcttggggcgcgtgtccccgtcctcagattcttctgcctcgatcacgacttcagcgagcaggagaagctcgaccggttcatcgccttcgttaacaatatccttgccaggcgcgccgatgatggcactagtactactgtagtagaggagctcgagatctcctttaaacgcgtcgtgccatcagtggatgttgcccaagtcgacgcgtggattcagtatggtatgcagcatgtatccaagtctttcaccctacaacttaactacatgctgccattgaacttgcacaacagcaatagcagcaacggctgcatgcaggttttgggtagtaataagcttatgattacctgcggcggcggcgcgacgaggttggagagcatggtcttgtcgttgaacaaagcgtgtctccgccgccttcccacgaacgtgacgctcgattcgcttgtacatctcacgctcgaggatgttgatgatctcaatcagctcttgtcaacagcacgctgcccttctctgcggaagctatgcttgcacaagcaaactgtgagtccggcgacaacgacagatcagtcgttgcatctggagtccaacgagcttttaaaggtgtcgttggattggatctggagccgtgctttggtgttggagctcaggactcccaggctccgtgttttccacacgaggaacgcgtccataggaaggttggtgatatcagcgccgaggctagaggagttgacgttcttctacacgagggtggcttccattgtccaagtcgaggatatgccgtgcgtgcggatctttgagactgagatgagttcactacgacgacccgaatataagctaacaatgatcctttaatttgtgcagaaagacggtcacgatagtgcagaggttgagctgataaaagatataccacaacttcctcacgctacatctttatcattacaggtttttgcacaggtttatgatattgctagtgtgttatgtcttcttactcggtgcaaatttctcaaacatctcgaacttaacataaaatattaatattgcaaaagacctacaggtatcggtacccaaaatcagagggatcatcatatcatctcgttagagcatcttcaggatataaagattaccagcgcttacaaacgacagtacgaagctaggctcctgaaattcttacatgcaagcgcaccggccttgaagaagatgatagtagcattcatatcagcctttatgctatcccagagcttacaaatattcgccgcctcctccacaagcctcccga

SEQ ID NO: 24934 - DNA, 261 bp, Oryza sativa
  Clone ID: PAT_MRT4530_29871C.1
atgggtgatggggagaaggagcggcgcgcggcgggttacgggctatgggagaggaagcgggcggcggcgaggtcgcagggggttctcgccgaggtgcgctccgtcggccttggagaggtgaaacacggcggtgagagagcccgtcgccgcggcaaagagaaggagcaggacgatgacgagggggaagagggtacagatgccgcgaggatagaggtggagttggcagcgaaagtatttgggcgagcacctggatggggttga

SEQ ID NO: 24935 - DNA, 210 bp, Oryza sativa
  Clone ID: PAT_MRT4530_29872C.1
atgttgaaagattccatacctttgactatgctagagcattttcaccgtacgtctgaacatgcctacatctacctgaaacggacccgtggaaaaccggaaaacgccatggccgacacacatctacactactctcaggctagtccaatgagcactccggtcgtcgccggccgtgcaaccgccgaaataaacgacgacgacggtgacgactga

SEQ ID NO: 24936 - DNA, 472 bp, Oryza sativa
  unsure (1)..(472): unsure at all n locations
  Clone ID: PAT_MRT4530_29873C.1
cccacgcgtccgcccacgcgtccgcccacgcgtccgcggacgcgtgggcgcgtcgctgctgcacgacttcctcgggcgcggcatcttcaacgctgacggcgaggcgtggcggtcgcagcgcaaggcggcgagctacgagttcaacacgcggtcgctccgcgccttcgtggcgcggtgcgtgcacggggagctgcacgggcgcctcctcccgctgctgcggcgcgccgcggcggagggccgcgccatcgacctccaggacgcgctcgagcgcttcgcgttcgacaacatctgccgtgtcgccttcgaccacgaccccggccagctccctgacgccagcggcggcggcgctctcgcggaggccgacgatggctccactgccagcggcaggttcgccgacgcgttccgcgacgccgctaatctcagcgcggngcggttccggtatgctgtcccgtggttctggagggtgaagaag

SEQ ID NO: 24937 - DNA, 214 bp, Oryza sativa
  unsure (1)..(214): unsure at all n locations
  Clone ID: PAT_MRT4530_29874C.1
cgcttttnntcctctcctctctctctctctcacactgacgacggcgagggcgggagcggcgcgntgcnctcgggtggggccggtcgacgtctgcagcggccacagcggtgggcggnagcggcgcggcaacggcgggctcgacggccggcgccctnctnctcccagatccancggcggcgcgcttngaaggggccggtagcngccacggagggcg

SEQ ID NO: 24938 - DNA, 405 bp, Oryza sativa
  Clone ID: PAT_MRT4530_29875C.1
atggagcaagagcatgaggagaaaactatagtcagagggtggcgtcggcggcggcgagtggcgttgccggagtggctccggcgaccgcggcctccggagagcataactgttactctgccgacgacgacaaagcagaccgaatccatggttacaaacctgctcgtttggagctaccactgcacgccatgggatgttcgagaacgttcgaggagagaactcgaacaagaaacacaggcggaggaggcatggcgacgtggaacgagccatcgcccgacacgacgctggctgaacacgacgcacgcacgcgcgaagcatggtgagctccaaccacaacgccggccagccaaggccacggggaaagcaagcgcgcgcgcgcgctcgtgcgcgaacgcggcgtcgagctga

SEQ ID NO: 24939 - DNA, 552 bp, Oryza sativa
  unsure (1)..(552): unsure at all n locations
  Clone ID: PAT_MRT4530_29876C.1
ctgatttccncaaaattttggggctccaactgccattccagttcgaaggctgatccttactgggatggtggnttctccagagagacataacctgttccgtttcatcccttttccacaagtcgttcgtccacggtggatgaggaaggcccccgaggctgctgctgcatctgcacgcacgtggtccagttctaggtcagctcccgtaacccgtggacttcgttgcggatcatccgttcctgttcttgatcacgggaggacactgaccacggtgttggtgctgttcatcggccactgtggtgaatccaccttctgtgatccacgggaagacccagaatgggtgttgcaatatactgtagagaagcagcactttgatcactggtgacttctccatgagtatgcccaatgttctgtgtgtgtttgattgtgcctgcatgatgtatcgtgaggtttgtgtaatgcctgagttaataaatgagatgagactcgcgggccaattgtgaggtttgtgtaatggctgagttaataaatgagatgagactcgcgggtccagaa

SEQ ID NO: 24940 - DNA, 195 bp, Oryza sativa
  Clone ID: PAT_MRT4530_29877C.1
atggccgggtacgacgccctcgtcgccgacgtcgaggcgtctcttgcccgcgccttccggatgctgctcgaggccgtcgaccgcaagatcgacggcgaggtcggcgccacccacggggagctcgccgcgctactggaggagagctggagcttgagggccagctcaagcggctcgacgccagggccgatgagctga

SEQ ID NO: 24941 - DNA, 138 bp, Oryza sativa
  Clone ID: PAT_MRT4530_29878C.1
atgtcgggtgatcaagccgacggtgttcgtgaggagttatccgttgggcgcgacgactctgcatttgtcgagatcgttctcgataatgcggtgtactcgaccatgacctactcgaaagataacagagcgagcccctag

SEQ ID NO: 24942 - DNA, 568 bp, Oryza sativa
  Clone ID: PAT_MRT4530_29879C.1
cggcacgaggggctgcttgtttgtttgatccgatcaaacaggtgaagctggtgccgtacaaccccgggtaccaggacgagtcggtgctgtggacggagagccgcgacgtcgggcacggcttccgctgcatccgcatggtgaacaacatctacctcaacttcgacgccctccacggcgacaaggaccacggcggcgtccgcgacggcaccaccggcgcgctctggaagtggtgcgagggcgacaaccagcgctggaagatcgtcccctggtgtaagctgcctcatcccaacatcgctcgctgcaacttgtttacgagcaccattatcaactttcttgatgaggagtagaaatttttgcacattgatttcacgtaaccgacagcaacaaggacgtcatagagtggccgatagcttacctgccatcttttgaattgttaaacttgctactagtactaatgatctcgccgaaaagaaaaaggctgatatgatgatgcgatctggttgttgcttatgtttgcagaaatgcggtgtgctggagctgcattggtcgtcgccgtgatctgtggagt

SEQ ID NO: 24943 - DNA, 477 bp, Oryza sativa
  Clone ID: PAT_MRT4530_2987C.1
atgacctcggcgacaacgactgcagcgggcggcggcggcgaggttgggcgcggcggatccggcacggtggtgaaacctatcccgccgccgtcactgtcatcgtctctccctcaccctcactcaccctctcctgccgccgccgctgctgccacgcactgcctccggcgcctcgcgctgtctcctccatcgtgccgtcatcatcatcatcaccgttgccacgtgctgccccctccgcctccacctctaccgccgccgccgtcatgtcgccgtctccgagcgattccgcctctgcctcctcgtcgcgccgttgccgtcgccaagcgcgggcttcaaggcggacgcggagaaagcggggaggtgagtgctcctctcctcttcccctctcgtctcccctatgcctacgaggaccgcggcggcaacgagctcgacctcggcaggctgggcaacaacgtagacctcggtatcagcacggattga

SEQ ID NO: 24944 - DNA, 1856 bp, Oryza sativa
  Clone ID: PAT_MRT4530_29880C.1
aaatctcccgtctcgttgtctcctccgctccttgcgccgccgccaagaggagtcgcggctgaacaggggaggggcggcgatcgagcagagcaggggagggaatcctggtgatgtaacaaaagtggtcaccagtgcctgcgcaaaatctcgtctgtttgtatatggtattaataagcagcttcagtgcctggctgatccttggggtgaatggaaggcaacaacctaccctctggaagcttgatgcgttctaactctgggcaaatgcatgctccaaatcctggaaagcagggctttgaccatactcagatgcctggcaatttatcgatgcatgtaaaccagtctacagattctgatcacttgtcagaatttcaattcggagagcttggaaaggttgaccaccaccaccaccatcaccatcgtcaacacgccaagaacggcatgagtgatgatgaggaacatggtgtcaacgaggatgccactgatagccagagcggcaagggaaagaagggcgctgcatggcagcggatgaagtggactgattcaatggtcaagcttttaattactgcagtatcttacactggggaggatccaggagctgattcaggagctgggaagagaaactctgcaataatgcagaaaaagggcaagtggaaggcaatatcaaaggtcatgggtgagcgaggctgcagtgtatcaccgcagcaatgtgaagataaattcaatgatctcaataagagatacaaaagacttacagatatccttggccggggtacagcttgcaagattgtggagaatcatgctctgctggattgcatgagtaatctgtctgacaagatgaaagatgatgcgaggaagatactgagttcaaagcacttgttctacgaggagatgtgctcctaccataataacaatcgagtgagtttgcctgaagatcctgcccttcagcgttcactgcagcttgcccttagatgtaaagatgagcatgatctgaggaggggaacaagcggagatgccgatgaagatgatcaaagtgtagactctgattccgaggaggagaatgatgaggaaaattacacattacaaggtgataagagtgccctgcccatgcataaaagattgaggcttatgacagatcaggaggatgtgggttttggcaactcttccagctcacatggatgtagcaggaggtctgattcccatggcatatcactggatatcaacaaagcatttcctgatggaaccaacttggctttggcgcaaaaggatttggctacacaatctgcagatcttgaggaacaaaggttgcagattgaagtccaggcagtctatcttgcaaaacaacggctcaaatgggagcgcttcagtaaaaataaggatagagaactggaacagatgaggttagagaatgaaaaaatgaggcttgagaataagcgcttggagctggaggtaaggcacaaagagttagagcttgaactcaagcaaaaaggcagtggcaatcatgcatgacatatttttaaccaatcaaggctgacttgtaagatggtcgctgatggcttctgttgttcgagtagactgacgcaagaaggttaaggttcagcatactttttttgttctgctttttttccctacattatttgtgctagtgagcttgatttgtaccataactcttattcttcagtgagcttgctaaccacacatactcagaagatcatgttatatgctgttaatgttgtcaattgtcatcattgtcgacctactgtttatgtataatgacaatgtctgattgcatccataatctgaggtgacattttcttcaaaaatcacaaaaaaaaaaaaaaagcggacgtccgctcgtc

SEQ ID NO: 24945 - DNA, 233 bp, Oryza sativa
  Clone ID: PAT_MRT4530_29881C.1
cgctgcaccgcgcgcagcctcgagctcgaggagagggagatttggccccccgatggcgaggccgagggcgccgctgctgcggcggatgctgctgctgtgcgcggagacggacttctgctcctactacctactcgtccttcacgcgcaagccttcgtgccgtcccgctacgacagattcgactacggtgacaccgacaccgacgcctggaaggacaccatactcgtcgaggcct

SEQ ID NO: 24946 - DNA, 1213 bp, Oryza sativa
  Clone ID: PAT_MRT4530_29882C.1
atcgatcaccaggttactgtagtagtacagatcggagcgagcgatcgatcgatcgaggaagaagaagaggtagaggttgtagatggctgtgtcggctggcggcggcggcggcgcggcggggcagttcggcgacacgacgctgacgaaggtgttcgtggggggactcgcgtgggagacgcagaaggaggggatgcggggatacttcgagcagttcggcgatatcctcgaggccgtcgtcatcaccgacaagaacaccggcagatccaagggctacggatttgttacattccgcgagccggaggctgctatgaaagcttgctttgatccgtacccggtgatcgatgggaggagggccaactgcaatcttgcatatcttggggtccagagatccaaggcagctgcagcgtctctgcaaccttatggcggtggtggtgccagcttgagcatggcagatcatggcatccagcaggggatcccgacctacaatgtgtatgggtactcaccttatttctcggattacggctatccgctgagctactatcaagcgtacggtgggcttggagcccagtaccagatgttcgctggtggcgccgccgccggggcggcggggctaacaatggcgaatcctaccggcggcggtctctactcgccgtacttccagtacggcccagcggtggcggcgaacgcggctgctgccgggtacgccggcatgcagtaccctcagatgtaccagtacgcggcggcggcggcggctgtcggagccccgacggcggcgacgacggccagccagctgaccgccgtggccgggctccagcagtacgctggcactgtggctcttgctcctaactctaccggccaagcagcaggcatgacaatgtctctgacagctccaactctgccggcaccatcaccacagtatcagtacaggctcatttcttctcatgtcgctgcagctccagagaaaccattggcctagaaaaccacggctgccttaagtctgcatccatctaaatacagtatcttcttcctccacacacatgtgtcagtcatatctcatatgcatatcatctgtcctagctctcatgagtatacttactcagctcacatatttactaattacactcacgcggtcacgccaaatgtacccacttatgggttgagtggtgtatttggcatagctaacaaaagactgtggtaagtccaattttgcatt

SEQ ID NO: 24947 - DNA, 682 bp, Oryza sativa
  Clone ID: PAT_MRT4530_29883C.1
ctttgtcttatttgctgcatgcacctcttgggtgagcaggtcataacgctgcacaaccatgggcccttttggaccttcattctgctatatcctgagatcttcctagctatcatctgcttcttctgggggcggacgcgtgggcggacgcgtgggcgccagaagagcaacctcccagtgaactggcctgtttttggtatgcttccattcctcgtgcagaatctgcactatatccatgacaaagtcgcagatgtgctccgcgaggcggggtgcaccttcatggtcagtggcccgtggttcctcaacatgaacttcttgattacctgtgacccagccacggtcaaccattgcttcaatgccaacttcaaaaactacccgaaaggcagtgagtttgctgaaatgtttgacattctaggtgatggactccttgtggcagactctgaatcatgggagtatcagcgacgcatggcaatgtacatatttgctgcccgtacctttcggtcctttgcgatgtccaccatcgcgaggaagactggcagtgtcttgttaccctaccttgatcacatggctaagtttggctcagaggttgagctggagggtgtcttcatgaggttctcactagatgtgacatactctactgtgtttgcagctgaccttgactgcttgtcagtgtcttccccaatcc

SEQ ID NO: 24948 - DNA, 197 bp, Oryza sativa
  Clone ID: PAT_MRT4530_29884C.1
gtctggcccatggcgaacaaggtggacgtcatggggacggtgagttctctcagcaattcctctgtcgttgcccagtttatgacagtgaggcggtgacaacggcaacggcgacctccatctttagctccgtcgccggatccggctcctaccgaggtcgtagaggccagacttggtgctgcctcggctccagcctgcat

SEQ ID NO: 24949 - DNA, 204 bp, Oryza sativa
  Clone ID: PAT_MRT4530_29885C.1
atggtgatgaccggcaacgactgcagctcccgtagctcaggatggtggatctaccagcgaaagatcctaacgacggtgcaagtggaggactcggcggcgatgatgaaggggagggtgacgacgacgtcgaccacaccgccacagggatccagcgctggtgagtctccttcatcatcaccaccaagtccataccagtgctggtga

SEQ ID NO: 24950 - DNA, 302 bp, Oryza sativa
  unsure (1)..(302): unsure at all n locations
  Clone ID: PAT_MRT4530_29886C.1
acgcgacgtagttgttccttagaggtggcgccttttttttttttttttttattttttttaannnngtgggatgggccaagcacaagtatgtttatagagttatacagtatattactgggggagaggtttatatcatgcttgttcggttccaagaagttgggtagatacatgaaggaaaagaaagatgaactggtcgaaggttttccagattgaaaataagggaattaaaaaaaaaaaaagattgcagatattgggggaataagcagttgacctagtcctatctttaggcatattggaggaat

SEQ ID NO: 24951 - DNA, 533 bp, Oryza sativa
  Clone ID: PAT_MRT4530_29887C.1
gaacattagaaatgcacctatatttttctttgggaaatatattttcctcgatttctcattttgacatatttccctctacttgttgaatatctgcaaaatctataacaatacagaacgcacgaacaatactgaagtatagtacaaagatggtcagatcaagagagtgaggatctactagtagcagagaaagaacacaaaaccgtgtgtgcgcttcagtttcagtttcagaatcgcaagccgcatacctatgtcgcgaacgcgtccgtccgatcacgagatgacgaacaccctgagctcccctctgtccccgcgggtgatgcgggtgtcgccgtcgaggtaggtcacctcgaactcgccgctgccggtgttggacggcggccggaggttgtccgggatgcgagggacctccagcggcggcagctgggacaggttccccttcgtcttcaccgtcgtcttgtcgaatgtgatctttatgctcgaggtgccgatgatctcaaacttgtgagccagcgtcgccgtcagctccaccggcg

SEQ ID NO: 24952 - DNA, 879 bp, Oryza sativa
  Clone ID: PAT_MRT4530_29888C.1
atggtggtctccgtcgcagccaacgcgcctcggacaatcgggaatacagacaagcctagactgcttgctgcgcgcgccgacacggacatggaccaccctgacgtggattgcgaaagagaaagaggagatgatgacgtacgtggtcacctgacgtatggggcctacgtgggtcccacgctgagtcaactgccacgtcagacaaaactggagtcaaaaccgccgagggacgtagtttgcattggtttttggttgacattcacccagcagaagcccggccggatttggcgctggatgcggtgctcgttgaagccgcccgtcacgtacggcgcctcttcccgtccccatcgcatcgctcatcctcaccgtctcctcgtcctcatcgtcaattgcggtaacctcatccaagtcatcgcccgtcgtggcccatcgtctacaagcagcaacaagccagcttcattccggcggtggcggcgggctgaaccacggtggccgtggctttgtgctgctgatgctgcgccgcaagctgctctcaaccacgcgtcccctcccatggaactcgtcgacagactgcaggcacttggccgtgtcctcctcggcagacggcagaccaggcacttggtcgaggtcctcgagtccgcaaaaacgcgcgtgccggtcttgacggcggcgccgcggcggagtgggccggcgcgggacgagttgaggaggccgaagtcgaggccagagaccatcccccgagaggcgctggtcgtcgagttcggcggtgctttcaacggcgaagtagaaagacggcacgtagttaggaaattaacgggggaaggacggaacatgcgacggggtggtatggatccaatttaccaaaattttagtggcacctag

SEQ ID NO: 24953 - DNA, 1275 bp, Oryza sativa
  Clone ID: PAT_MRT4530_29889C.1
atggaccggcgatcagaggcagccgaacgacgaggacatgggcgcgcaccttactcggcggcacgcgacccggttttcttcgcgcaccacggcaacatcgaacgcctgtggatagaagcccctgctttgacccatgctctctcttcctccttgatctttgctaggattgaggatagcgaatatgcattgttgcggaagattcttgcgttcctttcgcaccagatttcccacgagattaaaatcaccagggtcctgagaggtttgcgtggacccttgccttcctttaaaaaaatcgagcgcctgtggtacatccgccgtggccttctcttccccggcaacaccaacttcaccgtgctcgacgcgagcttccacttttacaacgaggatgcccgcctcatctgcgtccgcgactccctcgacgcggcgcgctgcgcttcacgtactaggatgcgcctgccggggaatctggacaagaccgtgcgggtggcagtgatgaggcccaagacgtcgaggagccgcaaggagaaggacgccgaggaggaggtgcttgtcatcgaggggatcgagcgagagcgggaacatcgcggcggcgagtacgtgcaccgggagcgtcgtgctaacgcagacagtgtccaccacgacgagaggatgcgttctccgaggaagacggtggcgaggagggaggggggtagccgccgccgccgcccggcccgcgccatcgctgccctcgccagcctcccccctccctcctccggccagatctgggagggagggggaggggagccgccgtcgccgcccagcccgcgctgtcgtcaccgccgccctcgccggcctctcccctccctcctccggccagatctgggagggagggggcaggggagctgctgtcgtggctgggagccgcgcctcctcgccgatgtcgccctccgccgccaccggccgccgcgctcccccctccccccctgcgcccctctagatctgggagggacgggccgggccatgccgccctcctccgtcgccctccttggccgcgccgcctcgcctcctcgccgctgccgcccttcgccgccaccgcctgccgccgtcggggagtgtagaagtgaggggaggggaaaggaggagatgtgtgaggacttagaaaaaaattacggcccgcaatggttcggcatcggcaacttgctcgatgacatcggcgccgacggcgaccggacgatcgtcgtctcgatcgtgacgaggtccggctgcgattcggtcaccatagtgtttgatgtgtaa

SEQ ID NO: 24954 - DNA, 2881 bp, Oryza sativa
  Clone ID: PAT_MRT4530_2988C.1
accggctggacttcgccgccgccgactggtgtttccgcctgcacggctggcctattatgccgtcgctgttgggcgtctacgacttcaccaccggcctgcctccgtcgccgccgactggtgtcctcgcctatacggtcggttggtcacaccaccgttgatgggcatcgtcatctacatcgccggcctgcctccgtcgccgccgactggtgtccccgcctatacggtcggttggtcacaccaccgttgatgggcatcgtcatctacaccgccggcctgcctccgtcgccgccgactggtgtccccgcctatacggtcggttggtcacaccaccgttgatgggcatcgtcatctacaccgccggcctgcctccgtcgccgccgagtggtgcctccgcctacacagctggcctattatgccgccgctgttgggcgtctacgacttcaccgccggcctgcctccgtcgccgccgagtggtgcctccgcctacacggctggcctattatgccgccgctgttgggcgtctacgacttcaccgccggcctgcctccgtcgccgccgagtggtgcctccgcctacacggctggcctattatgccgccgctgttgggcgtctacgacttcaccgccggcctgcctccgtcgccgccgagtggtgcctccgcctacacggctggcctattatgccgccgctgttgggcgtctacgacttcaccgccggcctgcctccgtcgtcgccgattggtgcctccgcctacacggctggcctattatgccgccgctgttgggcgtctacgacttcaccgccggcttgcctccgtcgccgccgagtggtgcctccgcctacacggctggcctattatgccgccgttgttggatgtctacatcctcaccgttggctcaccttcgctgccgtcgactggtgtttccgcttacacggctgacctattatgccgccattagtgggcatcttcgctttcaccgtcgaccgccttcgtcgccgccgactggtgtcttcattgttattgatggacgactttgttcccacattggccacttctgccatcaccaaggggaatattacaaagctaagtcatcatttattttattctttcgggggctacagatgttatatcatattttttataatatttatcttgattgcttgcgacataatctgagtacaaaagtacctatcgagttatggagttctatcttcctatgctttccgtttggtttgccaatggatggttgcctttgggccgattcctagcacccgggggctcgttggatggaccgagtaacgcaaggtgctaagtattattcggaataaatcaaaagcatagagatgagataaatttattttctactcttaataattgcaaaagtacccgagtagtaaactccgatccgtgaaactttgttccattaatgacgaactcatgtcactcatatgcatgtttgggaagtgcttaggccgactcccagtgcttggtggctatgactagttgggcagagcgtttaaacgtaatgagtcatctgctcggggaaatcaaaattgacaagaggagaaatacatgtttataaatattttaaaatacttgattttttctcgagtattatatttatatcagatactactcatcctatatgtttgttctgcaggatccagatccagatatgcataaaagggattcatggctttaggcttatctcttacgctccaggaatggatcagtcagaacatcaccgactggcttgccttcgccgctgccgactggtgtttccgcctgcacggctggcctttatgccgccattgttgggcgtctacgtcttcaccgaccggcttgccttcgccgccgccgactggtgtttccgcctgcacggctggcctttatgccgccgttgttgggcgtctacgtcttcaccgacgggccgcctcgtccgccgccgactggtgcttccgcctgcacggctggcctttatgccgccgttgttgggcgtctacgtcttcaccgaccggcttgccttcgccgccgccgactggtgtttccgcctgcacggctggcctttatgccgccgttgttgggcgtctacgtcgtcaccgaccggccacctcgaccgccgccgactggtgtttccgcctgcacggctggcctattatgctgccgttgttgggcgtctacgtcttcaccggccggccgccgcatccgccactgactgatgtcaccgctagcacggctggcctgttataacgccaactgatgctatcttcttcacggctggctacatcgctgtcactactaataggcatcagtatcttcaacacaagctgcctacgtttgccatggctgccgactggtttcttcacttccatggctgcatgattctgccagtgttgattggcctattatgccgctgttgttgggcatctacatcttcatcgtcggtcgtctcgtctgctgctgactagtgcccttacctctacgtctggtttatacagctaccactactgatggacatcatcatcttccgtcgccgactgattatgctgccgccgattggtgcttttatcttcacaactacgcgtcttcactaccggttcacttcattacggcaatacaaatttgtcatcatggtggagcgatcggcaccggcaaactctattgctgctacttcgcaagttttactacttcaccaaccacgacgtctttgtgaacctcgacatctcggcatgcaatgccatgatattttactacaacaagtgactctccaatattcaggatttctacttggacaccttcaacacatatcttcaatcaagcaatgactactcgacgacaagaagctataattctcgactctatgttcagttgtttctcaac

SEQ ID NO: 24955 - DNA, 343 bp, Oryza sativa
  Clone ID: PAT_MRT4530_29890C.1
ctaaaccggaaaaagattctgcttttgaagatcgggatggaggcgcaggggcggaacaagatgatgatattgagcgctgataaggacatggaacacgaccgtgaggacggggacgacggctctaacgactacaaccagatccgctcagaggcgaaacactccgactccgaccatgattacaccgataatgactccctcgatcacacccgcgacgacgtgcagttggaccggtctatcgacaaggatggcaagaggcacctgcgacgctgataccatgcaatggatgctagcgatcttttcagacaggctccagagcgtgctgtccaccaaccgaaggggcctc

SEQ ID NO: 24956 - DNA, 306 bp, Oryza sativa
  unsure (1)..(306): unsure at all n locations
  Clone ID: PAT_MRT4530_29891C.1
acaccgtccacggccagtgcnnctantcatccttgaacatgtatgtcatgtactcgnnggtgatgacaccntccacgnccantggaagcatcatgaggtcaaggtcaaggactccaagaccctcatctttggcacgnaagaggttgcggtgtncgnctgnaggaaccctgaggagatcccatgggctacggctngtgctgaatacgttgttgagtctactggtgttttcaccgacaaggacaaggcagcagctcactttgaagngtggtgccaagaaggtcgtcatttctgctcccagtaaagacg

SEQ ID NO: 24957 - DNA, 576 bp, Oryza sativa
  Clone ID: PAT_MRT4530_29892C.1
atgagcaacaattttagaaaccacatagtgaagtgggaggaagggcgagtgctgcctgtcaggggcggtcagaccgagagccacagccggtcagaccgacggctcaaggccggtcagaccgccggccctcggccggtcagaccgacggctcacggccagtcagaccgcgtccggccggcgggaggtagacgacgacccggccgcgaatggacggcgggcggcggcggcgagtggcgaagcgaaccacggcgatacgggcaaaagctagcacaccgggcggttgttcgtgatgagggagacgagccaacggctcggattcgccagagggagttcgacggcggcaaatcgcggcggcgacaaccggcgggaagggaagagggaaacgccgacgaggtcacgagggaccgattcccggcggtgagagcatccacgcgaccacgggaatccgatgctagcgtcggattggacagagctacgccgagcgaggctggcgacgtgcgggtgctacggagctcgagcggcgacggcggcgagcacgcggcgagcgacggcaacggtcggggcagtgccggctag

SEQ ID NO: 24958 - DNA, 320 bp, Oryza sativa
  unsure (1)..(320): unsure at all n locations
  Clone ID: PAT_MRT4530_29893C.1
cacgatgtgacgtcacaaaaacagtagtaatatggaataatttggtgagatataatatcatcatgagcaataattggtttgagatagtggtgttacgtggtcggtcgacgtcgttggtcgtacaacaacctaacgncggcgcgccttcattgggcgccggtgatgaatagtactgccatacgtaagactagagccgtacaagccacatccgaccaccaattgctacactctaagtagagagatcacactacatgtaacttaccgatgatataaatataataaatagtcccgctaaaaaaaaaaaaaaaaaaaaaaaaaaa

SEQ ID NO: 24959 - DNA, 356 bp, Oryza sativa
  Clone ID: PAT_MRT4530_29894C.1
ttcacgcgtccgtgagcctgttcaagacgttcaccgacgccgtgtggcggctcgccgcgccgctcgaggcgttcctccgcgcgctgccgcggcggccggactgcgtcgtcgccgactcgtgcagcccgtggacggccggcgtcgcgcggcggctcggcgtgccgcggctcgtgttccatggcccgtcagcgctgtacatactcgcggtgcataacctggcgaggcacggcgtgtacgaccgcgacgacggcgaccttgagccggtcgacgtgccggacttgccggaggctggcgccgtgacgaccaacaggccgtcctcacttgggctcttccactggaccgggcctgagagacac

SEQ ID NO: 24960 - DNA, 2151 bp, Oryza sativa
  Clone ID: PAT_MRT4530_29895C.1
ccccggccgccggcaggcgccgcgcgcgcagttcatcggcatggatacgaacggcagcagctacggggagagctcgtcggaggacgtgacgacgccgctgctgctgccggcggcgaggggcgggacgacgacgaagggtgatcgtcgacgtccggcgtcgtcggcggcgccggcgctgctgcgcgctctgctcgccaacaagtacctggcggtcgcggcggggcccgcggcgtgcgcgctgatctgcggcctcgtcgacctcggcggccaccgcgccgcgcgcaacatgctcggggtgctcgcctgggtgttcctgtggtggattaccgacgccgtgccgctcgccgtcgcgtccatggcgccgctgttcctcttccccgtgttcggcatctcctcctccgacgccgtcgccaaggcctacatggacgacgtcatctccctcgtcctcggcagcttcatcctcgcgctcgccatcgagcactacaacatccaccgccgcctcgctctcaacatcacgtcgctgttctgcggcgacccggtgaagccgccgctgctgctgctgggaatctgcggcaccaccatgttcatcagcatgtggatccacaacacaccgtgcaccgtgatgatgatgccggtggcgacggggatcctgcagcggttcccgcgcgtcgacggggcgtcgtcctcggcgagcagcgccgcggacgcgcgggaggtgcagcggttctccaaggcggtggtgctcggcgtcgtgtacgcgtcggcgatcggcgggatggcgacgctgacgggcaccggcgtgaacatcatcctggtggggatgtggtcgtcctacttcccggagcagaggcccatcaccttcagctcgtggatgtcgttcgggctcccattggcgctcgtcctcttcgtcgcgctctgggccacgctctgcgtcctgtactgctccaagaacaccgggagggcgctctcagcttacctggacaggagccatctcaggagggagctcagcttgctaggtccaatggcttttgcagagaagatggtcttggctgtgtttgggggcctagttgtgctgtggatgagtaggagcctgacagatgatattcctgggtggggatcactcttccacggcgaagttggggatggaactgtcactatcatgatggcgacgctgctgttcataatcccgagcggcaagaacgagggtgagaagctgatggactggaacaagtgcaagaagatccagtggaacatcatccttctcctcggcgcaggattcgccattgccgatggcttcaagacgagcggcctcaccgacatcctctccaacggcctcaggttcctgaaaggggcgccgacgctggtgatcgtgcctgtcgcctgcgttttcagcgggatcatgacagagttcacttctgacgactcaaccacgacgctggtgctgccgttgttcgctgaacttggcaaatccattgaggtgcaccctcccctgctcatggtttccggcgccatcggggcccagttgtcatacttgttgcccaccggatcgccgtcaaacgtcgtcggcttcagcaccggctacattaccatcaaggatctggtggccactgggttgcccctgaaaattgttgccattgcagctctgacagtcttactgccaacattaggatcaacgatttttggcatggacatcaagtcataggaacataaatatgaagtttttgagaatgtacagtagtttctgtttctgtatctcatgcctgaactattgttgaggggtcagatggcatggtttgtataagagtaaccatagggatttctcagccgttctgtattactgtatctgagacgtgccccgggagatcagatttcttgtcaagacagaagcaaggaagacaagcagacaatagaagaatgatcaaaatgaaacgtattcaaacaatccatatccttcagatgagcgtacaatatgcaggtcttatcctctagaggtgctatagcttattgttcttcacaaaatatgtaaagttaaaagagtgtcggcatatatattaaattgaacagaatatgtggtacaagaaagctgaaaaactgatattgtcaaaaaaaaaaaaaaaaaattaaaaaaaaaaaaaaaaaaactcgaggggg

SEQ ID NO: 24961 - DNA, 1667 bp, Oryza sativa
  Clone ID: PAT_MRT4530_29896C.1
cgatccatcagttcatcggcatggacaagaacggcagcagctacggcgagagctcgtcggacgacgtggaggcgccgctgctgctgccggcggcgaggggcgggacgatggcgaagggtgatcgtcgacgtccggcgtcgtcggcggcggcggcgtgggtgcgcgctctgctcgcgcacaagtacccggcgatcgcggcggggccggcggcgtgcgcggcggtgtgcgccgccgtggacctcggggacgggcacggcgaggcgcggaacatgctgggcgtgctggcgtgggtgttcctctggtgggtcaccggcgccgtgccgctcgcccgcgcgtccatggcgcccctggtcctcttcccgggcctggggatcttctccttcgacgacgtcgccagggcggacatgggcgacgtcatctccctcgtcctcggcagcttcatcctcgccctcgccgtcgaccaccaccgcatccaccgccgcctcgccctcaacgtgctgtccctcttctgcggcgatccggtgcggccgtcgctgctgctcctcggcgtcaccggcacgaccgcgctcgtcagcatgtggatccacaacacggcgtgcacggtcatgatgatgccggtggcgacggggatcctgcagaggttcccccgcggcgacatcgacgacggcggcgggcaggaggtgcggcgattctccaaagcggtggtgctcggcgtggtgtacgcgtcggcgatcggcggcatggcgacgctgaccggcaccggcgtgaacatcatcctggtggggatgtggtcgtcctacttcccggagcagaggcccatcaccttcagctcatggatgtccttcggcctccccatggcgatcatcctcttcctcgcgctctggctcaccctctgcctcatgtactgctccaacaacaccgccaaggccctctccgcctacctcgacagaagccatttgagacgagagctcagcttgttaggtccaatggcttttgcagagaagatggtcttggctgtgtttgggggcctagttgtgctgtggatgagtaggaacataacagacaacatccctggatggggagttcttttccacaataaagttggggatggcacagttactatcatgatggccacccttctgttcataatccccagcgggaagagggagggtgagaagctgatggactggaacaagtgcaagaagatccagtggaacatcatccttctcctcggcgcaggattcgccattgccgatggcttcaagacgagcggcctcaccgacatcctctccaacggcctcaggttcctgaaaggggcgccgacgctggtgatcgtgcctgtcgcctgcgttttcagcgggatcatgacagagttcacttctgacgactcaaccacgacgctggtgctgccattgttcgctgaacttgccaaatccattgaggtgcaccctgccttgctcatggtttccggcgcaatcggggcccagttgtcatacttgttgcccaccggatcgccgtcaaacgttgtcggcttcagcaccggctacattaccatcaaggatctggtggccactgggttgcccctgaaaattgttgccattgcagctctgacagtcttactgccaacattaggtaacattcctgcacagatcaacattaaggattag

SEQ ID NO: 24962 - DNA, 549 bp, Oryza sativa
  Clone ID: PAT_MRT4530_29897C.1
atgaggcgcctcttgccattgctcggcgttctcgtcctactctgcgcggcgagcctcgtggacctcacggaaggagccggaggcggaggcggaggcggaggcggaggaggacgtggcggcggagggcctgccggcggagtcggagtatttgacggggaagtggacagcagcaacccgcggggcctcagcggcgttgcaagccctagcctaatcagtgcaaaaaattggaaaagagaggcaacctaccagggagaggctttacacatgagaaatttctccgattggggctgtcgggctgggtctctggcgagcggcgaggcaagggcgacctcccatggagaggcgacaggtcagacgagagcgaggagagagattggaagtcgaggtagggctgtcaacgagccgagctcgagcgagctcgcctgcctaggctcgagctcgattaaagctcgagccgagccgagctcaagccgagcctataaaatgttcgagctttcaaacaggttcggttcgagctcgatcaagctcgagctcgactaccgagcttga

SEQ ID NO: 24963 - DNA, 411 bp, Oryza sativa
  Clone ID: PAT_MRT4530_29898C.1
atggtgcgctgcggtggattgtgttatgcaaggggtattgtcacagctcctttccgagttatctccgagaatttccggaggagtgccgggtttgtcggcattcttccattggaattccggagaagcaccggagatgttggccttcttcttgcttatacctcgacggaagcttcttttataaaaaagtgtggtaggtggcatgggggtgacaaccttgtccctcctctgtatcccacaacgttcaggtacatcatagagctcaaagctggactcatcctggtagaccaggggaagatatacacacatgttccctatgattcaatacccttggaatactctgaggttaagtgctacagtggtattcgtgcgcttgcggatttatctgtgaccatatcaaataccaacaattag

SEQ ID NO: 24964 - DNA, 131 bp, Oryza sativa
  Clone ID: PAT_MRT4530_29899C.1
gctacggtctacgagctccccggtgcaacggcgtctgctccggcctgacgtcgctgtcggcctcactggccggacgcgtgtcgatcactaaaagctccggcaaatacaaggccgagacgatgagacgataa

SEQ ID NO: 24965 - DNA, 3307 bp, Oryza sativa
  unsure (1)..(3307): unsure at all n locations
  Clone ID: PAT_MRT4530_2989C.1
gtccctcgccaagaccggccatgtcgccgtctccgagcagctcgtcgaggagctccagcccaggctcccgctctcgctccgccactacaccgcgctgctctacgggtggtgccgcatgggcaagctcgacgaggccaagcacgtgccttcgtcgctgccgattggtttcatcgcctccacggttggtgtgcgccgctgccgttgcnnnnnnnnnnnnnnnnnnnnnnnccggcctgcctccgtcgccgccgactggtgtcctcgcctatacggtcggttggtcacaccaccgttgatgggcatcgtcatctacaccgccggcctacctccgtcgccgccgactggtgtccccgcctatacggtcggttggtcacaccaccgttgatgggcatcgtcatctacaccgccggcctgcctccgtcgccgccgactggtgtccccgcctatacggtcggttggtcacaccaccgttcatgggcgtccacgtcttcaccgaccggctggccttcgccgactggtgtttccgcctgcacggctggcctattatgccgccgctgttgggcgtctacgacttcaccaccggcctgcctccgtcgccgccgactggtgtcctcgcctatacggttggttggtcataccaccgttcatgggcgtccacgtcttcgccgaccggctggccttcgccgccgccgactggtgtttctgcctacacggctagcctattatgccgccgctgttgggcgtctacgacttcaccgccggcctgcctccgtcgccgccgactggtgtccccgcctatacggtcggttggtcacaccaccgttgatgggcatcgtcaacttcaccgccggcctgcctccgtcgccgccgattggtgcctccgcctacacggctggcctattatgccgccgctgttgggcgtctacgacttcaccgccggcctgcctccgtcgccgccgagtggtgcctccgcctacacggctggcctattatgccgccgctgttgggcgtctacgacttcaccgccggcctgcctccgtcgccgccgagtggtgcctccgcctacacggctggcctattatgccgccgctgttgggcgtctacgacttcaccgccggcctgcctccgtcgccgccgagtggtgcctccgcctacacggctggcctattatgccgccgttgttggacgtctacgtcctcaccgccggcctgcctccgtcgccgccgagtggtgcctccgcctacacggctggcctattatgccgccgttgttggacgtcttcgctttcaccgtcgaccgccttcgtcgccgccgactggtgtcttcattgttattgatggacgactttgttcccacattggccacttctgccatcaccaaggggaatattataaagctaaatttttccttttcctctgcctcactacaccaattggtcttccattgagtagtgagtcgggggctacagatgttatatcatatttttcataatatttatcttgattgcttgcgacataatctgagtacaaaagtacctatcgagttatggagttctatcttcctatgctttccgtttggtttgccaatggatggttgcctttgggccgattcctagcacccgggggctcgttggatggaccgagtaacgcaaggtgctaagtattattcggaataaatcaaaagcatagagatgagataaatttattttctgctcttaataattgcaaaagtacccgagtagaaaattctgatccgtgaaactttgttccattaatgacgaactcatgtcactcatatgcatgtttgggaagtgcctaggccgactcccggtgcttgatggttatgactagtcggacagagtgtttaaacgtacagagtcatctgctcggggaaatcaaaattgacaagaggagaaatacatatttataaatattttaaaatacttgattttttctcgagtattatatttatatcagatactactcatcctatatgtttgttctgcaggatccagatccagatatgcataaaagggattcatggctttaagcttatctcttacgctccaggaatggatcagtcagaacgtcaccaccggctcgcctcgaccgccgccgactggtgtttccgcctgcacggctggcctattatgctgccgttgttgggcgtctacgtcttcaccgaccggccgcctcgtccgctgccgactggtgtttccgcctgcacggctggcctttatgccgccgttgttgggtgtatacgtcttcaccgaccggccgcctcgaccgccgccgactggtgtttccgcctgcacggctggcctttatgctgccgttgttgggcgtctacgtcttcaccgaccggccgcctcgtcgctgccgactggtgtttccgcctgcacggctggcctttatgctgccgttgttgggcgtctacgtcttcaccgaccggccgcctcgtccgctgccgactggtgtttccgcctgcacggctggcctttatgccgccgttgttgggcgtctacgtcttcaccgaccggccgcctcgaccgccgccgactggtgtttccgcctgcacggctggccctattatgctgccgttattgggcgtctacgtcttcaccgaccggccgccgcatccgccgctgactggtgtcaccgcctgcacggctggcctgttataacgccaactgatgctatcttcttcacggctggctacatcgctgtcactactaataggcatcagtatcttcaacacaagctgcctacgtttgtcatggctgccgactggtttcttcacttccatggctgcatgattctgccagtgttgattggccttaccatcttcatcgctggtcgtctcgtctgctgctgactagtgccctcgcctctacgtctggtttatacagctaccactactgatggacatcatcatcttccgtcgccgactgattatgccgccgccgactggtgcttttatcttcacaactgcgcgtcttcactaccggttcacttcattacggcaatacaactttgtcatcatggtggagcgacttcatctttattatcttcggcaccggcaaactctattgttgctacttcgcaagttttactacttcaccacccacgacgtctttgtgaacctcgacatctcggcatgcaatgccatgttattttactacaacaagtggctctccaatattcaggatttctacttggacatcttcaacacatatcttcaatcaagtgatgactactcgacaacaagaagctataattctcgactctatgttcagttgtttcccaac

SEQ ID NO: 24966 - DNA, 378 bp, Oryza sativa
  Clone ID: PAT_MRT4530_298C.1
atgcattcctgctgcgtgcagccgggcaggcagcaggcagccggcacggccacgtactctcgcagctgcagggcagggggcctcctcctctgcgacgacgtctgcgtgcacggtcagaggccagcgcccgacacgcgcacggccgttgtcgtggttgtcgtcgatgtgatcgtgcacatagccgcgcgccggccaggcccaggaggaccagcagcacgcacggaggacgcgcggtgcgtgtgggaggccggtacaaaagaagggggagaaaatgctgggacgcagcagtgcatgcagcgcaggcgcagcgggtgccagtgcaatgcatacccgggattgtggaagagcctgcccctgccttgtgtggtccatggatag

SEQ ID NO: 24967 - DNA, 2042 bp, Oryza sativa
  Clone ID: PAT_MRT4530_29900C.1
tttttttttttttttttgttgctctctttttttccgccacctccgaggccaattattttggctgacttaactcagtaaataactgatacaaattaactgtcaatatacatatatgtgatatgggatatcaactttaatttcctacatacaccagccgagcaactgacggaatattgacactaccgcgcaagcttttctgcttctgatgataaatcaaagcacggtagtatgagcaaagtgttcactgacttgctagattttacatatacatatcaaagggggcatcaacttttgcaaggtctccttcttgaactgaagcttcttaatttgcagatccagaagcttaattaattatactatagctagctacctctcactcccatagcatcaagagcaatcaaccttacaggtaattttttttcttaccagagaatgactgctcatgatgttatgacgacgttactcctgcacccaatgcacactctgttctccattcttaagagacctatttcgtctgtagcctcctcatgcatcaacatatagtactcgctgtgccgccacgctttgtatgcacgaatctcaacgatgcattcctaccgtaggatcccgccgagcggcgccggggcccagtagtcagcggcattgtcccctccaaagtgcgacgtgcacgacactggaacgaggcacagcccccggctcctcaggtccttctttccatcgtcgtttgctccctgctgctcaggttgggctgcaggctgctgtgctccagtgttgccattatggtttagcaactggccagggtattccgggaagaggccagggttcctttctccaactggtccattttgcataggaccggtcccgttggcgtcgcccatgtaagggtagctcagagccttgccaaatggggatacaatctgatgaagtgcagttattctatcccctagcctctccttcctcacctttagagtagattgtgctgaagaggaggcctgaaccctagccttcttgagggccgaaccagtcgctgtgctgttacactctgatgaattatcggagttgtggtggtggctccggagctccggcggcgccgcggtgttggagaagtcgagcatgttgctgccgaggctggtggtgatgcatgacctaggagaggaagccatgagcatctggctcagctgagacttgttgctagcacctcctcctgctgctgctgcttggatctcatgctgatgatcaccagcaaggtggctcccatagaagctgtaagcagcagcagcagcagtggctgcagcttgagccatggagccctcctccttcatgccaccaaccatgcatgcactggctgcagctgcagcagcgtgatctccccaattctctaatccctttgacaggagagccgcagtggcgctgtacctctcctgatctcctgctaatcccccaagaagcagttggctccatgactccggcatgctgctctcatggccgccgccgccgccgtcgtgcaagctcggaagagaagcggcggcgccggcggcgccgttcatcggaactagacctggagagctgtgctgaaactgctgcgagaagatcaacgatggagaagacaaggagggcatgttaggagaggcctcttgatcctcatggcatggcttcaagctgcccatcaaactgccggcgccgccgccgccgccgacgccggtagccgtgcctgtactactgccgctccagatcatctgctgcaccagggagctctggaattctcctctattcatcactgctagtgacagagaggagagtattaaaggatatgtagaaacaaagatgatgagttcttgcttgcttcaagctaagctagctgtgggaaaggaatgtgtgttttgctagcttagctttggcctctctttgcatgcacacaacttgtgtactggaaatctcaggtcaatcttaaaggggccagtggcttaattttctctttgaggagagagagaggacagctgcaacaacaagccgcgtgccgagttcctgcagaggagagacct

SEQ ID NO: 24968 - DNA, 475 bp, Oryza sativa
  Clone ID: PAT_MRT4530_29901C.1
agttggaagtagaagagcatgctaaatcttctgcttagaacttcataattaccaaattcaaagccaagcttacttttattaaatctaatactctttcacatgctggaatacaacaagaaaatactaagaaaggtatctgctggaggccctgggaagatatttgtaaaccaattgctcaaggaggtcttggtatcaaagatatcataaatgttaatcaaagcctcttctgatccaatccgcttggagaattatacaaaatcctaatgatttagtttccctaattataatggcaaaattctttcaaaatacctccttttggaaagccaagactaatatccctaaatctattttttggtcctccattttaaaagtctctcaattatggaacaataataaacattgggatccaacaaaagttaatccgatctttgatcatcaagctactcaagtgaggacgtgtttagtttctctcctt

SEQ ID NO: 24969 - DNA, 2285 bp, Oryza sativa
  Clone ID: PAT_MRT4530_29902C.1
ggtggtggcgggagtgggcggcgggcaagcggatccgccacccccgcccttgggggtgacggcgacgcgcggatccaccgcccttgaccttaggagtggcggcggcgggcagtggcggcggcagcgggcagatccgctaccaacgccctcacgggcgacggagacgcgcagatccaccgcccccgacctcgggaacagcaatggcggtgggagtgagcagcgacggcgggcggcggattcggtggcgggtcgctgggtggcggatccgtcagccgtggatccggccggctggcgatggcgatgacggaagcgatggcgacggcggcggggctaccttaggagctcattggctaggagaggggtcacccgtccatgagaggcggcagcagcgatggggggttgtcaatgagggggctccggtcttccgtgacggtggaggggaagaggagggaggtgagggaggctgtgagcttgagcttgccgaccagccacgggaaggcggcggtagcagtggccagtgggcggtcgaagaggatggggtcgcgggagcgggggaggcagcccgacgccagcaggagaagaggtggctggcgcggccggcgggagagggaggagagggggccggccgcgccggcgagagagggggagagaggcggccatgagatggctggatgggggcaagggcagcaaagtgagtgatggtggtgggcgccgccgctgccatggcggagaggaggcgggatggggacggtagcagctaagcaaggtgaacggtggtggtggctgccgtcgctgccatggcggcaaggaggcgggatgcctggtacggtgcttccgcgtagagtgcggcaagctcaaggcgcggggggcggcggcaagccaccggtggagggagtaagcggcggcggcgacagcgacggcacccgcggcggcggcggcggcttagagggtgtcaagggcgccgagccggtcgagcaggcggcggggagctccggctcggcggcggacgcggccaagaggagcctggagatgaccaaagagacggtggagcaggcggcggcgtccgcggcgagagcggcggggaacgccgtggggaaggccagcgacaaggtgaagggagctgcctcgccggcgaaacgggcaccctccgacgcggagctggcgccagcggcggtgcctctgattcgggatgctgcttcggtgcagaggacagaggcggcgctctcgtcaggagggtgacggcgggggcggtggtcttcggcggccacgagaactccgtccgcttgtgctgtgccactggtgttggtggcagcggcggcggcggcggcggtggcgttggtcgctctgactctgggagggtgatggcttcgcctctcccgatgagtcccctcttcgggttgaaaccgggcggcggtccggctaaggagacggtcggggtggctctcggcggcggcgcgaagtaaggagggcttggaggaggtcgacaaatgactcctggaactggaagtggcggcggcggccggaggaggaaaggaaagcctgccggaagacctgggatcgcgccgccgcctcgaggtggaccgactcctggaagtgacggcggcgggaagggataaaaggctcccggatgacctgggatcatggcgggggtggcgctgccgcctcgcggtgcaccggctcctggggatggcagtggtggcggaaatcctctcggtgtcggcggcggcggcggctgggcgtggaatggaagcggagcgggaagaggagagaagaggaggaagcgaaggaagggggaggcggtggaggaggtggaggtgggcggagacggggttaagtacgcggcggcacgtcggtttgctcaccacggcttgcttcccgtttgaaatttggaggtgcgggcctgggagggggactttggggcaatcctatggtgcgctttctggctgttttactgcgtgtgttcatgattgcaaacctgaaatgtgttcatgattgcaaacctgaaattgtgatgtggagtgcgattctgagcaaacaggaggacacgttgcgcaaaacaccctcatcggctcagccttcttcgcccacttttttttttcctcgaagaaattctgccagtgttaattaactagcctctgttctatgatgtatggattgaactgaatatttgtatcctgtgaatctgatgtacatatttccactgtactatatacagtagtgtgatccgtcctgttagaatcgacggaaataaaaaatgttcaggcagagttgcagttgccgccgtc

SEQ ID NO: 24970 - DNA, 649 bp, Oryza sativa
  unsure (1)..(649): unsure at all n locations
  Clone ID: PAT_MRT4530_29903C.1
tttttttttttttttttttttttttttttttttttttttttttttttttttttttttttttttnaccnnctgnttcccttgctttgttttgttgataccatgtgttcaaaagaacacctttctgttttaaaagaattgggtatacaatagtacaacattgcaaacatatccgaagaccttcacagatcatcgttctataacacaattttaatctctctctctctcaagaaaaaaaaaggagattcacatttctcccaataataaagaataaactaattccctgcacagagctcgccaacttgttagcctagaatgcgcttctctgattgcacattcaaattacttagtcaattgccaactacacagttcaccattcaagaatatgattgaatgtgagaaactggcattctgaatttctcatggagaaggtccttgctatggatggtgtcgatcaaatattgatttgttttgtcagttgagtggcatgtgcaagctgcacgtcattgtgtcacagctgcgactgatcacatgccacatttcagcaagtagggaaagatccctcccctctgtggtcttcactcttccatgattcaacatgctccttggagaacggtctagcaaaatctcaagctcctcagcacttggcatg

SEQ ID NO: 24971 - DNA, 628 bp, Oryza sativa
  Clone ID: PAT_MRT4530_29904C.1
atggccagctccgtcggcgacagcaccgctgcagctaacggcggcggcggcgcagcagcatcagcggcgccaccggaggctgcggggaaggggagcgccaccatatccgtcaccgtcgtcctcctcgtgctgctggtggcctccgtcgcggcgttcctgatgtcgccgcagccgggcggcggcaagccaccggtggagggagtaagcggcggcggcgacagcgacggcacccgcggcggcggcggcggcttagagggtgtcaagggcgccgagccggtcgagcaggcggtgggccccggcgccgccgccatccccggattcaacagccggctcgacgcgttccgcgcgtgggccaagctcacctggatgaagctccggcggccacactccggcgagccccggaggtatgatgacgacgcggggagctccggctcggcggcggacgcggccaagaggagcctggagatgaccaaagagacggtggagcaggcggcggcgtccgcggcgagagcggcggggaacgccgtggggaaggccagcgacaaggtgaagggagctgcctcgccggcgaaacgggcaccctccgacgcggagctctgagcacacaggaagacacgttgcgcaaaac

SEQ ID NO: 24972 - DNA, 567 bp, Oryza sativa
  Clone ID: PAT_MRT4530_29905C.1
atgggagccgccgccgctgcaacgggagccaccgaccacacgcgcgcctcgccgccgctgccgcaccgggagccatcatcgacgtcgccgaccacgcgcgcgcctcgccgccgccaccctcccccagcctccctccgtccggatcggggaggggaagggaggggaggggagccacccacgtcgccgtccacgccgccgctgccctcccccggcctccctccggccggatctgggaggggaggggaggggagctactgccgccgcaccgggagccaccgatgtcgccgtccacgccaccaccgcgtccgcgcactccgccgctgcgcgctctaccgccgccgcgtccgtgccgccggtggagggagggaggggaggggaggggagaagccggcggaccacataaggcagttatttgactccaagccgccagcgtgccagcgcgccgccgtgccgcctcgcccggccctctgtgtgccgcgccgccgcaccggccggcagccgccgcgcgctgcccgccgcgtccccggccgccgccgcgaggccgccagccgccagcgcgccgcctag

SEQ ID NO: 24973 - DNA, 385 bp, Oryza sativa
  Clone ID: PAT_MRT4530_29906C.1
gtggggttcttttttttttttttttttttttttagaatcaacctctagcacgtttctttataaattaaaggctgggctgcccccccaaaaaggggataactctggggccctccttttaaagaaaaacttcaactattgaaccatttcgggggcacaaactggccaaaccatctggattccccccaccctggcaaaaaacaaagggttccaaggggacctaccaatcacttttttcccgggctctggtccataattggggggggtctcaaccctatctccgggctagtataaggtaacccatgcttttaagcacccggcccccgggtatacgggcggacactttcaagctagaccaacctcaccccccccaaacaatttcctttta

SEQ ID NO: 24974 - DNA, 1594 bp, Oryza sativa
  Clone ID: PAT_MRT4530_29907C.1
atggcaagactgctctcgcccctcaacgtacgacagaatttgccaccaatttcagtttataccgacgatgcggttctgtttttccgccctacagctgaagaagctcgagtcatcaagggtatcctggagttgttcggggctgccacaggtctcaaaaccaatttctccaaaagcgcaatcactccaatccaatgtgacgagcagcagtatgtgcaagttgaatccattctctcctgccgagtggaaaagttcccaatcacttatctcggactccctctctccactaggaaaccgacgaaggccgagatccagccgatccttgataggctggcaaagaaggtagccggttggaagccgaaaatgctgtctattgatgggcgactgtgcttgatcaagtcggtcctaatggcgttgccggtgcattacatgacagtcctgcagctaccgcgatgggcgattaaggacatcgagcggaagtgccgcgggtttctttggaaaaggacaggaagagatcagcggcgggcattgcctagtctcgtggcgaaagctctccggttgaaatggcttgcgaaatccttggagcagaaggatagaccctggaccttagcagctttccgtcctggaagcgatgtggaagagatctttcgatccgtcgctgagcacatcattggtgatggggtggacacacagttttggacagacaattggacagggaaaggttgcttcgcctggaggtggccggtgttgttttcccatgtgagccgtgccaagctgacagtagctgatgccctgattgctaacagatggattcgccgattacaaggtgccctgtccaatgaagctctgggtgaattcttccaactttgggatgaagttcgcgacgtgtcactgcagcagatggctgacacgatcaaatggaagttgactgctgatggtaatttctcagtggcctcggcgtatgatctatttttcatagcgacagaggactgttcctacggggacacgctgtggcactccagggtgtcgtcgcgtgttcgcttcttcatgtggattgcactgaagggccgctgtctcacggcggacaacctggcgaagagaaactggccgcatgacgccatttgctccctatgccaacgcgagaacgaagactgccatcatttgcttgtgtcctgtgattatacggcggctttggcgcaagctgagacgttggtgcaacattaacattgcaatcactgcggaagatgtcaggccgcttgcagattggtggatcgcgacaagacggcgttttcagaacacatacaggacggatttcgatagtctgttcatgctaatttgttggcttatctggaaagagcgaaatacaaggatctttcaacacatcgccaagttggttgaccggctagcgaatgacatcaacgaggaaatcgcaatttggagggtagcagggattttttcccaggctagcatggacaaacagaaatcctctacagatcacagcacacaaaaaaccctagcaaacgaacaatatcccttccgagatccaacgaattttcatctaaccaacaccaagactagacagttgatatacatggca

SEQ ID NO: 24975 - DNA, 620 bp, Oryza sativa
  Clone ID: PAT_MRT4530_29908C.1
atacgagagttgctttatgaaaatcatattgatcttttgtttttctaaaaaataatacttaattaatcatgcaataatggatcgctctattttacgtgtagggcgtgtgcaggtcgtgagctgagatgctactacaaggccaacgtggacggcttcagcgcgacggacttccactgtcattggccgcacggccaccgccgctgccaccggcggggtcatgttcggtgggttcagcctacaggggtaccgaagcacggacgactactacgacacgctcgacgccttcctcttctactggccggacacggacacggacgccgcagcgacggcggtggtggtgctgccaaaggtgggcgggagcgggcgacgctgttcaattacgcgcgggccgcagttcggcgccgatgggctgctcattgggccgccgctgaccgccgtgatgtggatgttcacggggcccgactccagcgccggtgccggtgacctccgtagcacgcggtcgcgtttcaggctgtcgtacgcgaagcggaaatattcctacccctctacttttggggagaaacgaaggaaaaaaacagtccaagttattggagtgtataaagtgaattgcccgcctttcc

SEQ ID NO: 24976 - DNA, 1296 bp, Oryza sativa
  Clone ID: PAT_MRT4530_29909C.1
ctacttccttattattctctctctcattctttctctctttagcccgagggagcgccggtgaccggcgcagcgaggcgcgcgccagtgcgggcacctcggttggggcggcgttgcgcaggcaccttggtccaccggaacgtcgccgagttgtagatgaagacggtggagcacttcgtgtacgacagcccgaaacgcgaccgcgtgctgcggaggtcgccgacgccggtgctggagtcgggccccgtgaacacccccatcacggcgatcagcggcggcccgatgagcagcccgtcgacgccgaactgcggcccgcgcgtagtcgaacagcgccgccccgctcccgcccacctttggcagcaccaccgccgccgtcgctgcggcgtccgtgtccgtgtccggccagtagaagaggaaggcgtcgagcgtgtcgtagtagtcgtccgtgcttcggtacccctgtgggctgaacctgccgaacatgacggcatgaccccgccggcggcagcggcggtggtcgtgcaaccaatgatggtggaagtccgttgcgctgaagccgtccacgttggccttgtaacagcatctcagctcgcgactgatcagtaattgagcaggaattaaatcatcatcaagaacaagatgattttggttttgcctctgaggtgggtgttggcgacgagggacatggggaacggcggtgcgacgtcgtggaactagaactccggtggcggcggcgcgcttctgccgcagttgaagaggctgcgcagggtgacgaatctcgccgccggccagtagctgcaggttggactcgaactcagagaagccaccagcgatgtggggcccacgtttggattcctttgagccaagggcaaacttgtcaagagcaaaagcggcagcatcgaaggtatcagagagcccggttcctgtcttgaaggtgaccttatccggcgaggcatcggtgatgtagacctcaacaacgctgagccagagcagcagctccttggtcttcactccggtgatcttcttcagcttccctttctcagtgaatgccgtgacctcgttggcataggagacggtctgcttgatcttcttgaacgtgtgctcaattttcttcttcttctgcaccaaccacatgaacccagtccccctgttgtacccgaactcctcgatgtcctccaatggcaggaggcccttggggagaccaagttcttccagcagctcaatggacttcttcctgcagatggcatctccattgacgatctccgcaccagagcggtggctctcgatttgtgatgccat

SEQ ID NO: 24977 - DNA, 296 bp, Oryza sativa
  Clone ID: PAT_MRT4530_2990C.1
ttttgttttacaatcaaatctggctcattgaattcgttttgggtacaaactatcagaaggcccctgccatacatgctttgtcaaaacattggaaggatcccaccacccaaggataactgctggaacaaaagatgaggtagtagccatcccaatttccggtggggcaaacaagcggacaaccagccaaaattttcactattccaaaagccacagggtgagaaaaacaccgacctaacaaacaagctaaaggggggcaaagacttcctctcttggccttcctggatgggatatgagac

SEQ ID NO: 24978 - DNA, 154 bp, Oryza sativa
  Clone ID: PAT_MRT4530_29910C.1
cggacgaggctacaccggcggtccggggcgcatcagcttcgcctcgaccgggcgcgccgcagccgagggcagcacctccgctgcccatgggctccgggtctaggtctgccggcgcggccgtccacacaggccacagcagctccgtgtcaacact

SEQ ID NO: 24979 - DNA, 444 bp, Oryza sativa
  Clone ID: PAT_MRT4530_29911C.1
catgcacccctcctacagacagggagcctcctgagcaggccgccctccttttttttttgtttttaacactttgggtttccccgcctctatttcatttcattccgatagatagcatcatgcagttcaaacaccatggccaaagcgggcttaattcactggaacatcacggaccaatttcagctcccactgggtggatggatacagggcccctcgactttaaagacccactggacacgataacgacttgggggtcttaaacggggggaaaaacacgcttttttaggcccccataggggggattgcccccacgaaaaaaagcccacagtccccgccccccaaaagggcgtaccaaatggcaaaaaaaaaaaaaaaaaagggggatccaatgaccccccctcggaatccccccccgggggcaccggatatataatcacttgacccgtc

SEQ ID NO: 24980 - DNA, 231 bp, Oryza sativa
  Clone ID: PAT_MRT4530_29912C.1
ttgtttcgcgcagatccagtccgtggcggggggggttttgcggatcagttgcgcggtggctgcgactacgtggttgcggcccgatgtgacggcggcggtgcggatccagtccgtggtggcagcggcggcgcggatcatgtccgcggcggtagcgactatgtggttgtggcccgacgtgactgctgtggttcggacgcggaccgtggcgacggcggcagacacggtatccag

SEQ ID NO: 24981 - DNA, 498 bp, Oryza sativa
  Clone ID: PAT_MRT4530_29913C.1
gaccacgacccctgccaccgcgtgggccaggtcccatgccaggaggtgggcccatgggtgggccggggatcatcaggccaggtgggccacgtgggccacggccttgccccatgcggccgggcccacctgggccgaccattgggccatatggcatcatgccaggggggccacgtgggccagggccgccaggcatgcctgggtagaacatgtggccgggggcacctgggaagggcatgcctgccatggggcccatggggccggggccgcgcccaccctgggccaaggccatgcgctgctggttgagctgctgggccagctgaacacggcggacctccttgcgctgtgcgagtgcgacatagagaggcttgcccttgagcatcttgccgttcatctcggtcacagcgcgggtggcctcttcgtggctggtatagcacacaaagccaaagcccttagacttggccttctcatcggacatcacctttggctgaggtgattgag

SEQ ID NO: 24982 - DNA, 762 bp, Oryza sativa
  Clone ID: PAT_MRT4530_29914C.1
atggccgcgctcttcttcgtccttctgatcccgctcatcctgctcgccggcggagggcaagtcgccgtggagtcggcggcgacgagtaggggcaagctgatcatggtcgacctgctggagtacgggagcggcgcggggacgctggccatgagggtcgacaccatccacgccgccggcttcgccaaccggagcggccactggcacgcgctgcggggcaacgggcacctgttcgacgccctcgggctcgccgcggcccgcctcccgttcgggaacacctacgccgacctcgtcggcggcgtcgccaacctgcgcggcctgcccatctcgatgcccttcacgaaccgcgccgccacggtgctctccggctacgacccggccaccgccgccgccggcggcgacggcgaggcggcgctgaagcgggcgctggcgacgctcacggtggcgatcggcgaggcgcagcggctccggccggtcatggacaccctcctgttcggcgggctgggggcccgcgtcgccgacgagcacctgccgtacatcgagcactgggacgccatgtgggaggagctgacgcggtggaggaggagcggcggcggcgcgtggggggggccgttcaccggcgtgctgagggagcgcgccaacatcggcagcgcggaggacgcgctcgccgtcatcggggtggcgttccgggatcacctgctgcgcggcgccaccatgcccgacctgagcccccgttcgatgggatactctgatggagatctctag

SEQ ID NO: 24983 - DNA, 1136 bp, Oryza sativa
  Clone ID: PAT_MRT4530_29915C.1
gtcagatcacatcaccacagtgtgggtgtaattaaggttgggaaacgagtaattagcttaggttaattaggattcgatccatcgatacgatggcgttgagaagaatgggcatcattcttgtgctcttggccattgctactctgctctcgccggcagtgtccgcacggttcatctctctgcccaccgaccatcttccaatcactacgccgcccctcgccgacggcctcggcttcgacctctacagcgactcgtgcccgcagctggagaccaccgtgcgctccgccgtgcaggcggcgctccagcaggagatcgccctcgccgccggcctcctccgcatcttcttccacgactgcttcccccagggctgcgacgcgtcgctgcttctgacgggagccaacagcgagcagcagctgccgcccaacctgactctgcaaccacgggcgctgcagctcatcgaggacatccgcgcccaggtgcacgccgcatgcggccccaccgtctcctgcgccgacatcaccgccctcgccacccgcgacgccatcgtcgcctccggtggtctgccctacgacgtgccgctcggccgcctcgacagcttcgcgccggctcccagcgacgccgtcttccagctcccgcagcccacctccgacgtctccacgctgctcagcgccttccagacccgcaacctcgacaacgtcgacctcgtcgcgctctccggcggccactccatcggcagggcgcgatgcagctccttctccaaccgcttccgcgaggacgacgacttcgccaggaggctcgccgccaactgctctaacgacggcagccgcctgcaggagctcgatgtcaccaccccggacgtgttcgacaacaagtactacagcaacctggtggccggtcagggggtgttcacctccgaccaggggctcaccggcgactggcgcaccagctgggtggtcaatggcttcgccggcaaccactggtggttctacggccagttcggcagctccatggtgaagctgggacagctccagggtccttcagggaacgtcggcgagatccgccgcaacagctgcttcgtgcccaacagccagaccatccttgcggccgccggcgacgatggcttcacggcatctgcttga

SEQ ID NO: 24984 - DNA, 152 bp, Oryza sativa
  Clone ID: PAT_MRT4530_29916C.1
gtattgtgtttcttgatgaagacttgacaccttagaagtgaggggccaagaacatgtcccacctaccctatggcaggccacctttgttggacaaagatgccacctgaggctgatgcccctctctggtttggtgcctctttcgcggggggggg

SEQ ID NO: 24985 - DNA, 1616 bp, Oryza sativa
  Clone ID: PAT_MRT4530_29917C.1
ccggccgggagtagtcgagtccatccatcgtcttgctcgcaactcgatcgcacaaggagcaagcaaatcgcgattcgatctgactcatcatccaccgaggtgccttgcttccgcttctcggatcgccctcgctcgcagtcgcaccatcaatcctttacttgagacgaggttcgtttgggcttgccctatccctccctcctctctctagacgcttgattcgctcggtgtagattcatcagatagattactaggacaagggcaccgggagatgagatgatcacgcggtcagatggatagataaagatgagatggggctcaaggtggaggacgacccgccgtcctcaggctcagttgcagatgcagatgatagcaccgacagactttgccgagtctgtcactgtgtcgagcctgatctcagaggacactccgcccttgctttcttaggcattctaccgccgccttcttctccagatgaagatgcagatgatgttgctaccgccaccgccaccaacaacaatgtcctcgagttcgtaagcccccgcggcgagatttttgtctgcaccgccgccaccaccgacctggaatcaggccctctgcatcaccaccaccatctcatggatctaggatgctcctgcaagaacgaccttgctcttgcgcattacgcctgcgcactcaagtggttcatcacccatggttctactgtatgcgagatttgcggacatgtcgctgtaaatgtaaggcctgcggatttcaataaggtccttgcctccttgaaggaatatgaagctctcagggaaaggacttccactggagacctctcttacttgcattatggggcagatgcaggtgacggaccagacgcggtcgccgggagacggggacagggcgacaccgagatgccgccgtggctcaacccaccaacaggacgcgtcgccatttctcagggccaaacccgaaacaaacacctgctagtccaagtaataattctatacaccatggtgctgtggtaacaacagtagtacacacaagatggagtttggagggtactggagtgtttcttgccattggcctaggtgttattgttcttgcatggttagttgctccacatgttggtaagaaagctgctgtgatttgtcttcacatgcttcttggaggtttatgtgcgttgactataataatctccctgagatttgttttcccaaggatccaatatggatctatgcgatgttgggcgatcttgtttgtgttttggttcctggtttttggagtttgggcatcacggacccacagtatacgctcctcatgaggatggagatcatggtgagaaagtaggtttcggtcttatactatccacatccgctgtgcagtgatagatatggcatctttgtgtatacccatctctatatatattgcttctgaatttttcgaattaaatatgtcagatgtatatgcatgaccacaagaaaaaggaaaagtttgttattggtgttacagtagactgctagtattaatttgatatacatctagactaccatatagccttaaaactgataaattatgcttcaagaaaaagttaaacagataaaatgggaatacaaggtctgaaaatattttct

SEQ ID NO: 24986 - DNA, 320 bp, Oryza sativa
  unsure (1)..(320): unsure at all n locations
  Clone ID: PAT_MRT4530_29918C.1
ggtgtttttatcctattttgtgtttgggtcttttgtttgtanggagtgtgtttggccggtcggcccctaaaacctgtnttagttatcttttatgtaataatttctntaaaaacttgggtatatgtntngaaagctgttntgtatatcnatctatgcgcgatcgaaatcctaancggtcccgggtggtttngggatactatactcaaaccgggtatccccccaactgtagnctgtnttntnccctaaagaaatagaaanaaaatcaaattttatgtntgatcccaaaaaaaaaaaaaaaaaaaaaaaaaaaaaaaaaaaaa

SEQ ID NO: 24987 - DNA, 230 bp, Oryza sativa
  Clone ID: PAT_MRT4530_29919C.1
ggattgagaaactgatgaaactgacatagatgcaagggtatcggcgcaggcgcataggcttcagctatacacacctacatatactaaagctcataggatgcaccatagcaaccatacgaacctgacacatcagcggactggagactggagaaacgaacagcaccacaacagaaggagcatgacactggaacaatataaagcgagttcacgggctcgggacaatgcacaca

SEQ ID NO: 24988 - DNA, 2251 bp, Oryza sativa
  Clone ID: PAT_MRT4530_2991C.1
ggatccccgggctgcaggaattcggcacgaggttaatggcttcctcctcctcttcatcttcctctcctccttcctctttctttcgagtagaattctagaagaaggagaaagaaatcgaaaggcagcagctgatggttgcatgctgtgcgtcgctctcatgctcaaaaggtcaacagagttgagtccctcagctaaggcaggcaagcacgagagtcacagatacatatcccctttaatctcctctcccaccaatcctttgatccattcatcccaacttcttccatagtacaaatctcttgctcccctccctctcatctcctatctgtatctatttctatctctctatctcgtatctccttgaagaagaacagagagaggattgggaggagtagtaggtagttgatttagttttgaggagccggagaggagagcaggtgtcctggttcgtgattcgatttcagctgttctgatcgcttcttgtggcttctgtgccgtgctggcctctcgttcttgagcctttgtcgattcgattcccgcgaaaaggaggcgcctttttgtgagttaggtgtggtgcttcttgggctctactacctccgaggtgaaggtgttgttgttggtggtggtggattttcgccatggggaattgctggggcgccaagatcagctcggagagcccttgccgcagcgcctcctccccttctggggggacatccaagtatgctagcaactccagtgtgtctgcagcctcggtgccgccaacaccacggagcgaggatgagatcctggaggcagcaaatgtcaaggcctttgccttcaatgagctgaggactgccaccagaaacttccggccagacagtgtgcttggtgagggaggctttggatcagtcttcaaagggtggatcgatgagaagacgctcgcaccaactaagccaggcacagggatggtcattgctgtaaagaagttgaatcaggaaggccaccagggtcacagggaatggctggctgaagtgaattatcttggacagttgtcacacccatatcttgtaaggctcgttgggtactgcgtcgaagatgagcagcgtcttcttgtttatgagttcatgccacgtggtagcttggaaaatcatcttttcaggaggagtacgcattttcagccgctctcctggaaccttcggatgaaaattgcccttggagcagcaaaagggctcgcatttctccacagtgacaaggttaaagtcatctaccgtgatttcaagacctctaatgtccttttggatgcggtacggagtcctcagaactattatcctttgtgttcacaagatagcttaactggtgatctgatagacagactgtattttcagaactatgatgcaaagctctctgattttgggctggcaaaggatggaccgactggtgacaagagccatgtctccacaagggtgatggggacttatggatatgctgcaccagaataccttgcaacaggccatctgaccaccaagagcgacgtctatagctttggagttgtgctgctagagatgctatcaggacgacgagcactggacaagaaccgcccaaccggggagcacaatctggtggagtgggctaggccatacctgatgagcaagcggcgcatcttccgcatcctggacgcccggttgggcgggcagtactcccttgccaaggcccagaaggctgcaacactggcacttcaatgcatctctgtggaggccaagaacaggcctaacatggagcaggttgttgctgtattagaacagctccaggattccaaggagacaggggcaaatcctcagctgcagaagaagtccagcagcaagaacgcaggcagcaatggatcgaaaccgtcatcgaaggggaagcccgcaaatgcgaggctggtttaagtgaacaatcatatatcatatgatcagatatagatctgttgagatgagtagtgtaggctcttagagggacctgtaaagaagaggagagttgtgaatccttggtgcttgcctgttttagttgtttttgcagcttctagtcagagtcttgtctgaagtaaaaagtatgtggtcgcctatatctgcatgcattcagttcagtgcattgtggattgtacagtttatatctagttctaatgctgcgaaatttttgttcgaggcaacagatgtgcccagatccagtttttcctgattgttaaatctacaagctgccccagatcatatttttgagttctaaaaaaaaaaaaaaa

SEQ ID NO: 24989 - DNA, 291 bp, Oryza sativa
  unsure (1)..(291): unsure at all n locations
  Clone ID: PAT_MRT4530_29920C.1
catccaccctgccaaactaccaacccccgcccggccaactttccaagggagaagcgcccccctttcgaagncgtgggccctccactctcttctggctttaattaaagtttatttaataccaggtattttaccttttaacttatgtatggaggtatgatataaaatgtgcgaaaataataattacgggggatctttattatatatatatgtacggtgtcgttcgaataaaagaagaaaataaatgagaaaattaattccattgtctgcatgtaaaaaaaaaaaaaaaaaaaa

SEQ ID NO: 24990 - DNA, 141 bp, Oryza sativa
  Clone ID: PAT_MRT4530_29921C.1
gttgatggtgctattaacgccctgaactccagtggcatatttgcaagtggccagcctatcagggtgtgcccttcaaagacgccgatcaggagcgtcgcgtcctactactccacatcagctaataccatgacatcgaactga

SEQ ID NO: 24991 - DNA, 187 bp, Oryza sativa
  Clone ID: PAT_MRT4530_29922C.1
aattaataaacaacactatattgaattgatctgggttagatcctgatcagggtgacacactaccatatcagatctgaccatatctctattacttgaacatacatagagaccgggcacaccaataccaacatctatacggggcccgtacaatcatatactgatgcacgtactcacacccccactatca

SEQ ID NO: 24992 - DNA, 407 bp, Oryza sativa
  Clone ID: PAT_MRT4530_29923C.1
cattggcaataaatataatatgctctgtcgctaacattctcctgttctatggcaatgaaactatatagttggaccactatgccattgcaaaatttgcttgaagttttgaaatggttccaagaacccaggctgaaaatgctgggcttagtgctctggagttaatatcttctgtttataccgagcatgctggttgaaacacgaaagctggtattgatttggaaggtgtttgcaaggatgtctcgatcatgaaaatatgggacctctatgttacaactttttgttctctaaaatactctgcagatgctgcatgtaccgttctgcgggttggccaggtaatcatggcaaagccagcaggagggccacggagagatgatcagccagggagatgaaccaatataagtgtgctg

SEQ ID NO: 24993 - DNA, 363 bp, Oryza sativa
  Clone ID: PAT_MRT4530_29924C.1
atggcctgcatgacggtgattagacagaggcagatggatggatggatgtgttcatctgatttcatggatgcattaggctggctgctggtgctggcgtggtgtgttagagccgacgaagccgggacgggaggggcagcgtgccggtccggtaggggcggcggcgccctcccctctgccagatccgacgggggcgggaggggaggcacggtggcaccggacggatttggagccatggcgcagtggcggccgacggcgggaggggaggcggtggcggcccgatgtcggtgccctccacctccgccggctcgagcgatgaccgccacctacgcctccacccgcgggctccaccgactccgcctctga

SEQ ID NO: 24994 - DNA, 548 bp, Oryza sativa
  unsure (1)..(548): unsure at all n locations
  Clone ID: PAT_MRT4530_29925C.1
gggctgcaggaattcggcacgagggagagagagagagaactagtctcgagttttttttttttttttttgatatagaatacacgtactggacgccgaggctggggattgattttcattataaagagaaaaaaaaaaggataaaattagaattcctgctcaggctgtgttcagcggatgcagactgggagaaatttccctcattcgccaaacacacacttcccaaactgcaagagcttatagcatactctctccgtccaaataaaaaaacgaatcaggattcgatgtgacatattctagtacaatgaatatgtacagagatatatctagatttgtagtactagaatacatcacatctagtgctaggttggttttttattggacggagggagtactctccgtaacaaacgttagttacttctattttgaactaaagagcaaggtaaacccggcatggagtncatcttccccaaccccacaatcagcatttttccagatgagattttctccgagaaacaattcgattcccagcaacaatacggagtactata

SEQ ID NO: 24995 - DNA, 233 bp, Oryza sativa
  Clone ID: PAT_MRT4530_29926C.1
gcaggcacgcgtgcaggtgccggtccggtatagagcggtcgacctacgcgttcgtctaactgaaagcctatctttaatcgacttgtagaacttatagatcatgggtcctatgcctgctgcaatgcttccgcacatcgcgctgggtgcggatagctttgcaagagtgcataggaactcatgatctgcaaagaacacatgcaagacaaaactgaggtcatgaaaaaaaaagacac

SEQ ID NO: 24996 - DNA, 211 bp, Oryza sativa
  Clone ID: PAT_MRT4530_29927C.1
ccggagaggccgggcagcttctcaccgggggggttccctaaggacaggcggggccgcaacctctctctccgagcaatgaggatcagcctgcctgcgcccgttgtgcgcggccaggatgccgccgacgatggtcatagctgcgatcccaatgcctcgctccagctggggctacggtgctgacgcctagtagtctggccacgccgaggaggcc

SEQ ID NO: 24997 - DNA, 677 bp, Oryza sativa
  Clone ID: PAT_MRT4530_29928C.1
tgctggtagaggagaaggcgaagccaagccaagcgaagccaagcaaagggaagcgaagcggagaaaagcttgtcttgtagagaggaggggtctctcgtcgtctcgcgtcggaattctcgcgttgtggccgcggcatgattggtccggcgagcgatcgcggcgagtcggcagcggcggcggccgggaggcggtgggattgatcagcgagctacaattatgggcatccaagggaacaaggcgacgacgcgcgagcacgacttcctctcgctgtacaccaccgccgctaaggatccgtctctccagctccacgacgccaagccgccgcctccttcccaaggtttcttcctgaggacgcacgacttcctgcagccgctggagaagccgacgccggcgccgacgccgcctccgacgagccagctgcagcagcagcagcagcaagcgttccccggcggcatcggaacgttcagcatcagccacgtcgccggcgcacgcccggtcgcggctgccgtcgtcaaggccgagccgacgccgttcgttctctggggccagcccgccgccgccgccgccgcgcacccggtcgccgcactagggcaccaccaccaccaccaccagtggacgctccccttcgccggcgtcgggcaggtggccgccaccgcggcgaggcagcagcaggagtg

SEQ ID NO: 24998 - DNA, 3550 bp, Oryza sativa
  Clone ID: PAT_MRT4530_29929C.1
atgtcccgtgattttttcgcgaagccaagccaagcgaagccaagcaaagggaagcgaagcggagaaaagcttgtcttgtagagaggaggggtctctcgtcgtctcgcgtcggaattctcgcgttgtggccgcggcatgattggtccggcgagcgatcgcggcgagtcggcagcggcggcggccgggaggcggtgggattgatcagcgagctacaattatgggcatccaagggaacaaggcgacgacgcgcgagcacgacttcctctcgctgtacaccaccgccgctaaggatccgtctctccagctccacgacgccaagccgccgcctccttcccaaggtttcttcctgaggacgcacgacttcctgcagccgctggagaagccgacgccggcgccggcgccgcctccgacgagccagctgcagcagcagcagcagcagcaagcgttccccggcggcatcggaacgttcagcatcagccacgtcgccggcgcacgcccggtcgcggctgccgtccaccgcggcgaggcagcagcaggagtggaaggggcgagtcgggggaggcgggttcatggactctggctccagatccagtggcggcgccgggttcgacaccagcggacgctccccttcgccggcgtagggcaggtcgccgccaccgcggcgaggcagcagcaggagaggaaggggcgaatcgggggaggcgggttcatggactctggctccagatctagtggcggcgccgggttcgacgacgacgatggcgtggccgcgcggcgtgaggtctcgtccgcgctcaaagagttgacagtgagggtggatgggaagggtgggagctgcagtggaagtggtactgatcagcggcccagctcaccacgttcaaagcactctgctaccgagcagcgtcggcgcagcaagatcaatgacaggtttcagatacttagggagctgttacctcatagcgaccaaaagagagacaaagcaacatttctgttagaggttattgaatacatacgctttttgcaagagaaagtgcagaagtttgaagcttcagtccctgaatggaaccaagaaaatgcaaagatacttccatggtcaaacagatcacgcggtacgcgtcagaaaaattcacaaagtaaaggtcatcctggataacacacttgtcgcgatgtactttgcctgtggagatgtccagcgcgcacggcttgtgtttgagggaatgtgtgaccgggatgtcatctcatggacatcgctaatctcaggactagtgcaaaatggcagccccttgcaaggtatacagctagcgtgtcctacagatcagcgagaaactccgacaaacattaccaacaatgttacatcccaagcccaagcccagtgggctagtccggctggtgtggatgactgtgcaatgaacagcgaaatgttaaataaccaacagttggcaattgatgaaggaacaataagcttgtcaagccaatattcccaagcagctacttggtacgttgactcatgcccttgaaagctcaggtgttgatctgtcccaagccagcatatctgtgcagatcaaccttggcaagcgagctgttaagagacctggtgctgatggatcctccagttctaaggagctccccagtacatcagcgaacaatgaaaacatgggtcaccagctgacgatgttagggggtggtactgaagaacttccacacccaacgaagcgccataaatcgggcaacagctgatggcggttctcactctgttgcatcatccagaccgattgatcattctttcctccctaccaaccagccagaacattccagaattggatgtacattatgttagcagtgacggcatcgcgttgaacaagtcagaccttggtgtaattctttcattgccttgtcaatcaggcttgcactttgtttcaggacaaaaagcttgctggagtaagaccaaatgacgtgacattccttggacttctatcagcatgcaaccatgcaggtgctgttgagaaaggatggagctactttcactctatgaaacctgactatggaattgagccccagcaccagcactatgcttgcgtggtagacctgctttctcgtgctggacagcttgatagagcctaccaatttatactgaatatgcccatcaaaccagagatgactgtctggggcgctttactccatggttgcaagatgcacgggcactcaaacatggccatggctgaatgcgcagcacagcacatttttgagttggagcagtccaatgcagggcactatgttcagcttgcaaacatgtatgcatctgcagggatgtggagccaagtcgctggcatgcgagtcaccatgagagagaggggtgtcaccaaggcaacggggtttagcttcatcgaggttgatggagagatgcactcattccatgcttgggatcactcgcacccgagggccaccgagatattcgccatgctgtgccttctttctccaactccaaccggagttggaggagttgacagtgagggtggatgggaagggtgggagctgcagtggaagtggtttcagatacttagggagctgttacctcatagcgaccaaaagagagacaaagcaacatttctgttagaggttattgaatacatacgctttttgcaagagaaagtgcagaagtttgaagcttcagtccctgaatggaaccaagaaaatgcaaagatacttccatggtcaaacatatattttagatcgttctggaaaaattcacaaagtaaaggtcagaaccctggagatgatttgcctgatccttcacagttcatccggaatgggtcctcttctgggtataatttcactggcaaacctgatgataaccacaacatggtgacatcagcagctgcctcaggggcacaagaactggtggaaactgaccatgcagctagcgtgtcctacagatcagcagaaactccgacaaacattaccaacaatgttacatcccaagcccaagcccagtgggctagtccggctggtgtggatgactgtgcaatgaacagcgaaatgttaaataaccaacagttggcaattgatgaaggaacaataagcttgtcaagccaatattcccaacagctacttggtacgttgactcatgcccttgaaagctcaggtgttgatctgtcccaatccagcatatctgtgcagatcaaccttggcaagcgagctgttaagagacctggtgctgatggatcctccagttctaaggagctccccagtacatcagcgaacaacgaaaacatgggtcaccagctgacgatgttagggggtggtactgaagaacttccacacccaacgaagcgccataaatcgggcaacagctgaaaggcgcttctcattgtggattgtgaagctgctcttgtacacaggcttccattcctatgagaagctcccccctgacaagacagtcagtcctacgttgtaacctgtatgataactcagctgcacctgttagctatgtgaagtagtaattcgttgaagtattctagatctctagtgcttcattgcacatcacttctct

SEQ ID NO: 24999 - DNA, 1580 bp, Oryza sativa
  Clone ID: PAT_MRT4530_2992C.1
gcacgagggtttggagagggtagactagagagggggtgagctccaggtggcggctagggttagggtggtagggtgaactcaccgcgccaccacccctcccgcatcttccacctccgcctctaaaccccgcacgcccgcaacccatcgtgcctgattcgtccatccgccattgatggcggtcttgtcaccggcggcgttgtcctaagtggtttgggggttgtgcaagagggtggtttcgttgcggggggaggaggatccgatggggacgaagaaccagttcgacctgctcgtcgacgtcgacaacgacgacccctcgcacctcatcgccgccgccgagaagaaggcggcggcggcggccgcgtcgcccaagccggccgcccaggcaaagctgcccaccaagccgccgccgcccgcgcaggctgtaaaggagtccaggaactatggtgctccagcccgtgagggggcaggccgcaatggaccagggcgtggcagtggtggttttggtggaggcaggataggccaaaggcgtgattttggtgagggtgataccaacggtgtagagggagggtatggcgctagcggctttggggatggaattgtgaggagggaagaaggtgaacacagaccttcagagaggggccatggaccacgccagccttaccgtggcggaggccgacgtggcggttacactggtggggaggctggggatgagtctggtcgtgctcctcaccgtgcctatgaacgtcgtagtggcacaggtcgagggtatgggatgaaacgtgaaggcgcaggccgtggtaactggggaactgtgactgatgaagcccttgcccaggaatctggtgaggctgtcagtattgaagtgtctgttaccgtgactgaggaaaacaagcaggaagatgtaccacaatctgatgaagtcgagaaacacaaggagggtgaatcaaatgaagaggaagaaaaggaacctgaagacaaggagatgactttggaggaatatgagaaagtactggaggagaagaggaaagctttgctttcactgaaggttgaagagagaaaggttgtggtggacaaggaattgcagtcaatgcaacagctctcagtgaagaaggattctgatgaagtgttcatcaagctgggttctgacaaggacaaaaagaaagaaaatgttgaaagagatgaacgcaccaggaagtctcttagcatcaatgaattcctgaagccggctgaaggtgaaagatactacagcccaggtgggcgggggcggggacgtggcagaggacgtggtgaccgtggaggattccgggatggctatagctctcgaggtcctgttgccgcaccaagaattgaagatcaagcgcagtttcccggcttggctgggagattggtgcactagctgccatgatatgatctccttgcactttttgtgggattttaaaaatgtgtctgcacgcgttgcttgctgcatcagtgttgtactgtcaagctacgcatatgccactgttgtgtctcatgtatacccgtgcggccgagccaaatgtttgaaaggtaattttcaaaaaatctcattggaggttttc

SEQ ID NO: 25000 - DNA, 321 bp, Oryza sativa
  Clone ID: PAT_MRT4530_29930C.1
cctccgtcacgccgtgcaggggcgccggccaccgccctccagctgcgcgggcgtcgccccgccgtgcgggtgtcaccggccactgccctcccgccgcacgggccgtcagccaccgccaccaaccaacctgagccatctaacatgaatgtagccttgccatgtctgggggaggaaacacctatagttgcaccaaaaatgaccaagagcaagataaagggaaaaccatcatgttctaatactcctggtagcccaactatgcgcacaaggagcacagataagagtcctgcaatgggcactagaagcaaaagaaaactttatgga

SEQ ID NO: 25001 - DNA, 466 bp, Oryza sativa
  Clone ID: PAT_MRT4530_29931C.1
tgtgatcattatttctggaggaatgctcaattgctgatcttggtactgaatcggctctacccatccttgctagtctgcaactccatgttctgggagacatggcaacttgcacatgaccgaactaacactggtgccgtctcgacactggatcttctcagaagaagacgcaagacactaatttcattgaagatctgtgactgagactgatctgatcaattggattattgcggatgggtgcatcatttccagagtcagcggcaggtgcattcattgagcatggggagctcactaagtctggaaatgttaaattgccttcaagactagagctctttaggacttacgttcatgatgacaaacgagatgcccattatatgacatgttctgataactaaggatctggactagcacccacttttctcaccactgaagatcactgacgactcattgcaaattgtccgaacttact

SEQ ID NO: 25002 - DNA, 226 bp, Oryza sativa
  Clone ID: PAT_MRT4530_29932C.1
aggagcgcctgcttttttttttttaatcagcaatgaaagagtggggagatgtattctattattatgagtgaagcatcttattgcctggtttgacaccccagtagattatacatcccaacgaaaaatcgtaattcaacaccggcaacgacaaaagcccaatttcactctgatttgacactgaccccttctgcccagggatgagcacggaaaaccgaatgtccaagac

SEQ ID NO: 25003 - DNA, 2005 bp, Oryza sativa
  Clone ID: PAT_MRT4530_29933C.1
atggcggacgccgacgcgagggccccgcccaaatcggaccccggtctcaatcacaatcccttctctctcctctctctctctccagtctccacgttcgaggagaggccaatggcggacgccgacgcgagggccccgcccaaatcggaccccggcgccacgccgatcggttcgatctccccttcctccgccgcccccgccgccggggaggacgaggtggaggtcgaggtggaggtggaggagcagctcgccggactcgccatcgccgatcagggggaggagctgctgcttcccaagcccaccggctgggaggatggccctgttgttgttgctggagatgaggtctccggtggtgagaagctgccgggtgaggtggccgccgcagtgggggtggagggtgctggcggcggattcgaggccgcggttcccgaggcgacccggggagccggactgcacctactacgtcaagttcgggagctgccgctttgggatgaagtgcaagtgcactgaaggcggccaaagaagaagaagagtagggtgaaagggaaggacggtggtagtgggaatgcaagtattattcaacacctggaggatgccctcctggtaaagcttgtaaatacctccaccgtgatggaaaagaagggaaaacagacgctgaaaaggttgacctgaactttctcggtcttccacttcgtccaggggaaaaggagtgtccctactacatgcgtactgggagctgcaagtacgccactaactgcaagtttcaccatcctgatccttctaatgttgcttctaaagatccacagttggagcatgagaatggggatgctccacagcaagatgttcaaggatcatcgtctcagccaaatgcttcaatttggcccgatcagagaacagtgaatgagcatcatgttccgtttatagctccatctccatcgtacagtgcagggatgcttcctcctcaaggaatgtatccacctcctgaatggaatgggtatcatcaggttccgttgaatccatattatcctcctggagtccctttccaacattttccagctgctcctataaatcatcctatgtacaaggcaccagaaatacctggacatcagcaggttccttccgaggaatacccagagagacctggccaacctgaatgtcagcattttgtgaagagtggtttttgcaaatttaggatgaagtgcaaatatcaccacccaaggtcaccggtgcctccagcaggagctcttagccctcttggcttgcctataaaacctgatcagcctgtgtgcacatactatggtcgctatggggtctgcaaatttgggccagcttgcgcatacaatcaccccttcaattttagccctgtacctgcagcgggacctcctctcctccctgctcacgaggaatacccagagagacctgcccaacctgaatgtcagcattttgtgaagagtggtttttgcaaatttaggatgaagtgcaaatatcaccacccaaggtcaccggtgcctccagcaggagctcttagccctcttggcttgcctataaaacctgatcagcctgtgtgcacatactatggtcgctatggggtctgcaaatttgggccagcttgcgcatacaatcaccccttcaattttagccctgtacctgcagcgggacctcctctcctccctgctcaatacccaactccaggaaactacactctctgaagcaggcacgagcgatttttcatcgtcgccgtgatgcttgtaataacttcacttgtaagatagcgtagctgaaagctgtacgtgggttcactcactgacagtgggagagatctggcttggaaagtggcaacgaagttgcatcaagctgggtacattgccgctggaattcatgaaattaaacaaaacctgtcaaaactctttacattgtacagcatcgtcgcgtttagtatacaacaatggggtcgggctgaacaccagatgccacaatctcctgcccccgtcccatccaatcgcctaaa

SEQ ID NO: 25004 - DNA, 467 bp, Oryza sativa
  Clone ID: PAT_MRT4530_29934C.1
tgattttaaggtggttttggccctttgggtcctttcttgagggatttgcacaggcaagaccaccgttcaattttggtttcttccaagggagaagattgtggccgttttcttgagggggtttgatctttttgtggggagaggttttgtgttttcctgaagaaatttgagttctttctttttcttggagctgttctagcagtctaggtctcaagagtgaagcagcctgcttccactggctctcgggcgtttcagtttgctttctccccaaattttgcttctttcttgagagaattgtagttttagtcttgccggagctttttctttttttgttaattcattttttttcttgtgagaattgtagtttttcaggaaatcttttggctcgatttgttctgttaaggaatcccagtgacaagcgctgctgtcaatgccgttcccttgaatgacttcaaacgaggaatcttgag

SEQ ID NO: 25005 - DNA, 461 bp, Oryza sativa
  Clone ID: PAT_MRT4530_29935C.1
atgccaaaattcgtgcatcggcttctctcctccaactccggtggtctccccttcttctccggcgccggcgacaccccaactccggcaggaaggtttcctcggagcttagaggaatggccgtgggcggtggacttcggctggtggtgaggcggcggcggcgctgccgaagccgcggggatggaggatggtgatgggctggcgttggcggcgggggcaaagcaagcgtgtggttaggaggcagcgggcggtggttgcggatccggcggcggggaaccgccggagacaaggacggcggggcgggggcacctcgtcgtcactgcctcgaggacaaagagaggggggagggggagggggaggggggcttcgccgacgccgttgaccccttccggccagtcggcaaggcgggcagcggcgcggtggggtaaacacccaaaattttagccaaaaacttaaaatacgat

SEQ ID NO: 25006 - DNA, 699 bp, Oryza sativa
  Clone ID: PAT_MRT4530_29936C.1
ccacctcgtcacgctcgtcaccggcgccggcgtgggctgcgctctagaggggctcgagctcagattccggtgtggatgtcaggaaccagtcgtcttgtaatctcgcaaagcagcagccgatcgaaacgggcgagccgagacgcacgaggcggggccagccgcagacgtcgcggccgccctccacaccgcagaatcggctgctgcttcgcaagattagagacgactggttcctcccatccgtgccggagtccgagctcgagcccctccaactctccaagagtttggcccacgccggcgccggtgacgagcgtgacgaggtggggaagacgacggaaaagctggcgttggggacggacggacggatcggcgacggagtggcacggaataaaggaatttgctatctcagtgacaaaatctgaaagaagtgcgtattgagtggcttgccctgaaaggtctacgaattagatggcatatatcccctatcgccctcaaatcgtctgtttcgttcactcctgccgtcgatttggaggggagaaccctaggcagtggtggcgcaaccatggaggcggagcccttcgatgaggtaactccccagagtcccagtccagtctcccctgtcgcttcaagctgcaaaagttgcactatatcgtcgtcgcctcgtactgcgttgggtcccacctccgctttcaccatcggcat

SEQ ID NO: 25007 - DNA, 507 bp, Oryza sativa
  Clone ID: PAT_MRT4530_29937C.1
atggcaattgatcctgtccaacacacgtcccatgtcacattgctcatagggcttagtccgagaaccaagaggatcatggcggccaaaatcccagatctgcactcgacgtctagcacggtagtaccgccatcgcatgtgcatttggaggaatgcggtggtgctctcttcatgtgctactcacagaacttgcaaactgcagtatgggaatctagtttatcgatgatatggctttggagacctattgcacctcgccatgcacccatctgctggatcgtggaggttcggatgttctatgatcttcgacacatcttcctgaaggcaatgtcgttgatgccctcattctcaccttcatgtcttcaggtggactctacaggtgaaaacctatttctagatgtcggaatggtgatggtgaccttcttggaggttcaatgttggtgcggcatccttggtgttgtctctattggattggcttcgatggataggttgtggcaagatttgggtgattga

SEQ ID NO: 25008 - DNA, 417 bp, Oryza sativa
  Clone ID: PAT_MRT4530_29938C.1
atgtggaggagattgctgccgcctgtccacgaggaccttcggcgcagttggggaagaagacccactcggcgaggggaggacgcggccgctggcgacgagccccgcgcagtgagctcctgcgacatcgaggacctcgtttgcgtcgcgtcgaggcagcgacacatcgtggccgagccgccggcgggggatacatcaacgaagagaggaggggcgtcggtggccggagccagggaacagagtgatggtggtggccgcctggccggagctagggaagggaggggcggcggtggcggtagccagatttggggtacggagcggcggcggtggccggagccagaggagggaggggcagtgcggcggcggtgcctagagccaggggagggagggggcggtagtggttgtcggcgttggtgccgg

SEQ ID NO: 25009 - DNA, 110 bp, Oryza sativa
  Clone ID: PAT_MRT4530_29939C.1
aacaaaaagttacgagcacacgcattcggtataataacaaggtaaatttgccattttgataaaccaatacgattaaatggggcccgtacagaagccgtattcggtatttg

SEQ ID NO: 25010 - DNA, 618 bp, Oryza sativa
  Clone ID: PAT_MRT4530_2993C.1
atggaggatggatggaggggcgtgaagtcgatcgcgcacaagggccagggagaatggatgagctcggacgccatcatcgccatggatgagctcgggaatcggatgtggcaaagactcggcggcggctttggacgagcgtgcacggcgtcgagcggcaattcttgcggcggaggtcatctcggcttcgtcttcgtcgcgattgatgcggcggtggcgatccgcgaggtcgtcgttgtgccgttgccagctgtcgtcggcgccgtcgccaaccgtcgtctccgaggttatcgttgccagacgccgctgtcgtccgtgccgtcgccagccgtcgtcgacgccgtcgccagccgaggtcgccgtcccgtcgtctccgaggtcgtcgtcgctagcgttgtcatcgccatgcccaaacggattcggccggtgtggcatgtagtagaggacgccgccgtctcgctcctgccgtcgtgttcgccgcccggcgtccacgtgagctcggcccgagcggcggcggcggcggcggtggcggatggcgagcggcggcggtggatggcgatggggcggcggcggcggaggggaccatgctatgagcggaggagaccacctgctgtgagctga

SEQ ID NO: 25011 - DNA, 1410 bp, Oryza sativa
  Clone ID: PAT_MRT4530_29940C.1
atggcagccacgtgtgtggacacatgggcggcccggatggaggccggggccgatttgacggccaaaatcggccacgcggtaggggcggcggcgcgtacgcgatgcgcggcggtccaagtggcaacctggtcagacggccaccggcggcggggagatagagggagagggaggggagtgctcaccgtgctcgcgcaacggcgagaaggggacgggaaggcggcggcggtagctcctcggggtggcagcggcgacggtggtccggcggcgttccgtgtgcgggaaccggcggatggctgctgcgaggacatgggaaaagcagtggtagggttaggaggatgggagaaggccggccaaggtctggtggggcgtggcggcgctgtgggtggtggcggcttggccgggcgaggcgacactcgccggcgggaggtggcggtggctcgggttggtggtgggatcggtgctatgggatggtttggggagaaggagtggatgctggtgtgctacactgtgcggcgaagccgacggtggcggtggcgcggcttggcggcggcgggggcggcggtggcccttggggagggagaatcggggccgacgagggcggcaaccggcggtgaagttggtggcgatgtggaggtcgtaggtgctactcgaggagatcaccaagggaccgcgtccggcaaccgactcagccaccaccttcgtcgctaccacgaccagcaccaatggcgccactggtggtcgtggcaccaccggcaccacgggcaactcactgggcggaaacggcagcggcatggcggtggcggctccaacaatggtgctggcgctaaccctaatggcggctcgggtgctgcctctaggggacaaccggccggctctcagccggcccaatctggcttggtcgcacggttgacctggccctctccctacaatctgtgggccgacaccattcagatgtggccgggccaagcccacggaccaggcgccttgggacggcctcccttcacaagcgcggcagtggccggccagcccacctaccacacagcgtcgatgcaggccagccttcctcagcatatgggctcagccggttttccaaaccaggccggcctcgctccactccagcttcccgggccgactacatacagcacggccggctctgtccctgcctcgccgcacacatgggccggcccttcacagtgggatccacaggccctcgccagctccttcaacacctctacactgacgccgccaaactccaacgagtgttatatggattcaggtgcatcttcccacatgacctctaatactggtatccttagtgcgtctcatcctctcccccacaactttccctcacatattgttgttggaaatggttcactaattcctatcacttctaccggcactgcttactaa

SEQ ID NO: 25012 - DNA, 766 bp, Oryza sativa
  Clone ID: PAT_MRT4530_29941C.1
ggggcagaaccgggggatgatttcactccgttcgttgctttggggccaggccaagtggagaaatcgttgccaaccctagacatggtcatctcgttcattagataaacgttaaaacaacttttcttaatggagagctatataaggagttgagatttatatggatcagcctgatggttttgtagtagaaggtcaagaaggcaaaatgtgcatgttgttcaatctttgtatggtataaaactagctccaaagtagtggcatgagaaatattatagaacattgacatatgcatcatttgtaatcaatgagacaaataaatgtgtatattatcgaggtgaggaacttattctgtgcttatatattgatgacatactgatctttgggacgttaaatcattcttgtctcaaaattttgatacgaagaatttgggagtagctgatgttattttgaacattaatctaattagaggtgaggatggaattatactcttgcaatcccattatgtgggaaagatcttgagtcgctttggctatattgacgttaagtctcttttctccaacactttataatcctagtttattgattcgcaagaacaagagaattgataggaatcaattggactactcccaaataattggctcacttatgtaattagctagtgcaactttgcctaatatctcctttactgttagcaaattgagccgttttacctctaatctgggatatgaccattggtgtgcacttgagagatcactacaaggttttcggg

SEQ ID NO: 25013 - DNA, 177 bp, Oryza sativa
  Clone ID: PAT_MRT4530_29942C.1
atgcggcgacgacatggccaggccaacgcggcggtggttgggaggctggtgacggcggagtcggtggcgtctttggacgtcgttttccctactgtgggcgctgtcaagccgcccctctccatcgggtggatttccggtgaaagccttgtcttggtccttcgtgacatcgatggatga

SEQ ID NO: 25014 - DNA, 357 bp, Oryza sativa
  Clone ID: PAT_MRT4530_29943C.1
ctatctatctgttgtcgacttggcggtctgaagtgctgactcgtagtcgacaacagggtagtcttcctcctcgaatctgtgcccgacgaggtcagagatagcgctagattcctctctttggttcccgtaggtaccatattgggttttcccaggcttatctctgatgtcgatatctggcagtttgtcttggcgtatgtaggcttgtattggccacgggccaaaattcggcccaacctgtgatgaagcggcccagcccaagtcggctaaacccctctcctcttctcgtgccctgcctgattccgctgcctccaccgctccacgtatccccgaaagattctcctcctcgtcctcatccat

SEQ ID NO: 25015 - DNA, 321 bp, Oryza sativa
  Clone ID: PAT_MRT4530_29944C.1
atggtgcgcccagccggcggctgcccctgcctggcttgctgccccgcggtcgccggctcgccgccgccgcacgccgcgcccgccgccggcctgccgcaacgcacgccgcgcctgccgagtgccgctgcaacgcacgccgccgcctggctccttgcaaatttagggtttgggattggggattttgggagctgcctgggaggggatttttgtttcgaaatgggctcagttgcggcccaagtagaatgcgggccaagtgaaaagggggaaggagtagaaaatttagacccaacacagcagaaatggacagaaactgaaagctag

SEQ ID NO: 25016 - DNA, 571 bp, Oryza sativa
  Clone ID: PAT_MRT4530_29945C.1
gggggcaaccccccactgtgtgtggccacatgacacccgtggtgtttgcaaactggaggaaatctgcgcccacagtgcatggccagctatctcacgtggtctggcacaactagtctccaagggatgtatgtcgcccacaccacgttctgcacctggcccaggccactttaccccgtggttccacaggcgattggtggcacagcagctacagctgacacaccacgtgtgtgcctgggcgtgttacttgcgatgcacggctgcaagctgcaacgccccacagctgatggttgggccctaaatctgtgccgtgcacatgatgtgcggtgatgtctgaccccagctgaccaaccacctggctgccctggtgaggcacttgcctgacccgtgcggtggtgattctggtgattggaattggtgacccacgtgatgatgtgagtaccacggagaggaaaaataaagtgctcactgcactgtcattcgtgtgtggacccagttggaaaacatttcggggtggatacccaatgtctggaataaaaatgtcatcccaatttaaaaaaaaaaaaaaaaaaaa

SEQ ID NO: 25017 - DNA, 196 bp, Oryza sativa
  Clone ID: PAT_MRT4530_29946C.1
gggcccaccacctccaatgacaaaatccagacccttccccgacgtccgcgaaaaaacagtaacactgtcgcgaggaggagcgtgctgcgtgcgggatccgttcaccgggggtgggcatcttcttcttcgttgcgattacgacccggccgacccaccaccaccaaaaggtcgggcgtggtggcggtggacccggggt

SEQ ID NO: 25018 - DNA, 196 bp, Oryza sativa
  Clone ID: PAT_MRT4530_29947C.1
atgaacattaaaaagattaacatcaagaagacgatggcagccgacatccttctccacccttgccatcgttgcaacatggtgagggcgcagccgccgtcgccaaggtgcaccgtctcccctcccgctggagctggcggaggggagagtgcgggcgccgccgccgccgtcactggagaccactgtggcctcccctcct

SEQ ID NO: 25019 - DNA, 522 bp, Oryza sativa
  unsure (1)..(522): unsure at all n locations
  Clone ID: PAT_MRT4530_29948C.1
tcggcacgagggtcagtacaggcagcagcatcagcagcagcttcttcttcttcttcgnatgggttctggatcgtcgtcgtcgtcgatctgtgcctgaggagaaggacgagaagtacgtggaaattaagtgaaggtctcagagacggcgagaagtatgtgggagtcggagagcgagagccacggcggcgagcgggggctcgtccccgtcggcggcggcggcggctcaggccggcacgaggcggcgctcaagaacgacggcttcgtccgcagagaccggtcttggtatgtcaacagtgacatccccagcgatctgctcgtcaaagtgggagacgtgaacttctaccttcacaagtatccgatgatttcccggagcgggcggatgagccgcgccgtgtacgagtcgtcggcggcagatgaggcggaggcggacgcggcggcggcggtggcggtggtggagatgggcgacctgccgggtggcgcggggtcgttcgagctggcggcgcggttcagctacgggatggc

SEQ ID NO: 25020 - DNA, 887 bp, Oryza sativa
  Clone ID: PAT_MRT4530_29949C.1
cttgcactgcaaccagaagccagccactactcagtaggagattggagctgagagcagcagcagcagcagcagctaggaagatgaagagcctgcaaggtgaggtccacctgaacatccctgcatccaaggcatgggagatgttcaccaacaatgagaccctgggcaagatcagccccgaaatgctgtcgggcgccgagtaccttgaaggagatggcagccctggcagcctcaggatcttcaagctaggacctgcacttcatcactttgtcaaggaatctgttcagaaggttgagaaggtcgagacaggccggtccttcggctatgaagtggtcagcggtgagctgaaggaggtctatgatccctaccatgtcaccttctccttcgcccccgtcccggggaaggaaggcgagcagtgcgtcgctgggtggaaggctgagtttgagcccatcacccccacttccccgccaccagagaaggccaaggatgccgccctcgggtttcttaaattgtttgagacttgcgaagccactaactataaaacaattgagttgatgcaaaatgatattaagttggaaggtgtcaaaaattgtttgagttggtttatgagaacattgttgatcttgaagacaaagggattagaaggatatgttacaggggagataaaagtgtctgagagcacatcaagtgctgagtggaagacttggagtgctagcaactctttagtagtagcgtggttgttgacttcatttatccctgttattgctacaactgttgagaccatctctagtgcaagtgagatgtggaaaactctcactaatctttacttaggagaaggaaatgtgatgctaatggtggaggcacaagagaagataagtgctttgaaataa

SEQ ID NO: 25021 - DNA, 342 bp, Oryza sativa
  Clone ID: PAT_MRT4530_2994C.1
atggaggagcgggaggcctcggcggcggccgtccaggcgacctcgttctgcggcggcggggtgaccggttgctgctcttcccgcggccacgtgctcccgcctcgccgatccggcgccggcgcggtggagaagccgtccgcagggggaggtggaatgcgggcgctgggggatgggggatggggaggaaggaggatgaaggcggcggcgtctggacgatggatcgccctcagccgtcacgaggtcgaggagtctgagagtggcggcgcgacggtgacccagcatggcggccgctcctcctcagtcttttgctctccccaacacgcgtcggccgctcctagctga

SEQ ID NO: 25022 - DNA, 834 bp, Oryza sativa
  Clone ID: PAT_MRT4530_29950C.1
cgcactttttctttatgcggaccgggtcggtgctcctccagatcgtgcccgtggggctcgactgggccgccacgcgttctacggcaagccggcgcagcagctcggcctcgggtacctcgagtacaaggtggcgcccgaggagagctcgctcgccgccgagtacggcgtcaacagaccgtcgtgcgcgacccctccgtgatcagcaaccgcgggtggtgggagatgaagaaggtgtacatggaccggcagaacgtcactgtgaacatcaaaaggttcggcgagctgctccggtcggcgaggctgcacctcaagaacgccacccgcctgcggcaaggccgcctcggcggcgacgacgaccgcggcgaggtaggggtggctggctaaaccaagctctccgtcaattaggtgttaattaatcaatcaatcacagctgttaatttgcccatgtttttttctcggtttatttttttttcatttcatttttctgctcgtttttggttggggggtttgggaggagtataattaagaagggtaaagaaagggagatcctgtaaatagaattggatttattggtagggatcgcctccgtgcacagtgcattcgttttcagttcggtgttgttactaggagggagaagaataatttatggttaggggttctcataaatcatcttcttttgttagtctatactactagttgcaagagcttttttccttctttcttctttctttcattctttggggtgtcctgatgtaagaacaacattctgtaacaaagtgcaatagaatccagactctctttacagatcataaaaaaaaaaaaaaaaaaacgttt

SEQ ID NO: 25023 - DNA, 2307 bp, Oryza sativa
  unsure (1)..(2307): unsure at all n locations
  Clone ID: PAT_MRT4530_29951C.1
atgacggcgacatccaacgccgccgccggcgcggccacgctgatgccgctgctgatccacctccttcgcggcgcctccgacctcgcctccgtgtccgccacccacgccaagctcctcaagctcggggcggcctcctcggtcgcctcctccaaccacctcctcgcggcgtacggccgctgcggctgcaccgccctcgcgcgccacctgttcgacggaatgcgcgaccggaacgtcgtctcctggacggccctcatgtccgggtacgccagcgccggccggccccgggcggccgtcgccctcctccgcgccatggcacgcagcggcgtgccacccaacgccttcaccttctctacagctgccagctcgtgcgcgcgcctggctgacgccggccttgggcggcaggtgcatgcccgcgctgaggtcgcggggtacgcgtgcgacagcgtcgtttccactgcgctcgtcgacatgtacggcaaggccggcagggtcggggacgcccgcgctgtgttcgacgcaatgcccgtgacggcgagaaacgcggtttcctgggcctcgatgctgtcggtgtatgcgcagaacgcgctcgggcatgacgctatccagctcttcgccgagctcagaaccaatggcgaagacatggcgcccaaccacttcatgctgtcaagcgtggtgaacgcgtgcgcgggcgtcgggcggcttggcatcggcaagtgcattcacggcatggtcctccaccatgggcacgaagacaatgacgtggttgcagtggctctggttgacatgtactccaaatgtggcatctacgagtactcaaagaaggtgttcgacaggatcaaccagccgtcggtcatcccctacacctccatcatcgtggcgacggcgaagtacggcctcggcaggtgcgcactcgctttgttcagtgacatggttggccgaggcgtgcagccaaacagtgtcacactgctcggcgtcctgcacgcttgcagccactcaggtctggtcgacaccggcctccagctcctccgttcaatgcgaagcgagtacggcattgatccatgtgccagccactacacttgtgctgtcgacatgctcggtcgtgcaggtcagctcgaggcggcattcgagctggccgacgaagcacaggtcaatggcaatgacgccctcatgctgtggagctcattgctgtcagcttgccggaaccacaagcgcctggacctagcaaccatggctgggcagaaggtatcagagttcacccaagatgtggccggcgcactggtggtcatgtcgaacgcatacgcttcagccggtcaagccgacgacgctgctgcggtgtggtcgaacatgaggcggcgcggcattcggaaggatcccgggtgcagctggatcgagataaaggacatctcctacgtgttctacgctggcatggtatcgcctgccggctcaagggccggtgaggtgatgctgctgttagatgaattggagggcaagatgagggagaagggttacaaggggagaattggcagtgccagagtccttgatgctgatgaagaagaggatggaaatcatcatcatcaggaaggcagaggtgtgatggttggagtgcacagtgagttgctggcattggggcttggattgctggtgatccccaaggggatggccattagggtgatgaagaacctgaggatgtgccgtgactgccatgaagcgtttaaggtcatcagtgccattgtggagagggagttcgttgtcagggatctcaacaggttccaccacttcaggatggggtcatgttcttgcaatgactactggtgattcaatcaaaggctagaatcagttactcccatcttgcaatgattactggtgattcaatcaaaggctagaatcagttactcccacagtcctaaaatataagaacctaaaaccggatgtgacatttcctagtataatgaatcttaagaggcactaaaaaatgtctcattcaattctaggttcttctattttgggacggatggagtagtaggaagaaaccaggtcatgttcttgcaatgactactggtgatgcaatcaaaggctaaatcggttggtagttgtgatctttttgacataaaaggaagacagccttgacagaatttctttgtgtagatgcagaactgaagtgacttctttcgttgcgagcctgtaggtaggtaccaaaggtccacagcattgcttgaaaatatagacacaaacgaacatggcctggggttggagttggccccaactttgttgaaactgggtttgttttatnaaaaaaaaaaaaaaaaa

SEQ ID NO: 25024 - DNA, 1761 bp, Oryza sativa
  Clone ID: PAT_MRT4530_29952C.1
atgggattcgtttccggaatcgacgacttcgtcttccctccagggcaggcgttccgattcagcagcctcgagttcatcaccgataactttggcaagatctctctcttcgactcagattcgaaccagtcggaaagagatgcggtctccgccccattcggtctcccgaactcggccgagatctaccccaagattatcttgtccgagtcggcctcaagccactcggatgagatctcatctacttcgacacgaccagatcaaggcgatgcgacctatccatcaatcctaatgaagcttcctgatgatttggctgctgttttcaccacaagggcatcttcttcccaagaattggacggctacctcagctctcctggtgtcgactcacggccaatggagatcctcgactatgacgacttcagctacaactacgacttcagcaacctcgacgatttcgacgattttgatgaagcctatgaagacaactacacgcctctctttttcggcgttttcatggccgataacgagactgcagaacagcgtcagctccgtgaagcagaagaacagcgcacacgacaagaagccgagcgtcgccgactgaaggaggaacgacaagcgcaagagcgagaccagttgcagcgggaacacgagcgggccgcaaaggaggctgaggatcaacgacagtgcaccctggaagccgggcagcccatcaatcttcgcgacacactcaatcgacgccgtgtagagagaggttatgtcccacaccgatcaccagaccgctacggtgacgatgaagatggagttgcagcttttacaagtgacctgcgtcgagtggattggccggctggcttcaagccgactggaatcgagaagtatgacgacaaaacaaatcttgagtcttggctcaccgtctatggcctcgcaatccgcgcagaaggaggagacaacaaggctatggcaaactacttgttgcttcatgggttaccccgtggcacaattggatcttgggcagagcttcgtgagcacttcattgccaattttcaaggcactttcaaacgtcccgacacccacttcgacctctacaatgtgatccagaagcctagtgaatccctttgggattatatccaacatttttctaagcaacgtaacaagatctccgacatcaccgacaacgtcatcatagccgctttcactaagggtgtccgtcacgaactcttagtcagaaaatttggacgcaagcctcccaggacggtcaagcaaatgttcgaaaaagccaacgaatatgccaaagctgatgatgccgtcaccgcctccaagcagccgggtagcaattggaagtccaagaaagatacggcagtcaccggggggagtggaagcaacaaccataaggatcacaagcccaaagatagtttcatctacaagcagtttgcggagcaatacgcaaagcaaacaaagaaggctacagatggagatcagagcacctcaaagatgaaggatgatgaagatgacggtccgactggttttcaagattctcgcaaagagctcaattatatctttggtgggccgcaagcttatgagtcaaaaaggaagcaaaagctgactgacagggagatcaacgacgtccagcccggcacgcctcaataccttcggtggtcagagacaacaatcaagttcgaccgctcggatcatcctgaccgaatggtccacccggggcggtaccccctggtactggacccagtggttcgcaatgtttcgacaccgacttga

SEQ ID NO: 25025 - DNA, 326 bp, Oryza sativa
  unsure (1)..(326): unsure at all n locations
  Clone ID: PAT_MRT4530_29953C.1
atggtgggcgggatgcgggcgaagcggacggtgaacgagcacggagccacggcccacgggtcgccggcgagcgcgctcctgctcctgctcctgctctggctgctactgcgcaggcgcggcggcggtggctccgatgcagccaagctcggccgagcgacggcggcgccgatgcggctaggcgcggctggcggccgctcggcgcgagtgtggttgtgcggcggcgccggccctggcccaggtcacggcctcggcggagcggcaggagtggtagtcatccctccctcttgcggccaccgcatccagttcaagctttcgtcctgccgcgn

SEQ ID NO: 25026 - DNA, 135 bp, Oryza sativa
  unsure (1)..(135): unsure at all n locations
  Clone ID: PAT_MRT4530_29954C.1
ccaagatcgaacanctcgtgtccatngcggtggcgaagggngacgtncgcaacgggaggcgnacctgaacctcccgccgggnttccgctttcaccncaccnatgcggagctggtggngcactanctttgtccgag

SEQ ID NO: 25027 - DNA, 456 bp, Oryza sativa
  unsure (1)..(456): unsure at all n locations
  Clone ID: PAT_MRT4530_29955C.1
cctctctcctctccggcggcgatggcggcggcggcgaggagctccggtggaatgtccgaccagctcttcgtgtccatcaagctggagtgcccgcgactcgctgagatgggcctcgtcccgcacgtcttcggctcgcacccagtcgccggcgcgtgggacccctccaaggccctgctgatggagcaggaggaggccgccttgtgggggctcagctgcatcgtcccttctcaccgcgaaacactggatttcaagtttctattgaagccaaaagacaatagctcacattgcattgttgaggaggggccagaccgatcactagtttgtggaagtaatgaggtggaaattaggaatgcattgtttaaattcaatgatgagacaggtgtggttgaatgcaagantttcgtggagacagaaattttgnccccattttgacctaagctgctanttggaagctca

SEQ ID NO: 25028 - DNA, 538 bp, Oryza sativa
  Clone ID: PAT_MRT4530_29956C.1
cagtgagcgcaacgcaattaatgctgagttagctcactcattaggcaccccaggctttacactttatgcttccggctcgtatgttgtgtggaattgtgagcggataacaatttcacacaggaaacagctatgaccatgattacgccaagctctaatacgactcactatagggaaagctggtacgcctgcaggtaccggtccggaattcccgggtcgacccacgcgtccgggaggaggagggcaaggagcacagcaagcaggtaacctgcctgtgccggaaggttgcaccgaccctgttgccaagaacttcgacccaacggcgaggagcgacgacggcagctgcctttacaccttttaagcaggccggcttgacgcttgctattaattatttctcctttttatgttttctctttgttctgtgtatcagatcgcgcccaagccatagctgggcatgacaagtttttgttaataataatataatataaagatatgggctataaaaaaaaaaaaaaaaagggggccgctcgcgatctagaac

SEQ ID NO: 25029 - DNA, 136 bp, Oryza sativa
  Clone ID: PAT_MRT4530_29957C.1
gcaccatcacacttggcttatgcaacctgctgctctaaacattaaaactttcatgtgctgtccgcccaatatcacaacatactttcataggttcgatgtgtgattacaaaataatggaacaccaagcgataaatgt

SEQ ID NO: 25030 - DNA, 1056 bp, Oryza sativa
  Clone ID: PAT_MRT4530_29958C.1
atgaagaaacaatgtaacgtcccgcctctcccagaccgggcccacttacatctggcagttttcatagacaccgacgattttgtaacgtcccgcgagagtcggctctcataccgaccaacatattgtcctcactcgtgtgcaccaagaagaatctctcggtcggtcacccatcccgaaatcactcgtgtgcacccggaaaagaatctctcggtcggtcacccatcccgaaattgctccactcgtgtgcacctgggaagaatctccctgtcggtcacccatcccaaaattagacaccaacgatctattaatcctattaagccctgggtcgggatgtcacatcctcacccccttaagacaccgagacaccgagaagtcgtctctgataccgatcaacacattatcctcactcgtgtgcacccgggaagaatctcccggtcggtcacccatcctgaaattgctccacttgtgtgcatccgggaagaatctcccggctctgataccgaccaacacattgtcctcaaaatcacttgtgtgcacccgggaagaatctcccgatcggtcacccatcccgaaattgctccactcatgtgcacccgttgtgtgcacctgggaagaatcttccagtcggttacccatcccgaaattgctccgctcgtgtgcacccaagaagaatctcccggtcggtcacccatctcgaaatcactcatgtgcagaccaacacattgtcctcaaaatcacttgtgtgcacccggagaagaatctcccgatcggtcacccatcccaaaattgctcctcatgtgcacccgttgtgtgcacctgggaagaatctcccagttagtcacccatcccgaaattgctccgctcgtgtgcacccaagaagaatctcccgggaagaatctcccggtcggccacccatcccgaaattgccccactcgtgtacacctgggaagaatctcccggtcggtcacccatcccgaaattgctccaagccaatcacgtttaacctcagagttctttcaagattggcttccggaaaaaagttacaacttgttgata

SEQ ID NO: 25031 - DNA, 564 bp, Oryza sativa
  Clone ID: PAT_MRT4530_29959C.1
caccctggcgcccaatgacgctaaccgcctctccccgcgcgttgccgattcattaatgcagctggcacgacaggtttcccgactggaaatgcggcagttgagcgcaacgcaattaatgtgagttagctcactgcattagcaccccaggctttacactttatggcttgccggctcgtatgttgtgtggaattgtgagcggataacatttcacacaggaaacagctatgaccatggattgacgcccagctctaatgacgactcactatgagggaaagctgggtacgccaggtaccgtcccgaattccggttcgaccacgcgtccggattccaagtagtttctaataaaataaaaagaaattctctcccatttgttcccaaacacttttttctctcgattttcgatcatacacgatcaataagatcacacgtctatcgaacctcctttttactgaacaatcatcgctctataatctagttaatgactgatcaagtccacagaattctacgaactaccccattgcttattattatctataacagataatcccataccccaaaaaaaaa

SEQ ID NO: 25032 - DNA, 856 bp, Oryza sativa
  unsure (1)..(856): unsure at all n locations
  Clone ID: PAT_MRT4530_2995C.1
gctcctatataaacagatactttggctcctcccttgcctnctctggctaagcacttgncccgacgnccactggncgacccgttctggaccttgtttatccgggttcaacccctcatatacaggaccccattccttcacagngattgcccccgttcccgcaccctccctccccctgggcctcccccccgcccaccaccccgaggttgacctctcccgccccccactcccttcactagcagattccagtacccgggcaagcccgtcctaccgcactatggcagngcccccgccacacttaactttggcccccctccacagcctagccgtttttcccccccctagaccgncccancnaaaaccacaccgttacatttgcccccccccagacctaccccgnggcatggggtttggggccgcccccccccacattcatacaccctccacccccagngnacccttatacaccccgatatgggttccccccgggcacccttcccaccaacccccccagnctaacccccaccaacccccgcccacgttatggggccccctcatacctccccctatagccccaggcccttaaagggcctcccccgcaatcccccgcaccctagtttggggcctcttttcccccctataggccccctncatcccctncatagaggttcttcatacccccccttgggggtcccctcctccagatagcccccccncgccttcanccactttaccccacccccctttggggccgggtggttcntttggtcccctagcccctaatatccccccactactttagtcccgtatccgggccccgaagcnccaatacttcacgcatcccgggattctcnnctca

SEQ ID NO: 25033 - DNA, 663 bp, Oryza sativa
  Clone ID: PAT_MRT4530_29960C.1
ctctcccccgcgcttgcccgattcattaatcccagctgcacgaccagtttcccgactgaaagcggcagtgagcccaacgcaattaatgctgagttagctcactcattaggcaccccaggctttacactgttatgcttccggctcgtatgttgtgtggaattgtgagcggataacaatttcacacaggaaacagctatgaccatgattacgccaagcgtctaatacgacgtcactatagggaaagctggtacgcctgcaggtaccggtccggaattcccgggtcgacccacgcgtccgagatctctagctattcgcatcccatcgatgcatcgtaggcggcctgcataggaggaggagggcaaggagcacagcaagcaggtaacctgcctgtgccggaaggttgcaccgaccctgttgccaagaacttcgacccaacggcgaggagcgacgacggcagctgcctttacaccttttaagcaggccggcttgacgcttgctattaattatttctcctttttatgttttctctttgttctgtgtatcagatcgcgcccaagccatagctgggcatgacaagtttttgttaataataatataatataaagatatgggctatactatacatgagtatatttcatttgggtaaaaaaaaaaaaaaaaaaa

SEQ ID NO: 25034 - DNA, 341 bp, Oryza sativa
  Clone ID: PAT_MRT4530_29961C.1
ccaggaaggggttatttccaagggggccattaatccaaaacaactttttggaaaaaaaatgaacccattttgttaaaaaaaaggggttatgtccccggaccacagggggaacccggaggggaaaaccgaaccttaaagcctgccaggggctttgatgggaaaaagtttaaagggggaaaaaaaaaaaaggggcccgggaaataggcttggggtgaaaaaacaaaaatttttcttttaaaacacgcttaaccggcttttgaaaaaaaaaatgggggggaccccgggtttaaaatttggggggttggaaaaaacctttcttgggctttttttcgggtttaaaa

SEQ ID NO: 25035 - DNA, 133 bp, Oryza sativa
  Clone ID: PAT_MRT4530_29962C.1
atgacgttgtggtcggtatcacgcagtggaaggtcgctgattgcttcaggggcgctggacgatgtggctgtgccattccgcgagaccacgcagtctcgcaccattgctgcgcgagaccgcgcggtctcgcgcg

SEQ ID NO: 25036 - DNA, 1351 bp, Oryza sativa
  Clone ID: PAT_MRT4530_29963C.1
actagtggatcccccgggctgcaggcttgttttccctttctttttttttttcttttttttgtttttgttttttgttttttttttttgggactccaaaccaagcaatcgcatttatatccaaatgatccgttggttgagagagcatgagtacataactttcttcatgtattgggacacataattttctgacatagtacgtccactcttgtcaacatgcaagatcaaaggacaaaccaaatatacagtgtttaaagtggctccgatagtgagagcacaaacaagataccaatacattcatggaatcaatagtatcttgccaatgtgggaactttcttccatcaacttgtgagcttcagcagcttctgacagaggaaacgtcttgtatattactggtttcaccttgccttgcacaacggcaggccatacatttttctccacctcactgacaatcagagctttattatcaaggcttctgttgcgtagtccagcagcttgtatggtcaatcgtcgagcaagcatgggttgcaggttcacttcagttacagcgcctccttggaaaccaatgatgaaaagtctaccatcaacagctaagctgttcaggttacgctgaagatacaatccaccgatgttgtccagaatgacatcgacacctggtaaatatacttccatgtcaagagtcacctttccatttgtttcttctttgacacgtgcaacgaaatcttcagttttgtagtttatgcatacatcggcacccaaacctttgcaggcagctagtttttcctcactacctgcagtaacaaaaaccttaattccaaggtgctttgcaatctgtatagcaaatgtaccaattccactcgatccaccatggatgaggaacgattcgctgggggagaggtggctggtcacgaagacggtcgaccagacggtgcaggccacctcgggcaagccggcggcgtccgtcagagacaccccctccggcaccgggagcagctgccccgccggcaccaccaccttctccgcatacccgccgctgctgagcagcgcgcacacctggtcaccgacggcccagcgggaggggacgttagggccgagggcgaggatggtgccggagcactcgaggcccgggtaaggggacgcgccgggcggcgcggggtaccggccctggcgctggacggtgtcggcgcggttgacgccggcggcggacaccccgacgagcacctcgccttcccccggcggcgggaggccctccccgacgtcccgctcctccagcacctccggcccgccggcgcgcgcgatcaccaccgccctcatctctccccctacctcgtcggggctcagccggacgcgtggg

SEQ ID NO: 25037 - DNA, 744 bp, Oryza sativa
  Clone ID: PAT_MRT4530_29964C.1
cagcggtgaaggcaatcagctgttgcccgtctcactggtgaaaagaaaaaccaccctggcgcccatacgcaaccgcctctccccgcgcgttggccgattcattaatgcagctggcacagacaggtttcccgactggaaagcggccagtgagcgcaacgcaattaatgtgagttagctcactcattaggcaccccaggctttacactgttatgcttccggctcgtatgttgtgtggaattgtgagcggataacaatttcacaccaggaaacagctatgaccatgattacgccaagctctaatacgactcactatagggaaagctggtacgcctgcaggtaccggtcccggaattcccgggtcgacccacgcgtccgccttggcatatggtctcaaatcccatgggcttttttttgctgtttctgtaaattgcaaaatcaatacctagactcttacacatggatctggacctagagactacaagactacacacgcagatcgtcatcgcagcaactgtgacggcttggagttcttagtcactgggaagggctgtggcgaaatttgtagcaatgacactgccctcactgtaatttattgtgctctctgtaatttttccattgatggttcttagtccattgactccattcctgttgaagaacagataattttccattttgtcataccattattatatgatccattttttatatagtcagataacaagagaagtacctcaaaaaaaaaaa

SEQ ID NO: 25038 - DNA, 2032 bp, Oryza sativa
  Clone ID: PAT_MRT4530_29965C.1
ccgacctcgaggtcgccgacgacccggatctcgtcgccctccgctccatccgcatccgcgtgcccaagcgcaagatgcctctccccgtcgagagccacaagaagaacacagtggaaatggagttcttcactgagtatggagaagcaagccagtaccagatccaggaagtcattggcaaaggaagttatggagtagttgctgctgcagtagatacccgcacgggtgagcgggttgcaatcaagaagatcaatgatgtgtttgagcatgtatcagacgctacgcgcatattgcgtgagatcaagctccttcgtctgctccgtcacccagacatagttgagatcaaacacattatgcttcccccttctcgaagggagttccaagatatttatgttgtttttgagctcatggaatcagatctccatcaagtcatcagagcgaacgatgacctcaccccggagcactaccagtttttcctgtaccaacttctccgtgctctcaagtacatccatgcagctaatgtatttcatcgcgatctaaagcccaagaatatactggcaaactcagactgcaaattgaaaatatgtgatttcggacttgcccgagcatcattcaatgatgccccttcagcaatattttggacggattatgttgcaacgaggtggtaccgagcacctgaattatgtggatcatttttctccaaatacactcctgcaattgatatttggagtattgggtgcatatttgctgaacttctcactgggagaccactatttcctgggaagaatgttgtgcaccaattagatattataacagatcttcttggaactccatcatcagaaaccttatccaggattcgaaatgagaaggccaggagatacttgagcaccatgcggaaaaaacatgctgtccccttctctcagaagttccgcaatactgaccccttggctcttcgtttgctagagcgtttactggcatttgatcctaaagatcggtcttcagctgaagaagctttggctgatccgtacttcgcaagtcttgctaatgtggaacgtgagccctcaagacatccaatctcaaaacttgagtttgaattcgagagacggaagctgacaaaagatgatgttagagaattaatttatcgagagattttggagtatcacccacagatgctgcaagagtatatgaaaggtggagagcagattagcttcctctatccaagtggggttgatcgcttcaaacgacagtttgcacaccttgaggagaactacagcaaaggagaaagaggttctccactgcagaggaagcatgcttctttaccgagggagagagtaggtgtatcaaaggatggttataaccaacaaaacaccaatgaccaagagaggagtgcagattccgttgcccgcactacagtaagccctccaatgtcacaagatgcacaacaacatggatctgctggccaaaatggtgtgacatccacagacttgagttcgaggagctatctgaagagtgcaagcattagtgcttccaagtgtgtcgctgtcaaggacaataaagaaccagaggatgattacatctctgaagaaatggaagggtcggtcgatggattgtctgaacaagtctccaggatgcactcctagtgcacaacgatgacgatgatcagtgcaagattctgtgaggcgcaccagatgctgataatttccaagcagaatgctgcactgcaagtttggactttggacaatgcaagtatgcaacagccagcccgagatgattggcatcttcttatgctcatccatgttcacatattcttcttgccattgtgctgtctgtcactacaggacccctgcatggattaatgtattatccctctgatgtaacactagattagtccatctgtccatggaggaatgaatagcaagcagccagcttgtgcatcatgtgggcatgttcattttccagtgagatctagtcatatccatgctttttttgtaatggtatatgaaacagtttatcagtgaaaaaaaaaaaaaaaaaa

SEQ ID NO: 25039 - DNA, 516 bp, Oryza sativa
  Clone ID: PAT_MRT4530_29966C.1
atggagcgcctcctgcacttccggcccccgaaaccgacctctgccaatgccgttgcagcggcggctaccgccgacggcgacctcctcgagctcgacgtgctctggcctgcatcccgcgccccgggcctcctcgcggcgctccctgaggaggacgggaagcggaggaggaagcgcggcgggagcgggagcgggagcgtggccgtccgatccgcggcgcggcctatcccggagaccgccgcgttgaccctggtcccgtcgtcgtccgcggcggcgatggcgaagtcggcgccggtgaggataccgtcggaggcggcggcggcgcgtaggggggtgatgtgggcggcgcaggcgggcggcgaggacggggaggcggccatggtcccgccccacgagatcgtggcgcggcgcgccgcggcgcacagctcggtgctggagggctccgggaggacgctcaaggggcgcgacctccaccgcgtccgcaacgccgtcctccgccgcaccggcttcctcgactga

SEQ ID NO: 25040 - DNA, 2782 bp, Oryza sativa
  Clone ID: PAT_MRT4530_29967C.1
gctttcttcctcctcgccttctgcttctgcatccatccatccatccattactcgccgaagacttcgcgcggggagagaggaggcaagctttgtcgcgggaacgcgggaagaaaggtccgagcttggaaggagaagaagaagtagccaagaacgcgagagcttggaaggcgagctgcggtggtgtagctagccaatgccggcggggaactggtagggagggggatggggggagggggcacgctcgtcgacggattccgccgcctcttccaccgccgcacggcgtccggctccaaccagtcgtccaacgccggcgaggaggccgcctcctccgacctcgaggtcgccgacgacccggatctcgtcgccctccgctccatccgcatccgcgtgcccaagcgcaagatgcctctccccgtcgagagccacaagaagtttgggggtgaaatgaaagtttcaggctttctcgtgatccttgattcgtggccacgaggggttcttagactagatcagatcttcgtggcacctgaattacttgcatactgtacaatatcattatttctttttttctatgatctgtgcaaagtgcaatacagctcaagtgcaggtttgacttggtctggcctatgtatatctctggtacggactgtttctattgggaacaagtcgcgtcttgcacatggtatggagcagaacacagtggaaatggagttcttcactgagtatggagaagcaagccagtaccagatccaggaagtcattggcaaaggaagttatggagtagttgctgctgcagtagatacccgcacgggtgagcgggttgcgatcaagaagatcaatgatgtgtttgagcatgtatcagacgctacgcgcatattgcgtgagatcaagctccttcgtctgctccgtcacccagacatagttgagatcaaacacattatgcttcccccttctcgaagggagttccaagatatttatgttgtttttgagctcatggaatcagatctccatcaagtcatcagagcgaacgatgacctcaccccggagcactaccagtttttcctgtaccaacttctccgtgctctcaagtacatccatgcagctaatgtatttcatcgcgatctaaagcccaagaatatactggcaaactcagactgcaaattgaaaatatgtgatttcggacttgcccgagcatcattcaatgatgccccttcagcaatattttggacggattatgttgcaacgaggtggtaccgagcacctgaattatgtggctcatttttctccaaatacactcctgcaattgatatttggagtattgggtgcatatttgctgaacttctcactgggagaccactatttcctgggaagaatgttgtgcaccaattagatattataacagatcttcttggaactccatcatcagaaaccttatccaggattcgaaatgagaaggccaggagatacttgagcaccatgcggaaaaaacatgctgtccccttctctcagaagttccgcaatactgaccccttggctcttcgtctgctagagcgtttactggcatttgatcctaaagatcggtcttcagctgaagaagctttggctgatccgtacttcgcaagtcttgctaatgtggaacgtgagccctcaagacatccaatctcaaaacttgagtttgaattcgagagacggaagctgacaaaagatgatgttagagaattaatttatcgagagattttggagtatcacccacagatgctgcaagagtatatgaaaggtggagagcagattagcttcctctatccaagtggggttgatcgcttcaaacgacagtttgcacaccttgaggagaactacagcaaaggagaaagaggttctccactgcagaggaagcatgcttctttaccgagggagagagtaggtgtatcaaaggatggttataaccaacaaaacaccaatgaccaagagaggagtgcagattccgttgcccgcactacagtaagccctccaatgtcacaagatgcacaacaacatggatctgctggccaaaatggtgtgacatccacagacttgagttcgaggagctatctgaagagtgcaagcattagtgcttccaagtgtgtcgctgtcaaggacaataaagaaccagaggatgattacatctctgaagaaatggaagggtcggtcgatggattgtctgaacaagtctccaggatgcactcctagtgcacaacgatgacgatgatcagtgcaagattctgtgaggcgcaccagatgctgataatttccaagcagaatgctgcactgcaagtttggactttggacaatgcaagtatgcaacagccagcccgagatgattggcatcttcttatgctcatccatgttcacatattcttcttgccattgtgctgtctgtcactacaggacccctgcatggattaatgtattatccctctgatgtaacactagattagtccatctgtccatggaggaatgaatagcaagcagccagcttgtgcatcatgtgggcatgttcattttccagtgagatctagtcatatccatgctttttttgtaatggtatatgaaacagtttatcagtgagactgtggtccattcctctttgaagaactgctgagacagtgatccattcctctttgaagaactgttcattttcggtacattaagcctagtaaagttcagatgtttgagttcggtgcttaaaaaaaaaaaaaaaaaaaaaaaaaaaaaaaaaaaaaaaaaaaaaaaaaaaaaaaaaaaaaaa

SEQ ID NO: 25041 - DNA, 437 bp, Oryza sativa
  Clone ID: PAT_MRT4530_29968C.1
atcgcgagcggccgactagttccggcaaaaaaaaaaaaaaaaaaaaaaattaaaaaaaaaaaaaaaaaaaaaaggggggaattttaaaaaaaataaagggcgtccgttcttttggggtcccccttttttacgttctgcttgcctccttcgtcgctttgctatggtgtcccctttttttagtgtcctggccgtccttttccatcgccgtgtttgggcaacccttggcttggccaacctttgtcgtttcccaacttattcccctttcgccagctgccttttttgccaggtggccttgtcggttcgtgctcccctccattcgcccttcctgactggggtgtggcccgccccctttatgggccccttcttttcgcggggttttttgtttgcccgctgtgttacttttccccttttttgcccctttccttccgttccttttt

SEQ ID NO: 25042 - DNA, 1584 bp, Oryza sativa
  Clone ID: PAT_MRT4530_29969C.1
ataaacatgtgtgatcttcattacaaaacacaattcaacaatatagaagatataaaagaattgatcattagtggtatgccaagatgaggacaatcaaaaagagcacctcgactacatgcacatttcaaggcaagacgggggagcatatcaggattacacaaagtgggatcaagtaaaataccatagcagcatgagatttttcacattggaagtggtaatgcatgcgagctcttggatcatatattgatatctgctcggttcgttctactactgcttgcgtcaggaattgccgatgaggagaacctgtgatatctgtagttctctgaagacgatgacattggttgctgcgggtagagagtgggtggtggagttagattccgctgagcaggcaatggcgtaacgccactgtatttgtaactctggccagcgtagcttttcctttgaaacaggtcatcatcattcgttgtttctacaggaagaatggtatcctctctgggagtgagggaccatgggctaggagcaggaagctcgtttgaaaaatatcttctccttatcaacatgcggaagaacttaaccaaagcttctttgtcatatcttgccactttagcagccgtgagcaaaccagaattgccagggaagctttctgcaagtggaagttcttcactggatggaagtaggccttgcttctcaacccattgacgagcaacatcaacaagatttccactgctaactcttttaccatctcttggagcaatatccaccttgttcgcaatcactaagtaaggaaccggaaggcctcctggaccaccagacccaagaggagctgaaaaggtccctgattcagcaacctccactgcccacttgttcaaatttgtctttgttttcctctgagagaggtcataaacaaatatgacaccattaatttgagaataaaaaagtgatcggcactctttgtagcgctcgtgtcctgaaacgtcccagagctcaacaaaaaagtttctttcagcatcacccttaatgctattaatgctattagaagaacttccaggacttccataagtaatatgctgaaattgagggaagacttcaataaaaatatatttaacatcaactgcgcatccaatcgtttggggtggtcgagcaattgcagagcctttcagaatgagatgaaccaatgatgatttccccacacctgagtcgccgacgacgagcacgcgcacctggccgcagggggtgccgccgccgttgaggtcccggcctccgccgctgccgcccccgccgctgtccctccagaacctcatctacctcctcctcctcctcctcctcctcctcctcctcctcctcgccggaggcgcccccccaagaaagaaccagacagcagcagcaagcagttgcagcgacgggggcagctagatcgccggatcctgaggcggcgacgctggccgcatcgagggaagggggaggaggagggatccggggttgtgggaggtggggggaagagatcctgtggttggtggtggtgggggatccccggtggcggcgctgcgggtggtggtgagcctcgtgccgaattcctgcagcccg

SEQ ID NO: 25043 - DNA, 234 bp, Oryza sativa
  unsure (1)..(234): unsure at all n locations
  Clone ID: PAT_MRT4530_2996C.1
atccgccggtatgtttgaaggtatcttacgaggtagaccatcccgatccccnctggaccaagctgttcgtcgtcgtcgtcggagtactacgccgcnagggttcgtcgtcggacccagggttactacggcgagggttcttcggaggaggctactacggcgacgcagcaacacgcacccggggatgacccgcgtggagctgacacagggcagagccaagtacgcgggcagcaagct

SEQ ID NO: 25044 - DNA, 836 bp, Oryza sativa
  unsure (1)..(836): unsure at all n locations
  Clone ID: PAT_MRT4530_29970C.1
gcaagaagaggttattgagggccttcagcanccgatgggacttcaaaacctagaaatctttcgttaccaaggttctaggtacccaagctggatggtggataagcagaccggcctgaagaaccttcgcgtgcttgctcttagcaactgcagacaattgaaacctgctccagaactttttgagctgttggttcatctgcagtcgttctcgctctgtggctgcagctgggacaccttgcccgataatatggagcaactcatgtccctccaaaatctgatgatctatctgtgcacgaatctcctgtcacttccaactttaccccggtctctggcgcatcttgtaattgggaattgcgacccttggttcacaaggtcctgtcagacaattgcgcatgaaaactggcaaaaggtccagcacattcccaacaaaggaatattttgcgacggtgctttattcgcgattctgcggcaaagaaatcattaaatccagttgctttgccccctcctgcaaacagccctgagcctgccaaacagacgtcatcccaaggatggataaaggatatacggtcatgtatccaaatggtaccttaaggagatctgtccgatatattcaagatttgctcattgtgatttgtggttaaagagttatatgagtactgtactagctaccatatcctaaatggtgacaataaaatgtgaaccattaatgtatttttgtttcttgagtccaggattagtgtggagtgtgaaatcattgttatgattaatatttgtgatgaacaattggctttgcaaaatgatttaatcgatgaattggtttgaaaaaaaaaaaaaaaaaa

SEQ ID NO: 25045 - DNA, 644 bp, Oryza sativa
  Clone ID: PAT_MRT4530_29971C.1
gttagggtcgcaggagggcgggaaagagaggcgcacgcgtcgcgccgtcggctccccgctcctgggggccggcgccggtggccatcgacgcgcctgaggccgcaggcatcgaccgcccggggccgcattctccccgccccgggggggggcccctcggctcctcgccctccctgctctacggctggggggccgagccatgtccctcttcggctctccgtggcgaccgagaccggcgagccccccctggctcgtgctggctctcgccctttcagcctttgcagctcttcttcggcccgggcaaagggcaacggctcttatatccagctactgtggcatcatgcggagcacattgtgtttcggcatggccactgaacagggtgcgaagcaccgacaactgatgtgcaagccgtgcctgaaatattaggcccattggccgatgcccgcggtgcgggccgcaggccatcgaagattcacaagccgacagtgcatctgtgcgataggaagctatgtcgtgaggaattggagcctggatagactgagtcggggatgctactctgactacaagctgactatggggaaacaatgcgatataccgctaagttagatctgcatactgctgccatagggtgatcaccggggatcgt

SEQ ID NO: 25046 - DNA, 339 bp, Oryza sativa
  Clone ID: PAT_MRT4530_29972C.1
gtatcggcggcggcgcagcccaagcggcgccagcgatggcgggagctcggcggcacacgagcgaaggacgacacgcgggagctcgacggcgctacgaacgagagatggcaggaactcggcggggcggatctggcctcctcttcctccggcgccaacagcgaggttaggtgccgccgccaccgcctcctcttcctctggcgccgccccatcaagctcaccaaatccggcctcaagttcaccggatctggcgagtggcaccattttgggggctcggcgcggtttgctcggggcggtggcctcgccggtgaccgagaggaggagaacgttggaggggaatag

SEQ ID NO: 25047 - DNA, 232 bp, Oryza sativa
  Clone ID: PAT_MRT4530_29973C.1
cagggggatcttatttatacaacaccacacatcactgcacgtccatcaaccgagagaaatggctggcccacggggaaaaacaaccacgcaccgactaccatagagacagacattgccagacaaaaaaactcacccattacacgacgaaaaccaatcaacgtcgaaaaaacaaacccggggggggacccacctccatagcccgcacacaatcaaggaatgtgccggcccaaaa

SEQ ID NO: 25048 - DNA, 186 bp, Oryza sativa
  Clone ID: PAT_MRT4530_29974C.1
atggggcaccatagagtagtcgtgagcgaggacgaactaaagatgatgacggtgacgagaatgcggtggtcgttaaggaagatgacaccgaagagtcgatgttgccgaaccgtggaggacgagacgttccgccggaggagactagcagagaaggcctccgagatgatcgtggcgcgagagcagtga

SEQ ID NO: 25049 - DNA, 2766 bp, Oryza sativa
  Clone ID: PAT_MRT4530_29975C.1
atgtcattcttgtgttcttctgagcttagggtgcgggcggcgttgcgcgcgccgacgctgccgtcgcagaacgccgccgttgcaaggatggccggccaccgcgccggcgcgacgaagggcggcgtgtccgcggtgtgcgagccgctggggcccgacaggccgctctggttccccggcagctcccctcctccgtggctcgacggcagcctcccgggagacttcggtttcgatcctcttggattagggtcggatccggagctgctgcggtggttcgcgcaggcggagctgatgcacagccggtgggcgatgctggcggtggcggggatcctggtcccggaggtgctggagaaatgggggttcatggaggactactcatggatcgacgccggcgcgcgcgactacttcgcggacccgtggacgctgttcgtgtcgcagatggcactgatggggtgggcgaaggggcggcgggtggccgaaaatttactcaaccccgggtgcgtcgccgtcgagccgcggctgcccaaccggaggaaccccgtgccggacgtcggctaccccggcgggctgtggttcgactggggcaactggggccggggatcgccggagcccgtcatggtgctgcgcaccaaggagatcaagaacgggaggctcgccatgctcgccttcgtggggttctggttccaggccgtctacaccggcgagggccccattgataacctcctgcatcacctcgccgaccccggccactgcaacgtcttctcggtgcgtcgcgacgtggcggcggcaacgcgggagaaggggagggcgtcggcggcaggagtacccggggggggagtgaagggaaagcatggcggtgggcacaaaggcggaggcggggccgagcgccgtggtggttcgcttggaggtgggtgccgcggcaccgaaggcggactcgatgtaacggagctggaggtgaacgacaggggcgaggtggaggaggcctcatatgggtggttcaatgtgggcacggatggtgccggtgtgagggcggattggctcgccacataccgggcccgcgccgcgtcggtgctcgtcggctccaacagtctatacaaccgctgcctctctttctcccgtgttgttgctgccaccggcatgatggatggatccaccgctgcggcggcggagctggaggcggcggagagggtggtgatgaggtgggactccacggcgtcggcgtcctacgggggcgggggcggggacgagcagatgctgttcgatggcggcggtgaccgggtggaggcggagcggttcctccgggctgtggatgacctacggcggctggcgccgccgtccccggccacggtcgggagcccgcgccgcacctcgtcggctagcggcggcggaggggcggcgtccaacgccgtccaggtcgcgatggcgcggctggaggacgagttccgccacgtgctgtcgtcgcgcgccctcgacctggagatcgaggcgctcgccgacctcacctcgctctccatgtgcagcgaccggaccaactccgcggacgtcgccgaggaagcggcggctgcggacgaagacgactccgtgtcgtcctccgtcggccgccgcagcagctaccgctcgctgcgcagcatccgagaaatcgatctcctccccgcggacgccatctccgacctccacgccatcgcctcccgcatggccgtcgccggctacggccgcgagtgcgtccaggtgtacgcctccgtccgcaagccggccgtcgactccgcgctccgccgcctcggcgttgagaagctcagcatcggcgacgtgcagcggctcgagtgggaagtcctcgaggccaagatccgccgctggatccgtgctgcccgcgccgccgtccgcggcgtcttcgccagcgagcgtcgactctgcttcctcatcttccacgaccttcccctctccagctctaccatcaccactgccacccacgacgctcccttcgcggaagccgtcaagggcgccgccctgcagctcttcggcttcgccgaggcgatcagcatcggccgccgctcaccggagaagctgttcaagatcattgacctgcacgacgcgatcgccgatctgttgcctgacgtctccgacatctttgctgcatccaaggccggggaatccatatacgtgcaggctgccgagatcaggtcgcgtctcgctgatgccgtgcgtggtatactgtcggaatttgagaacgctgtgcttcgtgacccgtcgaagactccggtgcctggtggtaccatccatcctctcactcgctatgtcatgaattacagtagcctcatttctgactacaaaaccacactgtctgagctgattgtgtcgcggccattggcttgctcccgaattgctcctgagggcaatgagaatgccccatccttccctgatcttgaccttgccgaccctgacagtcagttaccccttgctgctcatcttatctggattattgtggttcttgagcacaatcttgagagcaaagcatcactctacaaggatgcggcactctctcatttgttcgtcatgaacaatgtacactatattgcacacaagataaaggattcaccggagctccgggggcttattggtgatgagtatttgaagcagctgacaggggtatccaaatcagcactccgggagcgtttcaagtctttcaatgctgcattcgaggaggcacatagggagaagatcccatggatgagaggtggcttgaagactcaaaagatctctattgttgactga

SEQ ID NO: 25050 - DNA, 402 bp, Oryza sativa
  Clone ID: PAT_MRT4530_29976C.1
gcaaagaattcttgttcaatttgcgttttgaattttttttgaatccataaatctgttttgtttacggggaaagcgaacttcagttcctcactaaggcgcctggttttgtataaaaattgcaacaaatttggggggcgcttggtttctttttaaaaaaggaaaaggccatgtttggctgccccgccagtttcggaaacaaaaaattttgtggatcaaataatttaaaaacccgtttccccctggaaccaaaaaaccagccccggtttactcattgaaatgcaaaggctattggattccgccaaccaaaagaccgggcccttggaaaaacccgatcctttggaccccccggatctggaacgccggactgaaaagcgagaaggaatcctatccttttcggacttt

SEQ ID NO: 25051 - DNA, 2904 bp, Oryza sativa
  Clone ID: PAT_MRT4530_29977C.1
atgtcattcttgtgttcttctgagcttagggtgcgggcggcgttgcgcgcgccgacgctgccgtcgcagaacgccgccgttgcaaggatgtctggccaccgcgccggcgcgacgaagggcggcgtgtccaattaggataatgattttagaggaaacaaagtattctaatcaaaatgtaattgatttcttttattcattgcctaagcctcaacctggtgtgtccatatcatcagagaaaccaacacaggtgcatcatcagggagacagtaagctgcttggcgttcacattgccaatacaaaaaacaaaattctccacgcaggaaggtaacaagcaatccaactcaaccgttgacttgtctttgtacttcggtgcagtttttattacaaaaagcaagaataacattcattggtatgcttacagcgccggctgtcactggaaaagaaaaccattatggagtgtccgagcatttcaaaatgccttgagagatttatggcctacaggaagtttctgatgtccaacttcttgacatcaggcatctcctcgtctttgaactcctccctctttagttgaacctccattgcttcaacacattccttcttaagctccgtcagctcacttttggcaatttccaattcaagctcttcctcaatcttgggaagatcctccttgcggattccaagctttttgtttatcttctcaaactctgccaagaggagacccatattcttcttgtcactcctcagaagtggcttcttaatctccttctcaactttctcaagggcttccatcatcatagcctcagcacccatatcatctataaggccactctttatcctgatctcctgaagagtattcaagtaagtccgtgcatcagggatgccctttgtaaaggtgtcgatggtatatttaatcctctcagagtcggatagaagatctgccttttgtcttacagtcttcatgacttgggcataacgagaaactgctgcaggatcatctggatcaatagtgatcttttccttcttaagtacaccaagggcagtctcaaatttcttctttacctcaaaaaatatgcccttcaataggtcatcaccattgacgggagtacgatctgcctccttggcatacaagcggacttgagtggcacctccatttgccaaggcagcttgagcagagtatagctgccgggagcgggagacgaggcgagcggccaacgccatggctgcggctgcctccgcttcgctgctccgatctcacccaaacctccaagctccgcggcgagagcgagagcgagagagagagagagatgggggcgcgcggcgatcggtccaactccgcggacgtcgccgaggaagcggcggctgcggacgaagacgactccgtgtcgtcctccgtcggccgccgcagcagctaccgctcgctgcgcagcatccgagaaatcgatctcctccccgcggacgccatctccgacctccacgccatcgcctcccgcatggccgtcgccggctacggccgcgagtgcgtccaggtgtacgcctccgtccgcaagccggccgtcgactccgcgctccgccgcctcggcgttgagaagctcagcatcggcgacgtgcagcggctcgagtgggaagtcctcgaggccaagatccgccgctggatccgtgctgcccgcgccgccgtccgcggcgtcttcgccagcgagcgtcgactctgcttcctcatcttccacgaccttcccctctccagctctaccatcaccactgccacccacgacgctcccttcgcggaagccgtcaagggcgccgccctgcagctcttcggcttcgccgaggcgatcagcatcggccgccgctcaccggagaagctgttcaagatcattgacctgcacgacgcgatcgccgatctgttgcctgacgtctccgacatctttgctgcatccaaggccggggaatccatatacgtgcaggctgccgagatcaggtcgcgtctcgctgatgccgtgcgtggtatactgtcggaatttgagaacgctgtgcttcgtgacccgtcgaagactccggtgcctggtggtaccatccatcctctcactcgctatgtcatgaattacagtagcctcatttctgactacaaaaccacactgtctgagctgattgtgtcgcggccattggcttgctcccgaattgctcctgagggcaatgagaatgccccatccttccctgatcttgaccttgccgaccctgacagtcagttaccccttgctgctcatcttatctggattattgtggttcttgagcacaatcttgagagcaaagcatcactctacaaggatgcggcactctctcatttgttcgtcatgaacaatgtacactatattgcacacaagataaaggattcaccggagctccgggggcttattggtgatgagtatttgaagcagctgacaggggtatccaaatcagcactccgggagcgtttcaagtctttcaatgctgcattcgaggaggcacatagggttcaatctgcttgcagcaaagacagcgacgaggcgacggcgaggacagtgcgaccacccgtgagccgcggcggccgtgcgtcccgtgagcagagcagagagcagcgcggggaggcagcagagacaggagccactgcttttgcaaccaaccgcatcccgcgaccagcagcggttgtccgagtcggtggtagacgacgcgaatcacgcgatcgggctgcatgcgcggcgccggtcgcgtccgcgtcggcgcagccgcaggcaggcggcaaccggaggctggaggcacatctgtcgcgttggggtcgggtcgggacgggacgccatgtggagaagttccggctcgcagccactcgctatcaacggacagcatggttgaagatcctgaattgtctgagag

SEQ ID NO: 25052 - DNA, 1682 bp, Oryza sativa
  Clone ID: PAT_MRT4530_29978C.1
cgttagtcctgaatccctgaccttcagacaaatcagaaggtgccaatgcagaagagacactaaatcttggtttgttttcatcacctccaagaaacagaaaattctcctataaaaccgaatggatcttgcagacttatcgacacccctccccgagtggtttagtgaggaggatcttgatgtctactcatccctctatgagaagtctggttttcgatatccgctacagatgccatataggtccatgcatcaaaacaaaccaattggagatgcaaaatttcaagtcccggtgtttgttgtcatgggagagaaagattatgtcttcaagatacctggtatcgagtctgttatgaaagacggcagcatggagaagcatgcaccagacctaaagatcacctacattcctgaaggaagccattttgtgcaggagcagttccctgaggtgagcgtcacgagcgcactgctgcggcgagagctagctcgagccggccggaagccatggccacggcggagcagcggcagatcgagcacgtccacctccccgtgcgggggctcaccctccacgtcgcgcaagccggcaaaggggagctcgggacggtggtgttcctgcacgggttcccggagatatggtactcgtggcgccaccagatgctcgccgtcgccgccgcagggtaccgcgccgtcgcgccggactggcgtgggtacgggctctccgaccagccgccggagccggaggcggcggtgtacgacgacctcatcgaggatctcctcgccatcctcgacgccctcgccgtgcccaaggcattccttgttggaaaggattttggggcaatgccagcttacgactttgctctccgtcacccaaaccgcacatgtggtgtgatgtgtctgggcatccccttaggcactgctggtttgtcctttgacacattgccagaaggattctacattttacgttgggcgcaaccaggaagagcagaagctgactttggcaagtatgatgtaaagagagttgtgcgcaccatctacatactattctctaggagcgagatccccatagctaaggaaaatcaagagatcatggatcttgcagacttatcgacaccccttcccgagtggtttagtgaggaggatcttgatgtctactcatccctctatgagaattctggttttagatatccgctacagatgccatataggtctctgcaccagagaaaaccaattggagatgcaaaattccaagtcccagtgtttattgtcatgggagaaaaagattatgtctttaagttccctggtatcgagtctgctatgaaagacggaactatggagaagcatgcaccaaacataaagatcacctacatccctgaaggagggcattttgtgcaggagcagttccgtgactatgtgaatgagctccttcttggcttcttgaaagatcatcctgtggttatataaatgctattgtagcctcagttgtgcttcacccgtagttcaagttggcttagaaaacgttgtgctatatcatggtatgaatttgtcaacaaactaaggatcagttatggctagtttgttactttcagtaatgcctatttgagcttgtgttgtatctaggttgtcctgctggtgttactagcaatgtaaagactaaacccattgctatacttctaccatgacttttgcaagcc

SEQ ID NO: 25053 - DNA, 1278 bp, Oryza sativa
  Clone ID: PAT_MRT4530_29979C.1
atggatcttgcagacttatcgacacccctccccgagtggtttagtgaggaggatcttgatgtctactcatccctctatgagaagtctggttttcgatatccgctacagatgccatataggtccatgcatcaaaacaaaccaattggagatgcaaaatttcaagtcccggtgtttgttgtcatgggagagaaagattatgtcttcaagatacctggtatcgagtctgttatgaaagacggcagcatggagaagcatgcaccagacctaaagatcacctacattcctgaaggaagccattttgtgcaggagcagttccctgaggtctctcttcccactgcagtgctgccgcgtgagcgtgaccgcgtcgtcgtccacggcgagctcgacaccatggccgccgccacggagcagccgcagcagatcaccgagatcgagcacgcccacctccccgtgcgtgggctcagcctccacgtcgcgcaggcgggcaaaggggagctcgggacggtggtgttcctgcacgggttcccggagatatggtactcgtggcgccaccagatgctcgccgtcgccgccgccgggtaccgcgccgtcgcgcccgactggcgcgggtacgggctctccgaccagccgccggagccggaggcggcggagtacgacgacctcatcgaggatctcctcgccatcctcgacgccctcgccgtgcccaaggcattccttgttgcaaaggattttggggccttggtagcttatgattttgctctgtgtcacccaaaccgcacatgtggtgtgatgggtttgggcatccctttcggtaacgatgcttcatccattaacaccttgccagaaggactctacatttttcgttgggcgcaaccaggaagagcggaggctgactttggcaggtataatattaagagagttgtgcgcactatctatattctcttttctaagagcgagatccccatggctaaggaagatcaagagatcatggatcttgcagacttgtcaacaccccttcctgagtggtttactgaggaggatcttgataggaaaccaattggagatgcaaaattccaagtcccagtgtttgttgtcatgggggagaaagattatgtctacaagttccctggcgtcgagtctgctatcaaagacggcactatggagaggcatgcaccagacatgaagatcacctatatccctgaagggagccattttgtgcaggagcaattccctgactatgtgaatgagctccttcttgcattcttgaaagatcatccc

SEQ ID NO: 25054 - DNA, 797 bp, Oryza sativa
  Clone ID: PAT_MRT4530_2997C.1
cccggcctgccggctgccaggaattcggcaccacgacgcatctctctgcctcatctcaagaagaacaaagcttactatacccaagatcgatataaatttccctctgtatagagcttctttgatttcatttgctagctatgagctaccagactcctcctcctgctgccacagggtacccctacccggcgcaagaagcagggcagcagcagcagcaggcgtaccctgcctacgtggcgccgccgccggccggctacccgaccaaggacggcccgcaggagcagtaccccgccggcgccggcgccggcgagaccaccagccgcggccaccaccaccaccaccaccacggcgacggattctggaaaggatgctgcgctgcactctgctgctgctgcctcctcgacatgtgcttctgatgagcaagcatggtggttcatcgatcatgcatgcatggtgatcatgccatatgatgtgctgtgtgtgttgtgtatatcactagttcatatatactactccagtatttattgtgtacttaaattatgtgttgagtggatgtgttgagcaccatctttttgtctgatggtgtttggtttcttgctcgttcctatttcctactccagtatttattgtgtacttaaattatgtgttgagtggatgtgttgagcaccatctttttgtctgatggtgtttgtttacttgatcatatcttgttcattctgtatattaggggtcatttgtgatactctcccccgctttttccccccccccccctttttcctttttcccctcttccccttttt

SEQ ID NO: 25055 - DNA, 256 bp, Oryza sativa
  Clone ID: PAT_MRT4530_29980C.1
atggaggcggagggggcgccgactggaggcggcgcccggcggtggaggcggaggcgcgccagctcgaggcggcgcccgacggtagaggcggaggcagcgcccagcgttggaggcggcgcctggcggtggaggcggaaacgcgtcggctggaggctgcacctggcggtggaggcggaggcggcgcctggcgagcaaaggaggatgcggatggagaccgctccgtccaggatggggatgaggatgacgcactcacgat

SEQ ID NO: 25056 - DNA, 1804 bp, Oryza sativa
  unsure (1)..(1804): unsure at all n locations
  Clone ID: PAT_MRT4530_29981C.1
atggcggccatcagatgcggcggcatcgagttgaatgaggttcttgagggcgtccctgtggtgagggtaaatttccccatcaagtacttgggcctccccctagctctgggaagactgcggaaggtggacttgcaacctgtctttgacaaaattttcggaagggaatccctcgagcagctagacaagcagcggcgccgcttcctctgggcaggcacgggtgatattaccggagggaaatgcaaggaccagaccaaaccttgggtggggctggagacgccatgtgatgaaatagataggaacctcttcgccgcctcaacaaacataacaataggggacggaaacacggtgcgattttgggaggtgctcgcacacgtggcgtccaggtcagcgggcatcgcgcgcacgagctgccacgtcacccacgcgatggggcgtgcgcctctcgtgctgattggccgcgccgttcccattattggtggggcgatcccaattattgccatcaactatggaattctcgtcgcgtgctggatgctgcacatgtttgatgttgtccagagtaaattgatttgccgtgccatggcactccacttctcctggcgtagcacgtcgccgttcttggatactgtctgctcttccgtatacgatctctacaactccagtgcgattcacagggctagttgcggtgaacagctcgtcgtcaacggcacgaactgcgacctcggcgactactggcagcattctccgacgccggatttcctcgacagcgaccggatttacgccgtcctggtgctggggtgcgtttgcagcagcggcggttgtggacgtggggaggcccatgcgaagcaggggcatgacgtctccggggaaaagcggccgagtcggcgggacggcctcggccgctcgttctggtggatcatggtggcgaggaagtacgagtggtgcgtaacgtacgccgtggtggtggcgacgctgcagctgttcctgcgcctgaccggggccaacgtcaccacgcttttcctgcccatgctgtcccaggcgacaggctgcggcaaggcggcgctggccggacacgccgtgctggtgctggcgaacgccggcggcgtcctcgggtcggcgctcgccgcgaggacgtacggccgcgaggtcatgtgcgtcatcggcggcgtgctcatcgtgttctgccaggtggtgatcccggtggccatggagatgcacgggggaggcggcgcgtacncngcggcggcggcgacgttcttcgtggcgtgcgcggcgtcgggcgggtgcgggtggtcgtggggggcgctgttctgggccgtgccgggggagggtgtccggtcggcgggggacgcggtgggcgcggcgctcgggttcgcgctgggattcgcgcagacgcactgcttcctgctgatgctgcgccagctcaagcacgcggcgctcgcctactacgccgtctggatctggcacggcacggcccgactggggtcgtgcccgtgccggcccggcccaacaaccgggccgtgcttgggccgctccctcggcacggctccgacccctcagccctccacgcctccatccctcttcgtcggcgtctccgatggatgcctcgccggatctagcaccgaggggcctgataaggtggtgtatcaacctgaatccgggaaagcctccgagctttcgttttctgaagcagaaaatgacattataatccgatttatccaacatggagaattggagcggtacaagcagcaactactaccagtggtgctcccaatgatgcccgtgtttgtgcacagctccgcctctg

SEQ ID NO: 25057 - DNA, 394 bp, Oryza sativa
  Clone ID: PAT_MRT4530_29982C.1
cccacgcgtccgcggacgcgtgggtgtctatttacttgatcttatcttagacagggaggcttctaatggtgatgtgtacacccaccaccaaaatcaaataatcgagtcatctgcagagaccctgtacggataaatgcacccaaaacataaccaaaccagcaaggacctggctgaaacgatggataactcaagatctaccgatacccgaactgcccttcctccatcttctgcctgccaatggagccccacaccaacagctccatgctctccatcatccagggccaggaccacgtcggcggcctgcaggtgatcctcaacagtgcgtggctccacgtaccccccgcgcccggagagctcctagttaacctgcgcgacatgatgacggccatcagcg

SEQ ID NO: 25058 - DNA, 3171 bp, Oryza sativa
  Clone ID: PAT_MRT4530_29983C.1
atgatgcaaagcctagatattatttcctggaacgtgagggggctcaattcggctgcgcgctgtaacacgatccatgagcttatggcagacacgaagtgcagcttggcatgcttccaagagacaaagctacagaatatagatgacggtctcgcccactttttaggaggctacaagctcgacaaatttgcctttaagccagcaagaggcacgagaggggggatcctcctcttatggaatagcgcagtctttgacgtccaagaggtccgagtcggccgcttcttgatttcggcgcaagtgacggtcatactcacaggggccacatttctgctcaccggagtttatgggcccacaaggcaccacctcaaaagcgccttccttcggcacatcagaagaataaggcccggccccgaggatggatggcttatccttggagattttaacatgatctatcgagcaagggacaaaaacaacagcaacgtcaaccttgcacgcatgagacgctttcgctcaacaatcgatcgatgtgaactgcatgagattcccttgcaaaataggaagttcacctggagcaatgaacgacgaagggctacacttgttaagttagatcgctacttttgcaacgagacttgggacttggccttcccccaccatgtccttcacgccctacccacagggccttctgaccactgccctctagtcctctccgacccccaatgtccatgtaggccgagtgccttcaagtttgagaacttctggacaagaattccaggattcaaagacaaggtcaaggatgcctggtgtcagccttcgtcacacacagagcctatgcaccacctaaatgaaaagcttcatcgcaccgcgacctgtcttagagaatgggcaaaaggaatctgcaccgaggccaaactgcagtttcacatggcggtcgacgtcattaaaagactagatgtggcacaagaacatagagacctctctgcccaggaaacaagactaagagcagccctcaagcgtaagatccttggcctcgcttccattgagcgggcaaggaaaaagcaagcctccagagtaacacatatccccaccctaggggagcccttctctgaacaggaagtacatcaagcaatcaaggaaatgccaagtgacaaagctccagggccagacggcttcaccaggattttctttaaagtctgctgggaaatcataaaggaggacgtccttctggtcttcaactccatttacaatctcagatgtgcacacctgaatctgatcaactctgcgaacatcgtcctaattccaaaaaaagagggggccgagggcgtttcagacttcaggccaatcagcctaatccacagtatcgctaagatcttctccaagatgcttgcgttgcgactaaggcctcatatgcacagcttgatttcgatcaaccaaagtgccttcataaaagggagaagcatacatgacaacttcctcttcgtgagaaacatgaccagaagataccatcgattgaggcgggcgatgctgctattcaagttagacataactaaggcctttgattcagttcactgggattacctgctagccttgctgcagcgaaggggtttcccaacaaagtggatagattggctgggggctttgctatcaacttccacctcccaagtacttctcaacggcttgccagggcagcggatcaagcacggaaggggccttaggcagggggaccccctatcgccactccttttcatacttgcgattgacccccttcagcgaatccttttcaaggctatagagctcggcgcaatctcaaaaattcgggggagaacaactaggctaaggatctcaatgtacgcagacgacgccatcatcttcattaatcccacccgaggcgatgttacggccttcacggacatcctgcagcacttcggcactgcaactgggctcgtcaccaattttcagaaatcccaagtggcggccatcagatgcggcggcatcgagttgaatgaggttcttgagggcgtccctgtggtgagggcaaatttccccatcaagtacttgggcctccccctagctctgggaagactgcggaaggtggacttgcaacctgtctttgacaaaatttccagaagggtagcaagctggagaggaaaaaacatggcagcggctggaagaactacgctcatcaaatctgtgctaacggcgcaaccaatctaccttctgaccgctctgaaaatcacaaaggaatccctcgagcagctagacaagcagcggcgccgcttcctctgggcaggcacgggtgatattaccggagggaaatgcaaggtcaattggacaaagacgtgcatgccgaccagccaaggaggattgggggtcctaaatctggacaaattcacgagggccttgaggttgagatggctgtggcatgaatggaaggaccagaccaaaccttgggtggggctggagacgccatgtgatgaaatagataggaacctcttcgccgcctcaacaaacataacaataagggacggaaacacgctagtcgcactgtgggaagcggtccgaaatgtgcacttagacgttggagaaccggatcagattacttggaagttcacaaacaacgggcactacacggcctcctcggcttaccatgcgcagtgctgcggggcgccgagtacaaacttcaattccttgatttggaaagcctgggcgccggggaaatgcaaatttcatgcttggctcatcattcagaacagagtctggacttcagaccggcttgcgaccaggggatggcagaacaatggttgttgccctctttgccgccgcgagactgagacggcattgcacctcgttgccacttgtagatacaccaagaggatctggcacctcgtctctgcatgggtgggctatcagcagatggacccaacggaatgggaggaagcccggtcagtcaaacagtggtgggagaacattgcaaacacgcctagtgtcccgaaaaaaggacttcgatcgctcattctgttagtcgtctgggaaatttggaaagagaggaatcggcggatttttgatcacaaagaggtggcaacgaacttcctactaatgaaaatcaaagaggaggcgagcctttgggctttagcaggagctaagcggttgcgtgagttaatcctgcactctgtatag

SEQ ID NO: 25059 - DNA, 6510 bp, Oryza sativa
  Clone ID: PAT_MRT4530_29984C.1
ctagggagcatgatggtgctgaggaaaggggaggataaagtcgaggttgttgtgggtcaggagggtctggcacgcagtagcagaggcggagctgtgcacaaacacgggcatcattgggagcaccactggtagtagttgctgcttgtaccgctccaattctccatgttggataaatcggattataatgtcattttctgcttcagaaaacgaaagctcggaggctttcccggattcaggttgatacaccaccttatcaggcctgtatgggttctcgtggatagataggggcgcacacatgctttttgccgcagttcgtggaaaaagaaaatccgagtgccaccgtgattgatccagccaccgtcttggcgtctttatcgacggcgagaaagaccacagctgcgcatccggagcaccggagttgccgttgatgatagagatccacagatcctcggtgctagatccggcgaggcatccatcggagacgccgacgaagagggatggaggcgtggagggctgaggggtcggagccgtgccgagggagcggcccaagcacggcccggttgttgggccgggccggcacgggcacgaccccagtcgggccgtgccgtgccagatccagacggcgtagtaggcgagcgccgcgtgcttgagctggcgcagcatcagcaggaagcagtgcgtctgcgcgaatcccagcgcgaacccgagcgccgcgcccaccgcgtcccccgccgaccggacaccctcccccggcacggcccagaacagcgccccccacgaccacccgcacccgcccgacgccgcgcacgccacgaagaacgtcgccgccgccgccgcgtacgcgccgcctcccccgtgcatctccatggccaccgggatcaccacctggcagaacacgatgagcacgccgccgatgacgcacatgacctcgcggccgtacgtcctcgcggcgagcgccgacccgaggacgccgccggcgttcgccagcaccagcacggcgtgtccggccagcgccgccttgccgcagcctgtcgcctgggacagcatgggcaggaaaagcgtggtgacgttggccccggtcaggcgcaggaacagctgcagcgtcgccaccaccacggcgtacgttacgcaccactcgtacttcctcgccaccatgatccaccagaacgagcggccgaggccgtcccgccgactcggccgcttttccccggagacgtcatgcccctgcttcgcatgggcctccccacgtccacaaccgccgctgctgcaaacgcaccccagcaccaggacggcgtaaatccggtcgctgtcgaggaaatccggcgtcggagaatgctgccagtagtcgccgaggtcgcagttcgtgccgttgacgacgagctgttcaccgcaactagccctgtgaatcgcactggagttgtagagatcgtatacggaagagcagacagtatccaagaacggcgacgtgctacgccaggagaagtggagtgccatggcacggcaaatcaatttactctggacaacatcaaacatgtgcagcatccagcacgcgacgagaattccatagttgatggcaataattgggatcgccccaccaataatgggaacggcgcggccaatcagcacgagaggcgcacgccccatcgcgtgggtgacgtggcagctcgtgcgcgcgatgcccgctgacctggacgccacgtgtgcgagcacctcccaaaatcgcaccgtgtttccgtcccctattgttatgtttgttgaggcggcgaagaggttcctatctatttcatcacatggcgtctccagccccacccaaggtttggtctggtccttgcatttccctccggtaatatcacccgtgcctgcccagaggaagcggcgccgctgcttgtctagctgctcgagggattcccttccgaaaattttgtcaaagacaggttgcaagtccaccttccgcagtcttcccagagctagggggaggcccaagtacttgatggggaaatttaccctcaccacagggacgccctcaagaacctcattcaactcgatgccgccgcatctgatggccgccacttgggatttctgaaaattggtgacgagcccagttgcagtgccgaagtgctgcaggatgtccgtgaaggccgtaacatcgcctcgggtgggattaatgaagatgatggcgtcgtctgcgtacattgagatccttagcctagttgttctcccccgaattttcgagattgcgccgagctctgtagccttgaaaaggattcgctgaagggggtcaatcgcaagtatgaaaaggagtggcgatagggggttcccctgcctaaggcctcttccgtgcttgatccgctgccctggcaagccgttgagaagtacttgggaggtggaagttgatagcagagcccccaaccaatctatccactttgttgggaaaccccttcgctgcagcaaggctagcaggtaatcccagcgaactgaatcaaaggccttagttatgtctaacttgaatagcagcatcgcccgcctcaatcgatggtatcttctagtcatgtttctcacgaagaggaagttgtcatgtatgcttctcccttttatgaaggcactttggttgatcgaaatcaagctgtgcatatgaggccttagtcgcaatgcaagcatcttggagaagatcttagcgatactatggattaggctgattggcctgaagtctgaaacgccctcggccccctctttttttggaattaggacgatgttcgcagagttgatcagattcaggtgtgcacatctgagattgtaaatggagttgaagaccagaaagacgtcctcctttatgatttcccagcagactttaaagaaaatcccggtgaagccgtctggccctggagctttgtcacttggcattttcttgattgcttgatgtacttcctgttcagagaagggctcccctagggtggctaggtcaatcggtgagatgtcaagggcatcccaatttagcttatttggtcttggcgccggccgtcccattatgctcgcaaaatggtcatggatcgttgcttccttctccttatgtgtcacagcgcaaccattgtcttttttcagccgatgaatggtgttctttcttcttcgcgcattcattttgagatgaaaaaactttgtgttcgcatctccctcacagatatgtgttactctggaggcctgctttttccttgcccgctcaatggaagcgaggccaaggatcttacgcttgagggctgctcttagtcttgtttcctgggcagagaggtctctatgttcttgtgccacatctagtcttttaatgacgtcgagcgccatgtgaaactgcagtttggcctcggtgtagattccttttgcccattctctaagacaggtcgcggtgcgatgaagcttttcatttaggcggtgcataggctctgtgtgtgacgaaggctgacaccaggcatccttgaccttgtctttgaatcctggaattcttgtccagaagttctcaaacttgaaggctctcggcctacgtggacattgggggtcggagaggactagagggcagtggtcagaaggccctgtgggtagggcgtgaaggacatggttagggaaggccaagtcccaagtctcgttgcaaaagtagcgatctaacttgacaagtgtagcccttcgtcgttcgttgctccaggtgaacttcctattttgcaagggaatctcatgcagttcacatcgatcgattgttgagcgaaagcgtctcatgcgtgcaaggttgatgttgctgttgtttttgtcccttgctcgatagatcatgttaaaatctccaaggataagccatccgtcctcggggccgggccttattcttcttatgtgccgaaggaaggcgcttttgaggtggtgccttgtgggcccataaactccggtgagcagaaatgtggcccctgtgagtatgaccgtcacttgcgcagaaatcgagaagcgactgactcggacctcttggacgtcaaagactgcgctattccataagaggaggatcccccctctcgtgcctcttgccggcttaaaggcaaatttgtcgagtttgtagcctcctaaaaagcgggcgagaccatcgtctatattctgtagctttgtctcttggaagcatgccaagctgcacttcgtgtatcgtgtctggcctggttcgctggagaggcccaggaagcggctggactggttcgacaggttcacagtggcccgaaggtgttcgacgtaatgtgcggccgaaaatttggcggtgaagtccgccgaagctagcgccgatgcaggtaaagacgatgcgtagacaagatgttcacagaagacgccacactcatcggccacttccgcaactccttcacctaccagagatatcagtgccgcgtccatggcgtcctgctcgtcgtcgtcgatgccaaatatcgcagtgagggcggcgatgatgtggggtggcagcagcccattgaacatggcgatgtattgggcaaggacctgctcgatcgatgtgccgccttcgtcgttgaggatcccgagcctcttgaagagaactcgctggcaccgctccatcgtcggccttgaagtctgcttggcaatgcgtttgttgcgccgggtggcctgaccgcatttccttggctggatcttgagccgccgtgttagctggatcggatgcacgcacggtgatcttggcggcgacgctggtggcgaggcgaggattgctcgcggcggtgatgcaaacaggcatcgaggatgcccgttgagttcggcgatgccgggaccgccacctgagaagactggatgggggacggagtaggtgggagcggcgccagatggctgccattgccatccttgttgcccccttccgccaccacctccctcagatcgtgcatgaggctgacttggctttcgagaggaagcagagtcggcgaagcatgaggtggcggtgaggcggccgggatcggcttccaggctgcatgctgaaccaggcttcattccttgggtccgccgggagagcgtgctccgggagtggcggcatccccgccagagccttgttcgcgatgaaggagagccgttgtagctggtccactgacgatggcaattggggctcctctgcttggagcgcactgccgtgcagagcaaaggcgtccgtcgaggagagctgcttgctcgagtcgtagatagtgtcagccggtctccgtctaccgccgccgtagcggctagagcccccctgtcccgccgccgcagggagcgcgtgcgctcgcggcggtagtcattgtcgcttgcccgctgctcgccacagtcgtggccaagatcgcagtctcggttgtcgcgatcatcgtcccgatcaatgcggcgccagggtcgcgggtggtcgttgctggacccccgtcgcctgcctcgcccgccccggtcacggtccttgcgatcgtcgcctcgaccgcggtcatcgtcccggtcacgttcctcacgatcttcgtcctggtcgtcatcaaagtcatcacggtcgtcgtcgtcgcgagggcgcccgccccgcgccgcgcgcccacggcgagtgtggccgtccctggtgccgcggccggaccggcggtcgtcgtggtgatcgcggcgatcgtcctcgtggcgatcgacttcccgctcagtgccgccgagacggtcgtgaaccgagcggggcggcggtgggtgatgcggaaaatcctcgaacacccgtcctgggacctgctcgccgtcgagcactcccaggctccaaggcggcagccgacgcttggtcggctggaagctaccttgctcctccaggtcaattgttgccgctgtgtagtcgtggatttcttccagatggaagaggaccggatggcgcacccctctctgccagtgctccggcgggctttccaccgcgagcaggggtgccagcttgggatctttcgccctgttggtgaagctgagccacatcctcttcgggatggtgctggggttcgccgtccacgcccagaggtcgatggagcgcgtgttgccggactccaccggatggacaacgtcggtctcgatctgctccagtgcgcaggtgcggccgatgatccgctcggcgatgtcggcagcccaggcgtgcatggggacgccgtcgaggcacagccgaacgcggaacataagcgcgacgccgagcgcactctgcaggctgcgccacttgatgaaatgaatctcgatgccgcgacgcttgacgtaccctttgaccagggcctcctcacaatggcgacgatgttggaacttgatgaggaaggcctgtggatggtagagcgagacagccacctcgccccgacgaagctggaactcatctaggaaggcctgctcgacgtcgcgcggtgtagtggtcgacggcgcgtgggccgcccaggagacagccgcagtctcgctccactcgcgcagctcctcgtcaatggcgtaagaggtggggatgaagcacgtgtcctcctcggggcgcgtggccgggtcaccgagctgcgacat

SEQ ID NO: 25060 - DNA, 627 bp, Oryza sativa
  Clone ID: PAT_MRT4530_29985C.1
atgccgcagccgcagctctggaagcctggtggccacgccctcctcacctcaccctgccttcccgcgcgcggcgcgcaccgcagcagccgccgtccgccgatggggattggcggaggcgggtttggatcccgtggagttggcttcaactctaccgggattgcacaattcagagttgagtcatttgacctcctccacgtcgtgcctccatgcttccggggatcgcgcacagttgctgctgggacgcggtggttcctacccagctctcgccgggtgttgaggatcacctcgtctggcgttggacggcagcgctgctggactgccgatcttctccaaaagcgtggtattgatagccactctgcttgccccttttgcgctcaggagcttgagacagcgaaccacatcctcatcgattgcgtgttcgctcggcagctgtggaaggaacgaaactccagggttttcgactctgtgctcgcttcggtcacagtggttctagagtccttccgctcggagggccagctgtggtgttgcttgaggccacgggagagtgttgccagtgatagatcggagtcaacttggaaaaagttgatgtccagggatcaagagatcatgcggaatactaaaggctag

SEQ ID NO: 25061 - DNA, 920 bp, Oryza sativa
  Clone ID: PAT_MRT4530_29986C.1
gcttcgcgtccaagctgccgtggaaggagacgctgtcgttccggtactcatcggctggagatgaagagggcgaggagggcgtgggtgagtacctggtgcggaagctcggggcgctggtcgacgaccaccacccgagggtgtacccggacttcacgtggcgggcgctgctggacttcacgcagcgccactacagggccgacatgcgcacgcttcaggccttctccgactggcttaatcaggctaaaccttgggtggggcgggtgacgccatgtgatgaagtagataggaacctcttcgccgcctcaacaaacataacaatatgggacggaaacacggtgcgatcttgggagtccgcgtggattggtgggcgaagacccaaagacctcatgccgcttgtctatgcgatctcaaaaaacagaggaaaatcccttcggcaaggaaaggaggaggacgcctgggtgcaagatttgaagcttgattcacaatcatctatcacagtcgacctcgtcgaacagctagtcgcactgtgggaagcggtccgaaatgtgcacttagacgttggagaaccggatcagattatttggaagttcacaaacaacgggcattacacggcctcctcggcttaccatgtgcagtgctgcgggacgccgagtacaaacttcaattccttgatttggaaagcctgggcgccggggaaatgcaaatttcatgcttggctcatcattcagaacagagtctggacttcagaccggcttgcgaccaggggatggcagaacaatggttgttgcgctctttgccgccgcgagactgagacggcattgcacctcgttgccacttgtagatacaccaagaggatctggcacctcatctctgcatgggtgggctatcagcagatggacccaacggaatgggaggaagcc

SEQ ID NO: 25062 - DNA, 1790 bp, Oryza sativa
  Clone ID: PAT_MRT4530_29987C.1
aactagtggatccccgggctgcaggcctccccccaattccccaaaccctagcgaggcgcgagggctctagaatcttctggaaacgggagaaggagctctcgccaagcaccaccctcatggcggccgccgccgcggacccggccctgctcgacctgattccccagatccacgccctcttcgccgatccgctccgtgtgatttcatacaaatggctcagcaggaacttctcagtatcatccaatgattcaaagaggttgcttcaggagttcgtcaacaaacatggggctgatcttaaagtgatttacagtgtgtctggatggttaaagaagaaccccacaaattattgtgtaaaactcacttcaggccataaacttgaagaagcaaggcaagaatttaaagattcttgttcagttcaagtgtacagtatccaggcttgtattccaaaagatactgctgtactttggaatcctgaatttgtacaggcagaggagctttttaaccggccatttgatgaagaaaattgtttgagagataataggttttgtggtgttttgaattcttttgtcaagcgaactgctaatgggaagcttgtgagttcatttccgccaaagcctataaatagtgttgctgcagctgcaccgttgaaaactagtagtgctccaaaagaacaatctgctaagggtcaacagcaaggtctacctggatcatccagtccaaagaaaggaacaagtaataaggctgagaaggatatttcctcggtcttggataaagccaccaatgctcctgttgtcaaagaaccatcaattgctctgcagggaaacaaaaacaaggctcagaatgggaaggcgctgcccagtaatggtggatcacttgctacgatgtggggacgtgcatcagctaaacccaagactccagctaccactaatcctacagttttaccaagtgttgctgttacagctgatgcacaaatatgtgcaaaggaagaagcaaatgctgatagtagtgatgatgaacaagctgtacactacaagcgtggctctagtgcaaataacagaaagagaagagcagtctttgatctttcagatgatgatgaagatgacaatgttgtagccattgcatctcctgagccaccggaacagtgcattacaaatcctattgatgaggttgctcaagaaagtaaccccaaacaagaaaacttggaaaataaacaagaggttgagaaggatgtgaaatgttgcataggaaggacagagtctcctgagtgtaaaaccaaaagtagcaacactgtcagccattctgggatcaccttaaaagaaaagaacaatggtccaccacctaatgacaataagcaggatcatgctgctgagactgcttccaactcacctaaaagaaggaaagttttgaagacacgaatagatgagcggggaagagaagtaaccgaggttgtctgggagggtgaagcttctgcaggtgataaggctgagaagaatgtgagcgatactggtgctgcaaacagggcaactctctcaagcaagccgcagccagtagcaaagaccgaaaaaagcaatgcttcgagtaaaacagccggcaacaagaaacctgccaaggctggaaccaagcaaggcaacattatgtcattcttcaagaagatgctgctggatgagtatggcaacgacatggcttgtgaagtttgtactgtaggctgtatgcatccaggcacccgtgcggccgtgcctttgtcacttcgccgtgtggtcagattcagccgctctctggtcgccaacaagtaa

SEQ ID NO: 25063 - DNA, 513 bp, Oryza sativa
  Clone ID: PAT_MRT4530_29988C.1
atggcggcgctcgtcagcaactattctccgcaccttgccaaagtcctcgcgcaggaggcaactatagccgcgaagggcaactttaaccattaccatgtacaggttgtggactgcggaggatggcgcgggtgggtggcggagcaggcgagctccggcggcggcggcggccatctctctcttgcaccaccccccgaccggagcgccgccggtccgcgtgaaggcgagcagagcggcggcgccctggaagacgccatcgatgccaccatccgtgtcgtcgccaccgaccaccggcatcgccgagcgcctctacaccacgctcgtcgtcctcccgccactgttccacaagccgcctacgccgcgctctcccctctcgacgccgtgctctgcctcctcgcctccctcccctgtgcccccaattccttcatgctcaacaccacgctccacaccctcgcctcctcccccgacccggcctccgccctcggcttcttctccctcctccgctgcgacggctag

SEQ ID NO: 25064 - DNA, 1645 bp, Oryza sativa
  Clone ID: PAT_MRT4530_29989C.1
aaggaattttgatcggtggaatcggacacttcaggtggctgtctgaaccattcgatggctgcaatcaacagggagatgactaaacgtggtgctcgggttgatggcggcggaagcgattggcgatccaatcgatgggtcggacacttcgggtgggtggctcgaactttccgattgatggcgttcaatcggaagtcggagcggatggttcctagaggctgttttggaggtgttgacggcaagcgaggatatcgctgggggtacgtgaagcttggacgtcagggtcgtagcgacgtgcgaggccaagccgacgacggagacagaagcggtgctggtggtagcagacccgatttgggttcatgcaggactcgactcgaagggggccgtggtagaaaaggagttgagcacgagctcggcttcaatacacacaacaaaaagagatcaagaaggataccgcgtcagacacgaaaggggatcggaggagaattcgatttggaaatagaatcgggctcaatttgtccctgtaaagcagcaagaggaatccacgggattgcagagattgcaatcgaatcaaacaaccaaagcgatgaagagatcggtcccgatttcttggcggcggtggtttgggcaacgaattatgagcggctcgttttcgtggtggctctggatatgtgcatgcatgcggcagggaagtccatgggcatattgtgtgtaggtccatgcacggagcagcaaattgatcaagtcaaatttaagacggaagatggaggtgaacatggtcttcggggagtctatgatgtgacagctagaaaggaattcaatttcgcttggcaagacaactatggtgatatgagagaaggtgtagcactgctgcaggtggagtcgagaggaagaagttaccgggatagcgggagtctcttgtttacggtgtcagtgtatgacgagttgccctctttgctgttgtgtgcgggtgagtttgagcagaaggggattaataagattgggaagatacgcaaaacgatagcccagccgtacgacaataggagcttcctccaatacgtggagcaggggaccgcaccggcgctagcagggacgctacgactttaccgacggctgctcgagctcggcattaaaccggtgttcctgacagtccgcaccgagaaccagagggccgtcaccatccgcaacctttcccaacagggctactccgggtgggagaagctggtgcttcagccgacggggggtctctccatcgaggcgttcaagagcggtgagcggcataagctggtgagcgatggctatgccattgtcggtaacatcggtgaccagtggagcgacctcctcggcccggcggcgggagcccgcaccttcaagctttccaatccgatgtgtactacgtcaacaagcttgcattgctcaccggccggaggagacgccattgctggctggctagctacttcctccgtctcaaataagtgcagttttacactattcacgttcaacgtttaaccgtttgtcttatttgtaattttttttattagtatattttattgctattagatgataaaacatgaatagtattttatgtgtgactaaatattttcaaaatttttcacaattttttaaataaaaaaaaaaaaaaaaaaaa

SEQ ID NO: 25065 - DNA, 390 bp, Oryza sativa
  Clone ID: PAT_MRT4530_2998C.1
tgttattgtattgaataagctgtgcaggtcgaactcacactcagacttaaaaccaaagtcagacatcagagtacagtgctgatgaccaaaggtatgactcagaaccgagccatggatcctatctcaatctgtctattatgtgcctcacgagccattatatctgaatcaaccagcataacattctgaaaattctattcgtactgtaaactcatcgttatgaagattcacaatatttgacattgacacaacagcatcaagaaacaacgtttctgcatgcaacactaacccaactagcatactatctcggagactcgctgacgagacaatcaatggttggtattccactgtaccttaatgggttgcacgtgtgttttacggtaggtgcgcgct

SEQ ID NO: 25066 - DNA, 374 bp, Oryza sativa
  Clone ID: PAT_MRT4530_29990C.1
tagtggatccccgggctgcaggctaatgcgggcgataactagcaaaaaggccttgtttttgtgggtgcgccagttccaaaaactcgtgttttttactcttttggcagttatatttttctattttgtacacgccgctctgtagactcttagtccgtccagcactccagcccctacagatatgaatgctccatatataggcatcttaactggggagtcataagaatactcggtttcagatgagatgagtattgtagtagtcaacacttacagctcacatgcacatattcaccagaagtgtcttggccctttgacacgttccagattgatttttagtctggcaagtaaagcgcgaattgtataaatgcattggctcc

SEQ ID NO: 25067 - DNA, 542 bp, Oryza sativa
  Clone ID: PAT_MRT4530_29991C.1
gcacgggctttggaccactcaatcaaacaccaggtagctaagatagctagctagtcgagaatctccatggatgagctctcggcaggaagcttgtatttggtcgttctgggcacgcttgccctcgcactggcgttcaagagggttctgcgaggcaaggaaaccggagtcaaactccctccggggccatggaacctccccatcatcggcagcctccaccatctcgtgggcgcgcatctgccacaccgcgccttgctccgcgtgtcgcgccggcagggcccgctcatgctgctcaggctcggcgaggtgcccgcggtggtcgtctcttccccagaggccgccatggagtttttgaggacgcgcgaccccgtcttcgccagccggccgcggggcgcgctacgctcgacatcgtcagcttcggcggtaaagggatcgtcatggcgccatacggcgagcactggaggcaggtgcgcaaggtctgcgtggtggagctgctcagcacaaggcaggtgcagcggttggagtctatcaggcaggaggagagg

SEQ ID NO: 25068 - DNA, 180 bp, Oryza sativa
  Clone ID: PAT_MRT4530_29992C.1
atgggcccgacccccaagcgaggagggggcaaccgccactccacctcgggtgctgccccctcggggaagtgtcacgtgggtctgggggcagcctcctccctccaaactcggtatcctaagctaagctgggagggggcggccactgctccacccgggcgccacccttctcggaggcgccat

SEQ ID NO: 25069 - DNA, 1693 bp, Oryza sativa
  Clone ID: PAT_MRT4530_29993C.1
tttagaggataaataacagcttttcttagagaggaaaaaagagcacatactatttaatgaagggggtaaaacaaggagctccaggctccagtaagcgggagactagtctagaaaagagtgggtcctgctggacagagacaagggaaataagctgatctggaaagaaaagagaacatcagatagtgggggggggtcgagatgcttcaagaccaagttctgaagaacctataaatacgcccaccttgcatcgcatctccgcattcaaggcagacctagtagtggtcacatcgccaattcacagtcgaatcaagcaaaccatccaaatcacacccaactcttcttcttcccatcctccagagatccaagcagcttagccatgtcgctggtgaggcgcagcaacgtgttcgaccccttctccctcgacctctgggaccccttcgacagcgtgttccgctccgtcgtcccggccacctccgacaacgacaccgccgccttcgccaacgcccgcatcgactggaaggagacgccggagtcgcacgtcttcaaggccgacctccccggcgtcaagaaggaggaggtgaaggtggaggtggaggaaggcaacgtgctggtgatcagcggccagcgcagcaaggagaaggaggacaagaacgacaagtggcaccgcgtggagcgcagcagcgggcagttcatgcggcggttcaggctgccggagaacgccaaggtggaccaggtgaaggccggactggagaacggcgtgctcactgtcaccgtgcccaaggccgaggtcaagaagcctgaggtgaaggccattgagatctccggaggggaaaacatttctagggggaaatacaaggtcaactggaaaagagtctgcaggcccaaagacctgggaggactaggaataatggaccttcagcgcttcgcctccgccttgcggcttaggtggctatggtatgaatggacggccccagagaagccttgggaaagcaactgggtcagagacatcgacatcctccgcatcactgaggcggatcacgttcagcagtccgtccgcctatggactatgatcagaagaatgaaccccctgactgaagaccaagatagcatccactgggatttgacagccaatggtcaatactcagcaaagtctgcctacaggctccaattcctgggggccacgaggtctgccttcaatcaaactatctggaaagcgtgggcccctccaaaatgcaaattcttctcctggctcgccacccaaaataggctctggacagttgacagacttgagaaaagaggatggcaaaaccagaagatttgcccgttgtgctgcataattgacgagtcagcagtccacctgctggcacactgtagagttacaaagcgggtctggacagaaatacaaaggtggactcaaaccgacctccaaatgatcaaatggagcgattgcgactcggtagaacaatggtggaaccttgtggtagattctcccaacaacccccgcattcccctgcgtactctggtgatcttggtctcctgggaaatatggtgtgagcgaaatgcaagaatttttcgaaactctgcatcgccaccggcatccatcctcgccaagataaaagaggaaggtcgggcatgggtcaaagcaggagcctctaagcttcaagagttcggaatcttgggagataccacttaa

SEQ ID NO: 25070 - DNA, 400 bp, Oryza sativa
  Clone ID: PAT_MRT4530_29994C.1
ccggggttccgcgatgtgaccgtttgacaccgttcacgccgattccttacggcttttgccttagggcgggctaaggattggcccacagacttgaatatctaagctttacttcgggaggggccaaaggggggggggcattatgatttcggcctataatgccggcatgatccaattaccaaaattctaccatggattgaggtatgcttgctcacattgtgcctaccctacaaaagacagaggcgctggcaggagtatttagcgccgtaaatggagcccaacggtggttttaacggcaatggcgtcagttcaaccatggcggatagcggcgaagactgagttatcgtggccgtgattccccatccctacagcgaaactaaattgcagttattgcagccggggg

SEQ ID NO: 25071 - DNA, 393 bp, Oryza sativa
  Clone ID: PAT_MRT4530_29995C.1
atggggaagagctcgatgaggatgggggccgtgtctatgcaccagaggatgagaggtggttttaccaagattatgggtgaatatttctggtccctctatttgtcgcgctgtccgattttcatccctcggccggaaaaccggggcgacgttgggggcgagcttggtgcggcggtggggttggtcgaggcggccgagggctcgtccgggtgcgcgttggtggtccaatggactatcaaccaccggtgttctgtgattgcaaggcgaaagcggcgaggtggatttcgtggagcgtcgataaccctggtcgcaggtatttcaagtgtcgggacgcccgggaggttgaagattgcagggcgcggttggaggaggagaggacagggtttgaagcagtaa

SEQ ID NO: 25072 - DNA, 375 bp, Oryza sativa
  Clone ID: PAT_MRT4530_29996C.1
atggcgtccgtctggtgcctctcggcctcggcctccgccgctgcgccggtggcggcggcggcggcggcgcccgggcccctcggggcctcggtggcctccgtctccctcgcgcgggcggcggtcccctcgaggaggcggcgaagatgggacgcgctcgtggaatgggagaaaccaaagcctgggaggaggcctgatatcttcccaaaattcagccctatgaaaacaccattgccccatccattgccagctgatgatcctctggatgatgatgaggaggaggaagaggaagaaccacaacctcaggaggaaccacaggaggatgatcctgacaaggaagaacctgaggaggatgacccggacaagccaacggagtaa

SEQ ID NO: 25073 - DNA, 891 bp, Oryza sativa
  Clone ID: PAT_MRT4530_29997C.1
tcagcctcggcaagacactaagacagcacagcaaactccgcacagcagcaagtcggcggtactgtacacgggccgactcttatcgcccggagccggtctcgtctcagagagagccagcctccggtggaggaaaagctcaagaagtccaccaccacttcgcgaaaccccaattccaacccgacttctccactccacgaagagagccagctccgccgccttcaccatggcgtccgtctggtgcctctcggcctcggcctccgccgctgcgccggtggcggcggcggcggcggcgcccgggcccctcggggcctcggtggcctccgtctccctcgcgcgggcggcggtcccctcgaggaggcggcgaagatgggacgcgctcgtggtgtgcgcggcccccgacgaggagaagattacgcggcggtcgcccctcgattttcccatcgaatgggagaaaccaaagcctgggaggaggcctgatatcttcccaaaattcagccctatgaaaacaccattgccccatccattgccagctgatgatcctctggatgatgatgaggcggcggaagaggaagaaccacatcctcaggaggaaccacaggaggatgatcctgacaaggaagaacctgaggaggatgacccggacaagccaacggagtaattttggatgatttgggttatgttagataaaaacactatgtttagatctgccatatccttgagagaacgtcataggtctccaggtcaggtttgacctgttagttctccggctcatatagctgtagacactttttttgggagcaccccctgagcttttctaaagccatggaagttttgtctgactgatcacaatatgcatgttatatttctgcagaaaaaaaaaaaaaaaaaaaa

SEQ ID NO: 25074 - DNA, 324 bp, Oryza sativa
  Clone ID: PAT_MRT4530_29998C.1
atggagaaggcctccttgaccaccgtgaaagaagtcgacggtggctgcagccccgctccgcgccaccgccgggtagctcgacctgccgacttgacttgcactgccaagctccatctccgccaccactgccccacgcctggccagatccggcggctgctgccgagctcgcggccgtgggaggggagaggacgtccgctgctccgcgttgcccccgcccacttgttgctcagctcggtgcttgccggagacaagctcgatgatttcgcgtcgggtcgctccacgcagcgtcgagctcgtcgctcgattcgcgtggccgccgcatag

SEQ ID NO: 25075 - DNA, 369 bp, Oryza sativa
  Clone ID: PAT_MRT4530_29999C.1
atgcagctcaacccgaaagcaagaactcgtcgaaatagaacgaaaggacgacggcggagatggacggcgctgtggtccgcggcctgccgcggcgacggggaggacggcgtcatggcccacgatggcaaaggaggacggcgtcgtggcccgcggcgacggggaaggacggcgtcgtggcccactgacatcccaaaacttggaatcttctgggccgaagcctcgccgtgggacggccgtgaccgcggatgccactactatgcttggaaagcggtgggctggtggctaccaatagtccaatacggcaacatatcgaggccttgcgggctaacacatccatcacccattccagcccaaaaccttccggcctga

SEQ ID NO: 25076 - DNA, 432 bp, Oryza sativa
  Clone ID: PAT_MRT4530_2999C.1
atgtggaaccgcgagggcgcgcccgaaggcggcctcgccggcgcggccgacgggagcggtgcgcccgcgccccgatggtcaccgccggcgaccaccggcgcggcggagcggcacacgagagagaggagggaagggggaagcgaacggcggtccacggctcaccccgggacaacgacgacgacgagaacggcggccggaacggaggaaggcggcggcgcggctcgggacgacgaggacgacggtgctccggcggtcggcggacgaagcggagcggcggacggagtcggcggcaacacggcgaagcggatggagatgacgccgagtaaggtggaggtccggagcggcgacggcggcggaacggagttcggcggcgacggcggagagagaggggcacggcgcgagcacaattccgacggcgagagcgagcggtga

SEQ ID NO: 25077 - DNA, 864 bp, Oryza sativa
  Clone ID: PAT_MRT4530_299C.1
atggtttctccaccagtgaatatcatgatgtggaaggcagttggcatgcaccttgacaaagtagagatcatatggttttctgatgaattgaatcatcacgctgtcgactactggccacttgctatggatgtttccagaaaatacaccatgaaaagaatggcaaggaatacttcctgctgcccagataatttacccttgcatgctggtttctgctgtattatgccacaagctgtgctacctaatttactagaaaaccccgaattccagaatagaagaaatcctggacggactatcttcatgctagatgatgaggatgatatagaagaaaaaataagttgtgctttctgcccttcgagagtagtagcatgcaacccatgtttggagtatataaaatctgttgtccttccttggtttgggaagtttgaggtcgttcagaaggaagggaatggtagcaacaagacatattcaagcatgaaggaacttattgctgattatgaaagtggcgatcttgactcttttgatgtcaagttggcactgggaaaagcaatagatgacatattagagcttgtcagcgagtttttccgtagcaacgaggaagctcaagctcaaattgttccccacaggttacaggatgaaattggggcagatatccagaagatccaattgcagaacgaggagatgtctggtcatgtggcatccacctgtcagggcatctctgacctcactttcccctcactttcgccgacgaccgaagtggcgacgggcggggcggccgacgagaaaggagcagcgcacgtgcgcgagcgccggccgacgggaggagaggagcggtgcgcgtacacgggcggcggccggagaggatag

SEQ ID NO: 25078 - DNA, 320 bp, Oryza sativa
  Clone ID: PAT_MRT4530_29C.1
aaagggcccgcccggcacggcccagcccaggcacggctgggcacggcccagcagccatcgggccggcatggcccgataggcacttcgtgccgggccgtgccggcccatgggctgcacctcccgcccaggcacggcccaccagggcctagctgccgtgccgggccaacgtgccggtggaggggcccaggcacggcccagtggtctggccgggccggcacgggcccgacctccgtcgggccgtgccgtgcttgggccgggccaaaatatcgtgccatgggccgggccgtcgggcctcgggccttttggccatctatacgccc

SEQ ID NO: 25079 - DNA, 120 bp, Oryza sativa
  Clone ID: PAT_MRT4530_2C.1
atgaggctgaggtcgawggtactggtggttgcaaacttttgtgtgcagccaggtgacaaggttgtcccaaccgttcaccaccactgttggtcgtctcctctctatgtcagccgcaccaag

SEQ ID NO: 25080 - DNA, 338 bp, Oryza sativa
  Clone ID: PAT_MRT4530_30000C.1
aaaaaagggaagaggattttatttaaatttatatgaccctaagtttaaacaggcacacaggaggagggaggactttatttttaacaaacgaactattatattggtacaattcaggcccagacaccaccaacaggggcaaggctccggggggcactatagaagttaggggagataccaaatatggaggggaagttgaagggcaaaaaagttggggcttgggcttgggtctgatcaaaggaaacaccactaaattgctgcagttgtagctggtgcacaatcgcttgaacaaaactaaaggcctgggagggaaaatgttgggctaccagcctgagctgggg

SEQ ID NO: 25081 - DNA, 325 bp, Oryza sativa
  Clone ID: PAT_MRT4530_30001C.1
atggtgtcactgcgtggggacagcacgtgggaggcggaacaacggttggccggctgggtagctacagcggtggtgggagaaggaggagggcgagactgtgatgacgagtgcggtagacacggggagacggagtactggcggcgaacggtgacgaagaggagggatccgccacccccaccacccgtcgtcgtcactggcgccggatccgccacccccaacacccgctgttgctgccggcgccgcatccgccgccccccaccgtccgccgttgtcgttggcaccggatatgtgcgagggagggaccccggcaccggatccgcacctg

SEQ ID NO: 25082 - DNA, 1185 bp, Oryza sativa
  Clone ID: PAT_MRT4530_30002C.1
atgcgggccccactcggtgacttcctcgccgcgttattctacgcaacaccctcgcttggggatgccgtcacagcggagcatgagcatagtggcggcgtcgagaggggtgtcgaggcggtggaggacagcggcggcgatggcgccgcccatgaagaagaggacaaagaaagtggagaagcacttgtagttcttaaggaagcccgtgcagctgtagcagtagagcgcgacgaggacgaagtcatgggtcatagaaaaagatcaaaagttgatatttctagtgaatctaacagtgacaatgattgtagtttgagttctgataatcatgatagtgatgttcatttatctaatcatgatgaaagttctgataatcatgaccaacattttgaggaaaatgatcctttgcttcatttaactaaagaagagcttatgaagaaattgaaaataaagcttggtaaaaggccatttacagatgaccataaaaagaagagacataaagttgaatcagactcaattatcgatgatgcattgttagagattcacaatgatctagttctccattctttgaaaatgaaattaagcatgcttggtgaacagtctaaaaataagagaaaaacctttgagaaagataaccaacaaggtttcttcatatataatgatcttatgaaacacccttcaaaaactaattttggaatggtccaaaagagtttttctggagcatcacttgctagaccaattgagatatgtgacatgctgtttttcccaatattgcatttgaggcattggtttctgtttgttgttgatttgaaagatgagagttttgttttcattgactccttatttgaagaagaagaagaagactatcaatacaatgctagatgcagactgatatcaaaattttcaattgtatggaggaaatttgtccctgaacatccaattaactttgctagtttcaagataatatacccacctcgtccaagacaaacaaatcgccttgattgtggtatttttactctgaaattcatggaaatttggcgtccaagagttctgctaaccaaccagttctctcaaaaagacattcctaacataaggattcaatatgtcaacaaattatttttccatccatgcaacattgtgctgaactctacaacaaagaaacttgttactgactattatgcaaagggctga

SEQ ID NO: 25083 - DNA, 308 bp, Oryza sativa
  unsure (1)..(308): unsure at all n locations
  Clone ID: PAT_MRT4530_30003C.1
cggacgcgnggnnggaanccacncnnacaccaanngcnggaancanacnaaagnnganngggggggannnngcnnnncaagggccaaangangccggggncaacngcggagagacgacngcaggccccaggggcccaacaaaccnanggaacnncncagcaaggggangccagngcaggcaancagggaagggggncacccnacagancnagnncananccngnaccncaanacgcanggcagagagagaangnannnccngagagaccngancaaccagaagggcaanacnacangaagacnggaga

SEQ ID NO: 25084 - DNA, 453 bp, Oryza sativa
  Clone ID: PAT_MRT4530_30004C.1
atctttctcgacccgatctcctctccacccacccgatccacccgccggagaggaaggccgccgccgccgccatgctcagggtcgccgggaggcgcctcaccaccgccctcgcctggcgccccgccgcggcggccggcgccaggggcccgctcgccgggggctccctccccggcgacgacgaattctcgcgtgagccccagaggccgcgcttcgccgtggattccccgttcttcgccgcttcgaggggcttttcctcagaaactcttgttccaaggaaccaggatgtaagcttgactgagcttccagcaacagtgtcagctgtgaagaatcccagtgcaaagattgtatatgatgaatataaccatgaaagataccagccaggtgacccaagtaaaagagcgtttgcatactttgtgttgagtggtggaagtttatttatgcttcgcttctgcg

SEQ ID NO: 25085 - DNA, 633 bp, Oryza sativa
  Clone ID: PAT_MRT4530_30005C.1
tgtctgcgcgcggggcggcgaggcgagggctgtcgcgattcctcctctttcaaatactcccacggcgaggaccgcggcgagggcgcgcgggccattgctgctgcttcttctgctgctgcgtgtgtgtgggtgagacctgagaggatgggggcggaggcggtgagggtgctggtggtggacgactcgccggtggacaggcgggtcgtggagctgctgctccgggcgcactgcggtggcggcggcggcgccgccgccggcgaggcggctccgttccacgtcaccgccgtggacagcggcaagaaggcgatggagctgctcggccggcggcggggggaccgggaccacctcaccccatcctctccggcggcggcggcggcggccaacgttcgtccccccgcccccgtcccggccgtccactgcagcccggtgatgtctcatcacctgatataggagtgttcatcaattctgaacgaactcggtctctctcaccccctcctctgacacaaagtctaactcgctctgttctttctctgttcctcggagagaaatttaatcccttcactaatcatcactagcagagcaacagtgcggtagtttgaatgtctgatgagttctttgatgaaactcatgttg

SEQ ID NO: 25086 - DNA, 416 bp, Oryza sativa
  Clone ID: PAT_MRT4530_30006C.1
ctgcatttgcatgcacgtggcctagaagagtttgtaatgcatggctggcttcggcgacgacgaccatcctcgtggcgttgatgtcggtggtagatggcggtggagtctacggtggcgaacgggcatgtggtggcggttgcgccggtgccggctccggtggcgccgaagactatcactgcgatcctgaccaaggccggtcagtttcaccaagttcgctcagctactgcagacgacgcatgccggtgagcagatcaccaaccagatcaaggggaaggcgtcgatctccggcgggctcaccgtgtttgtgccgacggacaacgtgtttgtggcgctccccaccggtaccctcaacaagcttttcgaccagcacaagacgtcctggtgcaggttcacgtcgtgctcgcgctgctccccat

SEQ ID NO: 25087 - DNA, 801 bp, Oryza sativa
  Clone ID: PAT_MRT4530_30007C.1
atggcctcctgcttttcttgcgctgctctttctgcgatggctgtgcagcggctactgctcctttttcctgtgcaggaggacggcgacgactcggacttgccgaacctgccgattagtagggctgtgtttacatccgagggactagtagatctaatcttcaatgctttaataccacttgttataaaaattgatgtacaatggagacacgaattttacgtgaaaaacccttacgggaaaaaatcacgggtgtcgaccgacaatgatcactatagaggagttggatataaacgcagaggatacattgggctatcgcaccctccctacccacttaaaacgccacatggacatgccacgtcatttgtgcataaagacgaaacaactgttcgaagctctcaaacatatgcaaaattagttgatctaggcgaggtgccgatcacaacagatcgtggtcggagaatacaatcacgaaggccttcaagatcagatgataaagccaggatgacatgccctttaataactggcatccgttggctctttagtactcccaccgtccctaaatatttgacggatggaggaagtaactggcatccgtttccacttttgcgtgcatcacttgaaggaggcgaccagccacgacgtgggaattcaatggtcagggatgtgggacgccacagtttaatcttccatccagtcaaccatggagatcgccatctatcctccatccccgtgcccgatctagcgacgttgctgcgctctcccatcttcatggcccacgaccgacatgctgttgccctagcagcc

SEQ ID NO: 25088 - DNA, 3408 bp, Oryza sativa
  Clone ID: PAT_MRT4530_30008C.1
atggcgtcgaggtcgccggcggcggcggcggcggcgatggtcatggcgtgtgtggtcgtggtgctgcgcgtgagctgcgtgctcgccgtggacgagcagggcgccgcgctgctcgcgtggaaggcgacgctgcgcggcgacggcggcgcgctggcggactggaaggccggggacgcgtcgccgtgccggtggaccggcgtgacgtgcaatgccgacggcggcgtgacggagctgagcctggagttcgtcgacctgttcggcggcgtgccgggcaacctcgccgccgccgtggggcgcacgctgacacggctggtgctcaccggcgcgaacctgacgggcccgatcccgccggagctcggcgagctgccggcgctggcgcacctcgacctcagcaacaatgccctcacggggacgataccggcggcgctctgccggccggggagcaagctggagaccctctacctcaactccaaccgcctcgagggcgccatccctgacaccatcggcaacctcacctcgctccgggagctcatcgtctacgacaaccagctcgccggcaagatcccggcgtccatcggcaagatgtccagcctcgaggtgctccgcggcggcggcaacaagaacctccaaggcgcgctcccggcggagatcggcgattgctccagcctcaccatgatcggcctcgccgagaccagcatcaccggcccgctcccggcgagcctcggccggctcaagaacctcaccacgctggccatctacacggcgctcctctccggcccgatcccgccggagctcggccggtgcgggtgcctcgagaacatctacctctacgagaacgcgctgtccggctccatcccggcgcagctcggcgggctcgggaagctcaggaacctgctgctatggcagaaccagctggtcggcgtcatcccgccggagctcggctcgtgcgccgcgctcgccgtcgtcgacctgtcgctcaacggcctcaccggccacatcccgccgtcgttcggcaacctctcgtcgctgcaggagctccagctcagcgtcaacaagctctccggcgccgtcccgccggagctcgcccggtgcagcaacctcaccgacctcgagctcgacaacaaccagctcaccggcggcatcccggcggagctcggccgcctcccggcgctgcgcatgctctacctctgggccaaccagctcaccggcagcatcccaccggagctcggccggtgcgggagcctcgaggcgctcgacctctccagcaacgcgctcaccggcgccatcccgcgctccctcttccggctgccgcggctgtccaagctgctgctcatcaacaacaacctctccggcgagctcccgccggagatcggcagctgcgcggcgctcgtaaggttccgggcgagcggcaaccacatcgccggcgcgataccgccggagatcggcatgctcgggaacctcagcttccttgacctcgcgtcaaaccggctcgccggcgcgctcccgccggagatgtcggggtgccggaacctcacgttcgtcgacctccacgacaacgccatctccggcgagctgccgccgaggctgttccgggactggctctcgctccagtacctcgacctctccgacaacgtcatcgccggcggaatcccgccggagattggcatgctgacgtctctgactaagctggttctcggcggcaaccggctgtccgggccgatgccgccggagattggctcgtgcacgcgcctccagctcctcgacgtcggcggcaactcgctctccggccatgtgccggggagcatcggcaagattccggggctggagattgcgcttaacctcagctgcaacggcttctccggcgcgattccggcggagttcgccgggctcgtgaggctcggggtgctcgacgtgtcgcggaaccagctatccggcgacctccagccgctgtccgcgctccagaacctcgtggcgctcaacgtctcgttcaacggcttcaccggccggctgccggagacggcgttcttcgcgagactgccgacgagcgacgtcgagggcaacccggcgctgtgcctctcgcggtgctccggcgacgccagcgagcgcgaggtggaggcgcgccgcgccgcccgcgtcgcgatggcggtgctgctctcggccctcgtcgtcctcctcgcggccgcggcgctcgtcctcttcgggtggcaccgccgcggcggcggcgcccgcggcggcgaggacaaggacggcgagatgtcgccgccgtgggacgtgacgctgtaccagaagctggagatcggcgtgtccgacgtggcacgcagcctcacgccggcgaacgtgatcggccacgggtggtccggcgaggtgtaccgcgcgagcatgccgtcgtcgggcgtcaccatcgccgtcaagaagttcaggtcgtgcgacgaggcgtccatcgaggcgttcgccggcgaggtcagcgtgctcccgcgcgtccgccaccgcaacatcgtccggctgctgggctgggcggcgaaccgccggacgcgcctcctcttctacgactacctcccgaacggcaccctcggcggcctgctccacggcggcgcgatgggcggcggcgccaccaccaccgccgccgtggtggagtgggaggttcgcctcgccatcgccgtcggcgtggccgagggcctcacctacctccaccatgactgcgttccagggatcatccaccgcgacgtcaaggccgacaacatcctcctcgccgaccgctacgaggcgtgcctcgccgacttcggcctcgcccgtgtcgccgacgacggtgccagctcatcgcctccgccgttcgccggatcctacggctacatcgctcccgagtatggatgcatgaccaagatcacaaccaagagtgacgtgtacagcttcggtgtggtgctactcgagatgatcaccgggcgccgcccactggacccggcattcggggagggacaaagcgtggtgcaatgggtgcgcgaccacctttgccggaagcgagacccggcggagatcatcgatgtgaggttgcagggccggcccgatacccaggtccaagagatgctgcaagctctcggcatggcattgctatgcgcaagcccacgacctgaggatcgaccgaccatgaaggatgtggcggcgttgctacgtggcattcgacacgatgatggcgtcgaggcaagaaaagccggcaatggagttggtactgatgcagagacaaggaagcgggctgacccgagacagcccatttcaccgaccaaactcatggcccttgctagaccggcccaggcccaagcccaactccaagcccgtgctaattccggttccttgggcctgctcaacgatcaggagtgagtaatacagtaatatagatagttcaaactgaagggg

SEQ ID NO: 25089 - DNA, 468 bp, Oryza sativa
  Clone ID: PAT_MRT4530_3000C.1
atggcggccgggactcccgcgcccgtttccccctcctgcggccaccccctttcactcccaaccctatataaaccctcaccgtgcctccctccaccgtttccgccactcgccgccctctctcctcgccggaatcgagctcgcgccgtcgctctctctctccgccgcgcccgccgagctccggctgccggcgtcgtcgccccggaccacccgcccccttggcgccgcctacttcggcttcgccgcatcctcgccgacctcgtccacccctccgttccgctcgccgaccgccggaagcaccgccgaccccgtccacccgagccggcccgccgcttcctccgctcaggtcgccgtttccgtcgtcgcccgcgacccggggtgagccgtggaccgccggttcgattccccccttccctccccttggcacgaccggaaataacccaacggtcattccttacgtgcgtgcattaa

SEQ ID NO: 25090 - DNA, 846 bp, Oryza sativa
  Clone ID: PAT_MRT4530_30010C.1
ccacgcgtccgatctggtgctcctcccctgccccaccgccgcctacggccaaggagtggcggtgtgcaggcgacgggcggccgacctaatcaccgcccactcccaccgggggtcgtcgtcgggtcgtggccgtatcggcgtgcggctccggcagcggcagttcagggatgaggaggagcggcggcgaggcgcatccagccacggctcggagacgaggaggttcgggcggtgaatccggtgatggcgaggcgtgtgggcggcgtgcggctattggctcgggcttcctccggtagccagcgatggcgacgccttgcggcagcggcgggcgcggccggcgacgacgacggcctgcgacggcgacggcttgcagcagcggcgggcggccgtcctccgcccggatccggcggcggcggcccggtggcggcgggaggagagcccagcggaggagtcggcaatggtgtggccggcgacggcgacggcttgcggcggtggaggatgggggaggcgagggggaagaggcttcgtgctcctccagtcgggcgcattcgccgccattccgcccgcgctcgccgaggccatcggcgccgctgggtagggcgcgagtgtcttggaggtgatgggcggggcgcgcagactgctcgtgccggacccgaccgggacctgctcccaactcccgtggcatgcaagttgagtggtgccagatccggcggctacgactgggcaacggctgatccggggaaggcttcgtgctcactggtgctgccttctcccatgactccgacctccctctctagccgccgccggcgtcccccgctggatgcagtcaatgtaggctcgggactcgcc

SEQ ID NO: 25091 - DNA, 446 bp, Oryza sativa
  Clone ID: PAT_MRT4530_30011C.1
cggacgcgtgggtcccagacaataatgttgaggttgaaaaggagacaattacagcagcatagatgcaaatgcataaactgaaaagtgggttgttaatctatttgattgctccctaatgttctgcatcttcacttctcaaccagggttgagtagggatatcttcatcagaagtcagaaccaaagcagtatggaaccttcttgaacatgcgtcaaaaggcagtgcgtaggaacatacctaccattgttgtaaattgtgctaagatgcgattgctgaacttttcagctgctgttatctggaaaaattaactgtgtactttttagaccgaattggaattacgttttattttattttttgtgaggaagaatttgatttattttgtcaccttggatgaaaattaagatttttgtgacacactttttatactgctaaaaaaaaaaaaaaatag

SEQ ID NO: 25092 - DNA, 2118 bp, Oryza sativa
  Clone ID: PAT_MRT4530_30012C.1
atgggccgccgccattactacctgcccgccaggcccgcgcgacccatctccttcgaggactcccccgactgggccgacgacgacgtcgactccatccacctcgcaaccgcatcggcgtcggcgtcccttcccaccaccgcttacccctctccgagtccgacgccctcctcctcctccgccgcctgcagaggaggagagcgcaaggtggccggtgccaccctggtgtggaaggagctcagcgtctccctcactcgctcacgctcaggctcaggctcagctgaccgccgcgtcgtcaagagctccaccggctacgcgctcccaggcaccctcaccgtcatcatgggccccgcccgctccggcaaatccactcttctccgggcaatcgctggccgcctgcgccccgccgagcggatgtacggccaagtcttgctcaacgccaccaacacacgcttgccttatggatcttatggttttgttgatcgacacgatgtgctaatcgactctctcacagtacgggagatgctatactactccgcgcacttgcagcttccgggcctattctcctcaaagacctccatagtcgaagatgctatcgcagccatgtccttagctgactatgctgacaacctcattggtggccactgttttatcaacagcctcccagctggagaacggaggcgcctcagcattgcaagagagctagtgatgagaccacacgttctgtttatcgacgagcctctctatcatcttgacagtgtttctgcacttctactgatggtaacattgaagaaacttgcgagcacaggatgcacagtcatcttcacaatgtatcaaagcagtacagaagtttttggacttttcgatcgaatctgcttgctttcaaatgggaatacactcttttttggagaaacattgtcttgcctacaggacactaaatcagaaacccatgccaggctccaagtaacattggtacacttctcaaatgctggctttccatgtccaatcatgcaaagtccatctgatcacttcttgcgggcaatcaatactgattttgacagaatcatagccatgtgcaaaaatttgcaggatgatcaaggggacttttcatcagtgagcatggacacagctgtggcaatccgtacgctggaagcaacatacaagtcatcagctgactctgttgctgttgaatcactggttgcgaaattgatggagaaggaaggtcctcacttgaaaagtaaaggcagagccagtaatacaacacgaatcggtgttctcacctggagatcattggtaataatgtcaagaaatcggaaatatttctggagcagatttgccttgtatatgcttcttgccctctcagtcggcaccatatttaacaacgctggtcattcattatcatctgtaatggtaagggtttctgcaatatttgtgtatgtatcatttgtcatccttctaagtgtttctggagttcctgcccatattgatgagatcaagatatattcccatgaggaagcgaatcagcattcgagtacaatggttttcctgctagggcacttcctgtccagtattccgtttctatttctggtcactatttcgtcatcgctggttttctacttcctgataggactcaggaatgagttcaacttgtttatgtattttgtggtgaccatgttcatgtgcctgttggcaaatgaggcacttatgatgattgttgcttacatctggctcgacacttacaagtgcaccttaactctcatttgcttatacgttatcatgatgcttgtgggtggatattttcgaatccgagggggtctaccgtgcacagtatggaagtacccattgtcgtacgtttcgttccatgtgtatgcagttgagggtttgcttgagaacgagtatgtgggcacatcgtttgcggtcggtgcgataaggacgataccaggtgtccaagcagttgggggctcatacgacatctcgtcttcagcaaacgcaaagtgggtaaatctgctggttttgtttgtgatggcagttggataccgtgttgttctctacgtgttgcttcgtctgaattcctccatggactgcaccttcgtttttgggctctatacagcacattgttga

SEQ ID NO: 25093 - DNA, 312 bp, Oryza sativa
  Clone ID: PAT_MRT4530_30013C.1
gattaatatttcattgcatgcatcacatttactgtatgatcctactagctatgaggcaagccagctcaccctaacactggccggagtgaaaaatgcagcactcctagggctcaacaaggaacatcaaaagaagctgcgccaagtactgcctaaccctggtcagcctcaaaaagttataccctgatgatgtgctcatcaacaaagggccactccataaacaacaaactcccggggtacccatggtccgacgacgacccctagacggcggagtactccaacgacgactacgaccagcctaactccaggggcatg

SEQ ID NO: 25094 - DNA, 268 bp, Oryza sativa
  Clone ID: PAT_MRT4530_30014C.1
ccctaattccctccacacacattaaccactgcacattacgcagtcagcgacagcgaggatggccggccgagccagctgcgtactcattctccttctcgccattgccggcttcggcgacgttcttgccgccggcggcgcgacgccattgtcgtcgtcgtcgcaggtgagcacgactacggtagctggattgaatgaggtgaaccgggatgcttgcgtgcatgaacgggtgcttcacgcagattgttcgggtgcgccttcggggtgcatg

SEQ ID NO: 25095 - DNA, 1449 bp, Oryza sativa
  Clone ID: PAT_MRT4530_30015C.1
atgaccggcggcctcccgccgcctctccgcccgtccaccgcgccgccgccgccctccgtcacgcgcgcgctgcacgcgatcaacacctgcaccaccgccgccgcgctcgcgcccatccgcggcgccatcctcggggaccgcgcgctcctccgctccaccgccgtcgtctccgccttcttcctcgcctgcggccgtctccgccacctcgacccggcgctctccctcttcgcctgccacccgcgcccccacgtgttcgtcttcaactcgctcctccgctccctcggccgcgcccccgcccgctccccgctcccgctcttccgccacttcctccgatgccgcggcgtccgccccaaccgcttcaccttccctctcctgctcacctccctgtcctccctcgccgacctgagggccgtgcattgccaggtggtcaagtccgggttcgggcccgacctccacgtccgcaacgccctcctcgcgcgctacgcggactgcgaccctgacctggcgcacgccgagcagatgttcgacgaaatgccccgaccggaggttgtcgcgtggaccactatgatcacctcatacaggaaccgaggccgcacctttcacgctctggcgaccttccggcggatgcttgctgctcatgttgcacccaaccgcgttaccatggttgctgctcttggcgcttgcgcggcccattgtgcggtcgacactggcatctggattcacgagtacgtgcagaagcagggatgggagatggatgttgtactgggcacagcgctggtagacatgtatgggaagtgtggaaaagtctcagatggaatgcatgtgttctcaaagatggccaagaggaatgtctatacttggaactctatcattggagcacttgctcttgcacaggatggcaagacggcattgcagtggttctctcggatgcagaatgatggtgtccagccagatgaagtcacacttatttgtgttctttgtgcctgtgcacatgccgggtttgttgacattgggaggaaaatatttaacctggccatacaaggtgagtatgggtttcaacctgggatcaagcactttgggtgcatggttgaccttcttagtcgctctggacacctcgatgatgcctttagggttgttgagacaatgccatcacagccaaatgcagtgatatggggcttgctattaagaggctgcagggcccgtggcgactcatggttgagtgagcatgtgacaatgaggctggtggagttggaacctgagaatgcatcgcattatgttctgttatcaaatttgtatgctgagacagggaggtggcaggaagctcaggggatcttgcattggatgaagaagaagggactgaggaaagatgcaggctggagccttcgaatgttagaggacaagtcaaagaagtatactactgatggatgtttgttggagtatgttgagtga

SEQ ID NO: 25096 - DNA, 663 bp, Oryza sativa
  unsure (1)..(663): unsure at all n locations
  Clone ID: PAT_MRT4530_30016C.1
gtggctgcttgcaggcttggcttgcagctggggagagagcatgagcatcggcggcgggagcttgggcgccggcttgccgtaccacaagttcgtcagcttcgcgctggaggagacccgactccggaccaccctcacccctcacccctcccaggaaaagttcaagtctataaaacccaatgatgataatacagttttcaatgctctctcattcagtgcaccgaaaattagattgcttcgcagcttgacaatcgagaagaaaaactcatatcaggttcttgactttgccgctttctctgaacctgaatacgatcttcctatattttgcgccaacgtttttacaactcatgcacaaagtattgttgtattggacctcaatcctctatatgatactacagtgcacaagaattacaaagataagtactataggagtataatgcctcttgtacacaagtataacgagctntcttccttggggtggcaagattacgaggaagtcattgaagttcttctctccnattgtgatctggacaatatttgagtcaactgaacacaaccaccatgttctacattcagcttttcgtggattattataagggtctggcttgaattaatggacccaagcattaaagaaaataacaaagcancaattgctcgtaaccaaga

SEQ ID NO: 25097 - DNA, 351 bp, Oryza sativa
  Clone ID: PAT_MRT4530_30017C.1
atggggaacacgcacaaaataactcattccaccaaagaaacagaaccaacacgaagtaaccctaagcatcggactcaaccaaactacggaacagatgggaaaacaaatcgcgtgatcgcactcaccggtctcgaggagaggcgcaaaactcagacgaagcgcgcaacggtggaagggtcaagaactcgcctcttctcgttccctctacgccgccaactcgccgaggaagaactcgctagtactactacacaccagcggctagtcctctcggattggatcgccacgtgtgccacaaaaagtggcacgtggcatcatcgctggtaccttcgtgggcccacgtccggcccataa

SEQ ID NO: 25098 - DNA, 2015 bp, Oryza sativa
  Clone ID: PAT_MRT4530_30018C.1
aagagagatcccccaacgcttcgcgaatcgcaaatccctctcgcttctctctctctctctctcctcgcgccgccgccgccaccgccggcgccgcggccatgggcgactacggcagcgggatgatgcgggggaacccggacggcggcgggatgcagtcccgcaccaagggccagcgcgtcaacgtgcagcagctcaagctgatggggcagggacacccgacgggcctcacccccaacctgctcaagctcttcgagccccgcccgccgctcgacttcaagccgcccgtcgagaagcgcaagttgccggcctacactgggatggcgcagttcgtgtcgcagtttgcggagcccggtgaccctgagtacgcgccacccgtccccacatgcgagaccaaggctgaaaagaaggataggatccgcaaaagtaagcttgaccaaggtgcggctaaggtggctgaagagcttcagaaatatgacccacagagtgaccccaatgccactggagatccatacaaaacactctttgttgcaagacttaactatgagacgtctgagcatagggtcaagcgggagtttgaagcttatgggcctattaaaagggtacggcttgtgaccgacaaggaaacaaataaacctagaggatatgcattcatcgagtatatgcacacccgggacatgaaaaatgcttacaagcaagcagatgggagaaaagtggacaataggagggtgctagttgatgtggagcgtggtagaactgttccaaattggcgtcccaggagattgggtggtggacttggatcaagcagaattggtggtgaaaatgctgaacagaagctctccactagggatcagcagcacgctggacgcccaagatcggaggagcctaggagagatgagcgtcgtgcagatagggaccgcgagaagtctcgtgaaaggccacgggaaagagatcgtgatgagagaactcgtgaacgatcccatgaccgtactcgcgagcgtgattcaaaagaagatagacaccaccatagggatcgggacaggactcgggacagggaacgaggaagggaccgggagagagatcatggtcgtgaccgtgaccgtgagcgtgatcgtcgtgatagagatagggacagggatcgtggtcgggattatgagagagaccgtgaccgtggtcatgatcgccatcgtgagagaggcagggaccgtgagagagattacgagcgtgcaagtcatgaacgggaccgtggtcacatgcatgagagagatgctgaatttgccaacggtgagccaaaacatgacagaaatttggctggttatgatcaggaatatggctataactatgagcaacacaaaagccatgatgcttatgagacggagcgctcaaagcgacatgagcatgagtactatcagatgcaacctaacaacacagaacctgaaggccctgaagagggcgaggcatatgatgaaggtgactaccagtatcaccaagctgctgatgagcacaataactgaaatttgattgctgcactgcttgaacggttgttctaggtgctcgtcattgttgccaaaagaggcagaagcatgtttacttgttgcctggcgcttgagctctgccgctttgcaaggctggatatgtaataccggtgttactgtctgttgttccttttgtggtttgggagttaagatgtttttgcacttccctgcttttgtattgtatgagacgctagaacttgttttggattcatcttttgcttcagtactctgttcagaaaggttttgtaattcgagcacatgaactacagttatttcgtatggaattccaatattgaagtatcttttgttaactagttttaggttcctcttgacatgtctgttgcattgggatgcaacataatgtaatcccgctttaccatggctgaatgtggaagaatatccgccgtaggaaatagagatttctggatcatcaacattttggcaattcgtgttgagatattggttttagaaaatagttcaccc

SEQ ID NO: 25099 - DNA, 1914 bp, Oryza sativa
  Clone ID: PAT_MRT4530_30019C.1
atgggcgactacggcagcgggatgatgcgggggaacccggacggcggcgggatgcagtcccgcaccaagggccagcgcgtcaacgtgcagcagctcaagctgatggggcagggacacccgacgggcctcacccccaacctgctcaagctcttcgagccccgcccgccgctcgacttcaagccgcccgtcgagaagcgcaagttgccggcctacactgggatggcgcagttcgtgtcgcagtttgcggagcccggtgaccctgagtacgcgccacccgtccccacatgcgagaccaaggctgaaaagaaggataggatccgcaaaagtaagcttgaccaaggtgcggctaaggtggctgaagagcttcagaaatatgacccacagagtgaccccaatgccactggagatccatacaaaacactctttgttgcaagacttaactatgagacgtctgagcatagggtcaagcgggagtttgaagcttatgggcctattaaaaggcaaacaagcttgaagaatgttggcgatggcacaacttatctgcaggcatggggtttctacattctgggatttattaggttgctggtacggcttgtgaccgacaaggaaacaaataaacctagaggatatgcattcatcgagtatatgcacacccgggacatgaaaaatgcttacaagcaagcagatgggagaaaagtggacaataggagggtgctagttgatgtggagcgtggtagaactgttccaaattggcgtcccaggagattgggtggtggacttggatcaagcagaattggtggtgaaaatgctgaacagaagctctccactagggatcagcagcacgctggacgcccaagatcggaggagcctaggagagatgagcgtcgtgcagatagggaccgcgagaagtctcgtgaaaggccacgggaaagagatcgtgatgagagaactcgtgaacgatcccatgaccgtactcgcgagcgtgattcaaaagaagatagacaccaccatagggatcgggacaggactcgggacagggaacgaggaagggaccgggagagagatcatggtcgtgaccgtgaccgtgagcgtgatcgtcgtgatagagatagggacagggatcgtggtcgggattatgagagagaccgtgaccgtggtcatgatcgccatcgtgagagaggcagggaccgtgagagagattacgagcgtgcaagtcatgaacgggaccgtggtcacatgcatgagagagatgctgaatttgccaacggtgagccaaaacatgatcaggaatatggctataactatgagcaacacaaaagccatgatgcttatgagacggagcgctcaaagcgacatgagcatgagtactatcagatgcaacctaacaacacagaacctgaaggccctgaagagggcgaggcatatgatgaaggtgactaccagtatcaccaagctgctgatgagcacaataactgaaatttgattgctgcagtaagtttttgttggcatcacagttttctttactagtactgtaattattcccctaataatgttaatgatgatctctgtcaaatccttgcaccatttcagctgcttgaacggttgttctaggtgctcgtcattgttgccaaaagaggcagaagcatgtttacttgttgcctggcgcttgagctctgccgctttgcaaggctggatatgtaataccggtgttactgtctgttgttccttttgtggtttgggagttaagatgtttttgcacttccctgcttttgtattgtatgagacgctagaacttgttttggattcatcttttgcttcagtactctgttcagaaaggttttgtaattcgagcacatgaactacagttatttcgtatggaattccaatattgaagtaaaaaaaaaaaaaaaaaaa

SEQ ID NO: 25100 - DNA, 403 bp, Oryza sativa
  Clone ID: PAT_MRT4530_3001C.1
atctggtcgaccgcccataactgcgggcacagctattcgaatagttttactctgatcagaggtgtacaactgttcccacaagacacagccccacgacacgtttctgtgcgccgatatgccaccacgacataccggaaagaggccgtgagaggacccttcgcataaccccctctggccaagcacaccacacctcaggtttcacccccgtccccagcgggcaacgggcagtcccctctcatgcctaggtgaatccgaaagcgacagaggccatcgcagggcccgccccgctccatcacgcccacccttgcctggatgtgtcggctagaggaaagctacactacaagcccagccgttgcccacgctggcttgtgataaatacgaggaattcttctagggttttccg

SEQ ID NO: 25101 - DNA, 1915 bp, Oryza sativa
  Clone ID: PAT_MRT4530_30020C.1
aaggatgagcaacagaggatatcatcttctattattgcaccatctttcgataaatcagctctgcaacaaagtgtggttccgaacaaaatgctcaaggcacacaaaatacgatatgccgctcatatgtcatactcatgttaacaaagggcagtaatttggccaacgatcttggtgccaaaattagtgaaaatgctttttgtaaaagctgaaatagtttacgaggaagattctactgtttagttctgaacttcttctgatctctctaattcatggagagggtggacttgatctgatcaaccagatggggcaggaccctgatactgtcatcaatagatctgtttacgcatgcttctagctcctcagtcgcatgtgttttcatcttctggagctttgctgcttcaaatttatcttggcacaccatcaaagatcgattcagccgctcctggaatttagccatctcagtctcaacaacattgttggcagtaaggacaggcacgctgcagttctcaacacaattgttgatcccttcttgacttcttcggcgatcaaagcattcatacgcacacttgaagtacgcttgctgcatggtgaagttgacgtggtcctggacgccggcgaggtgcttctgcgcggcggcgttcacctcctccagcttccgccggatccgctcggtgatgacccgctcctccatcgaccccgcctggtccatcgagctctctcgccgggggttcctgggttgggggcaggaggcggcggagacggtggccgccggcggcgaggcgaggcgaggcgtgcgcctgaaccatgccctgctccagtgctgggggtgagtgttcatgattgcttgagctccaggtggtgtcagttgtgctagctttgcccttgccaggttgaacagcaagatgcatggagccttggcacatctccagaatttcttctgcaatatcttctcattgaaatgccttttccaatcagcatagatgtgccttgcacaattcctatgttcagcttctggagcccatttctcaactgcattaataatacccttttgttggtctgatatgaaaacccagccactgccatcacccactttcaagtcaccacacagcaagtctagaaaccaatcccactcttcattgttctccttgtgaatcactgcccatgccactagatacatttgattattagcatcccttccaattgcacaaaggagctttccatttgttgctcccttgaagaagcaaccatccagtcctatcactttcctgcaaccagatatgaatcctctcttacatgcatctaggcagatgtagatccttttgaacactggtggatccatatcaacctctctgttaactaccactgtgcttccaggatttgacctcagcaactccttctgatagttgtacaacttctggtactgtcccttagttgcatccatagctttcttcatcacaattgacttggctctcttcaacttgcttacagaaacattagcaaacatctcttcctgtattgtagccttcatgtgagctaatggccatgaggggtttgcaattataaatttgccatacttgtcagcaatcctagtggcagtcaccaacttgttatctcttctaggagggcatgcatggaaattctcaaaggtgacaatcctcttaggatcatccttcacaaagtttatcacctttctctcagccaaagcatatgctgtaattgctttcttaaactgactcttgcaactaaatttcattcccaactcaaatgttggatatccaggcttcttcttgaaccttgcattattacttcctctcactcttaactccccatcagaaccctcttccactgactcttcatcatcactgtcaatatactcagtgtcattgccatctccttcattagtaccagtagccat

SEQ ID NO: 25102 - DNA, 2100 bp, Oryza sativa
  Clone ID: PAT_MRT4530_30021C.1
caacattgtgttaaaggatgaaagggatatcttctatctctctccgattttcaatgggcagaattgtctgtagtatttgtttctaaatcaaacaaaatgctgtgaagtcttcttttttgtaaagaacaaagatcagttattctgtcaagtctttttttttgcagcaaacaaaaataacttcttgtttttgtcaaacagtattcatagcactctcattttcaagttgggcaatacattcactgttttgtgtgtaagcatgcatctgctgtctgcttctcaataatgatgttggttgcattttgctaaaccaaggagaaaaccaccgaatcatgttctcaaattatttaaataacacttttatcttgtattgacatgtattggtttgggtggttcggacagtcttttctttgttatccatttctaaacatgtgggctctgttgatgtacttagtggataagtaatatagagctccagcagaaattatgtcttctggtaatttttgttagacatattatctgagttactgttgagcaatttaatgtgcgaatggttggtacaaccattagaagactaaaaaatcctgggaaatacaaatacacacaagcaggtatttttactgcatgcagccttgatgtttttttttcttagaacatcttttcccttttactctcggaaaagatcaaaccatttgcttctgcagtaggcacaatgtatcatttgttttcccattctatgaacttgcttctcgtgtgtattaactggagcaaacaagcttgaagaatgttggcgatggcacaagtaagcttagatcactttatgcttttaaaagcagcttatctgcaggcatggggtttctacattctgggatttattaggttgctggtgagtacagtgtttatgttactttgcctgagctagttaaagctagttctgctttcaagtgctgcttctcttggaggaaacaacagcaaaatataatgcaaatgacatctcaacttttagagttgaagatggctccattttctgatgcgtaacagcgtaaggaatagacatcactgacttgctatttgtcacctccatttatgtaaccgttgtctattttgatggtcttaccgacgaaggctgaacgaactatatgcaatggagagggtaaatgggtattgtatttagtccaccaccatcttcttttcttaatctagtaaattccctggtaagggggtatcactgtatttcccacaaacgccaatcagccagactgctttttgcctccaactgtgttgatctgtgctggatttcactcctcgtaatgaaggatctacatatgcaaggtacggcttgtgaccgacaaggaaacaaataaacctagaggatatgcattcatcgagtatatgcacacccgggacatgaaaaatgcttacaagcaagcagatgggagaaaagtggacaataggagggtgctagttgatgtggagcgtggtagaactgttccaaattggctgtcccaggagattgggtggtggacttgtgatcaagcagaattggtggtgaaaatgctgaacagaagctctccactatggatcagcagcacgctggacgcccacagatcggaggagcctagagagatgagctgtcgtgcagatagggaccgcgagaaatctcgctgaaaggccacgggaaagagatcgtgatgagagaactcgtgaacgatcccatgaccgtactcgcgagcgtgattcaaaagaagatagacaccaccatagggatcgggacaggactcgggacagggaacgaggaagggaccgggagagagatcatggtcgtgaccgtgaccgtgaccgtgagcgtgatagagatagggacagggatcgtggtcgggattatgagagagaccgtgaccgtggtcatgatcgccatcgtgagagaggcagggaccgtgagagagattacgagcgtgcaagtcatgaacgggaccgtggtcacgtgcatgagagagatgctgaatatgccaacggtgagccaaaacatgacagaaatttggctggttatgatcaggaatatggctataactatgagcaacacaaaagccatgatgcttatga

SEQ ID NO: 25103 - DNA, 1330 bp, Oryza sativa
  Clone ID: PAT_MRT4530_30022C.1
gtggatcccccgggctgcaggaattcggcacgagggtgacgtcgacgcctcatctcccctccctctttttccccgcagcgatacggcattcgtgacctcccgattgttgccaacccccctcgccttccgattgctgccacccccgcgcctcgccgcttgcccgtctcctgttcgtccctcgggagcgggaggctagggccgacagcagcgttcgcgccggcgcgggattgggttctttgttcttgtcagtgctgtgtttgctcgcaagggtcatcgtgagaatggaccagatttacatggctgctgtcaataacaagacttcattgcctgatgatgagccaatgaagaaaattagtggagatatgcctgtgactgctggaaacgcttgctttgactgcaacatttgccttgattttgcagcagagccggtggttactctttgtggtcatctctactgctggccttgcatctatgagtggctatgtccaggggttggatcgactgccagtaacaacagcagtttggcaaggcgacagtgccctgtgtgtaaggctacactctccccagacatgctggtgccattgtatggtcgtggggggagtctgaagaaatcactgaatggtgtgcccattccacgacgaccaaccgtgcagcgggaggcggttgagcatcaaaacacacacaataacatcgatgatcggcaccatgagaacatggaacccagccctccaccacaaccgctgcggcattcgagccatcattccagtgcaactgaatttgattttatttacccgccatcaccaattgggcgtggcttgatccactcgacggctggtggtgtgcttggggggatggcagtggcggtgctaccatgggcattccgtggccaggtgccaccgagcatgttcatgagtccccactatgtcacggcacacaatatgagctctagagcgaggagacatcagatggaagttgagaggtcactgcatcagatctggttcttcctcttcgtttttgtggtgctgtgcctgctcttgttctgaagcaagatggtggtgtattccttttgtaaatacgggaaggcaagacactaatgggtggatgcatatggtaaaagagggtggttaacactgttggtctgtatcgataagcatgtgcctaaagcatgctgatatagagatgtaatgtgacaagacttaaggtgaaatgcacatttcattcttctcttgtcctaagatcaaaaaaaaaaaaaaaaaaaaaaaaaaaaaaaaaaaaaaaaaaaaaaaaaaaaaaaaaaaaaaaaaaaaaaaaaaaaaaaaaggggcggccg

SEQ ID NO: 25104 - DNA, 980 bp, Oryza sativa
  Clone ID: PAT_MRT4530_30023C.1
ctcgatcatctcctcagctactactgcttcatcgaatcgtcgaagcatcaacagctatagatcaagttcgagaggttgattcagagaggcattgcaaattagcaatggcgagcgcggcggcggcggtggcggcgaaggcgtggtggacggcggcgatgagcgtgggcgcggtggaggggctcaaggaccagtcgggcctctgccgctggaactacgcgctccggtcgctgcacggcgccgccatggacaccctgatgctgcaggtgcatggcggcgccggcgcctcctcgccggcggcggcgatggcggcggagaggccggaggaggaggggatgaggaggtggaagcaggagaagatagatttggcgaggctgtgcgccagggcggtgcaggccgccgtgcgggcggagcagccggccacgacgcgccgccggccgccgcacgccgggcggccgccacctccctcctccggcggtggatcgccggccgaggtggcgccggcggcgaagtcggtggcggaggagaaggcgaggaggttgaggaggagggcggagaaggacgagaaggagtttgggccccagaaggagatgaacatgaacgcccgcagcgactcctcctccctcttcctcctcctcctccgatcatcctcctcctcctccgccgcattcgccgccctcatcgcctgcctcgacgacagcgagccccccgccgcagccgccgccctatccttcgcgttccacgtcgtggcggcgcctccgtctcgcgttttccctgccggcgccggcgccggcgatggagccacccgagcgccgcccacgcgacccgccaacctcacgctcatcgccgccgccgctaagctcttcgcatttctcggtgaagtgaagggagaggaaggggccgcggttgccgtacttgtaggcggcgcggtgcggtgggcggcgccgctggagaacccaaggatgtgtggattcactttgtag

SEQ ID NO: 25105 - DNA, 321 bp, Oryza sativa
  Clone ID: PAT_MRT4530_30024C.1
atggagaggagagagaatggccgcccgcgctggtcttctctatcgctgccgctggatgtagccttccgcaggcggccgccgcagtcctccttcgcctccgccaagggagtgggggccggaggggagggcagcagacatggaggcaacaccgcaaccacctccaccgactccggccaccacctcgcaacagagctcggctcggtgaggagaaggatgcggcgacttggctacaccgatggctctggtgacggcgccctccccgtcgcacccgccggccgtcgattgctctctcgccatgcccggccgtcggccgccctctag

SEQ ID NO: 25106 - DNA, 268 bp, Oryza sativa
  Clone ID: PAT_MRT4530_30025C.1
agctcggtacctagcagcgctcgtgcgcgggcaaggaaggagaatttcggagggcggactttgtctagcggggggaaggtgaagtggtcctggaggtggccccgaccggaggagggaggagaatgcacgcgaacgagatgcgcggggaatgggactccgcggatgctccgattatcaagttgtggaggaaggtggcggaagactggaagatctggaagtaaaagctcgagacggtggcggctagattcaggtgtgacggaaagtgggg

SEQ ID NO: 25107 - DNA, 957 bp, Oryza sativa
  Clone ID: PAT_MRT4530_30026C.1
atgagcgatctccgcgaactcggcatgcggcgggagccgtcgagggctgaggtggtggggcgtgccaaggacgacggggacttcgacgcgctccgccgcgccatcatccgcaaggtcaaggacaactcttggcttcatactgatttgcctgcaaacaaggctgaaagtttagtacgtatcactctgatttacatactatggcccaatatcatgcaggaggtgctacgcagcaacataattgcagaggtgaagcagtcagtggtaataaatgaagatggctctgaaaagttaaagctgaaagatctttctgatgcgatttaccaagatatcgggagcaaaataatgggtcaaatctcagacgagatatggggtgtcatcctatcaaatgaaattgatatccgaggaacttctgaaactgtctacaatagaatgatgaaccctgagcagcagcaggaccctccttcaaagaaactgaagaggaatgccaaagaggagcaagtgtccccagcaaaagcatcaacttctgttgcagtccagctggaagatgatgatccagaggaaccaccaggatttggtttcagtgatcatcagcgcagcaacatcatggcaactcagcagcagcagtcgtcaaatactgagaatcataaccaagtgaaaccaaatgaaggtgagcccaacgccgttagctgccctggggatgatgatgaggaggatcctgatgtgcctcctgggtttggttaacatcctgcaatcttctattgtggtgtgatctgtgatgtttcttgtcaacactaagaaaaatgatttagtttacatttgctgctcgaggggttcatttgaatattgaatcatgaaaccgatatgattgggatgagttcatgttgctcctagcttcagcctcttatttatgagggaacaaatgggcatttaagcgatcaaaaaaaaaaaaaaaaaaaa

SEQ ID NO: 25108 - DNA, 1874 bp, Oryza sativa
  Clone ID: PAT_MRT4530_30027C.1
tgcagctggtgctttgaagaaatatggaatcatagttacctgtgtggacacgggaaaggaggcaatttctaggcttcagccacaatattaatttgatgcttgtgtaatggatgttcagaggcctgatatggatgggtttgaagttaatagattagttcgttcgaaaaatggaagctctggatgacacttctcctgaaaacatagaagttacagcgaattccaaaaatacgatgccatataatactctaagtgggcttgaagtagcaaataatcggaaaaccttggagagtttcaggatgttcaaagattcgtcagatgcaatagattcagtgaacttactagtaactgtcgaagacactggcataggaataactaaggatgctcaaactcgcatttttacacctttcatgcaagcggatggttccacctcaaggacatatggtggaactggaattggtttgagtattacgaaacgcctggttgaattgatgggtggagaaatagggttttgtgagtaaaccaggagttagtagtacattttcttttactgctattttcaaggaaaataggaaagatccaggggatatcaaaaggtattgtcctgaacctactccaccagattttcaaggaatgagagcgcttgttgttgacggaagatgtgctcgtgctgaggttaccatgtaccatctgcggagacttggaatacaatgtgatcttgcagccacatctgaatcagcactttctgctctattggaatcctgcaattcaagtgtaaaaagcagtctaaatatggtgcttgttgacaaagaagcttggggcgaggactcaggcttggcatttttccggtgtcttatagatcttcggctgaagggcacactcaagtcttggcaaaccatgccaaagttctttcttttggcaggttcaataactcctgctgactctgattgtttgaggttggcggggtattctaatagcataagaaaaccccttcgtcttagtactgttgctgcttgtcttagtaaagcactaggggttggacttacaggccgacgaagtagagataattctttggttcttcgaagtgtactaacaggaaaaaacattttagttgtggacgacaatgctgttaatcgcatagttgcagctggtgctttgaagaaatatggagctatagttacctgtgtggacagtggaaaggaggcaatttctaggctccagccacctcataaatttgatgcttgttttatggatgttcagatgcctgagatggatgggtttgaagctactagattagttcgttctgtagaaagtaaaatcaatgatacgatccaggcagcatctgctaaaaacccatttggagataacaatattgcaaagcagaagagctatgcagtaaatcgagaacagaagtttgattggactgctatttatgtttcatttgacaattggatgaaatctatttcaacatcacgccttcagccatgtgcttaaggggaaactttgaccatttttacccagtggaaatcaatgagggacatacattgaactgacatagcctccttcatgctgttccagtgtagtggctgacaagatgacatcaatggcgttcttgttgtacagctaatatagattatgagaaggctaatgctcctgtttattctgtattcttgagtgtacatatgaaatggcaagaaaatagtgagagttggaggatttgtctggtggcttgaagaatgtaaataggaatgttcatatccatcttttctgaggtctggttatgtggggtgtaagttgtacatatgttctcttgtagaaatgtaattgattattagattacggcaatgttccaaaaaaagtaaatatattaagcttcc

SEQ ID NO: 25109 - DNA, 936 bp, Oryza sativa
  Clone ID: PAT_MRT4530_30028C.1
atggttgcgcacggcgtgttgccaagcaaggagatcatcgggtggcgtccagcatttgatcctactttgcccgagtactcgtgctgcccgcccaagtaccaagatatctggaactcccttcctatgggcgaagaatcttctcaagccctcgagctgctgaacaaactattgaagataaaggaacagggtcttcaaggggagcagatcactcggcacttcataaagtgccgactggctccaatcaaagaaagatactacacgacctttgagtatgatgggaagactgaccccaaccaaaaggatcccgactccctcgaattcaaaatcataaaggagaggatgtataaaattttctcatccggtatcgtggttgacttctcacatctgctcccggtcgtgccatacaacgccttcaatccacctccagcagaaaatgctctaatgaagtctgatcctccaactgcccagcgtcatcaaggccaggcttccggtggtccaaaaatccaacccggcgcccaaaaaagcagtgctgccccgactgaacaagcgggctctcggaagaggaaaatgatatgcgatgatgacaatgacagtgataatgagtcggccggcaagcagcctaaaaaggctgctctgccgaagaagaaaacagtcagaggtggagatgagatatctgcgatgccacaggtccgagggtggaatggaagaggttggataataacttgggttgtgctggatgagaactccttaggccagttagaaacggcacaatatatatatggatccaggcattccaggggtggcaactgtttggagatgtggtactatatattatgtgcgagctgtgggggagggttctcatcggtgagggagaaaaagtatatgtttggacatttcgctagtactccttccgttttaagtttgaagtcgttttga

SEQ ID NO: 25110 - DNA, 380 bp, Oryza sativa
  Clone ID: PAT_MRT4530_30029C.1
aacccaaataacatggaagaaatactctttattgaaggttatcatgagatcctacaaattctacaagacagctgaaaaatatctcaaatcttcctttttggccgttgctgtcactacccacgcgatctacatgggtacatgcagcgacaaactgaaaaaatggactgctcatgtgtcccaaaaacgacaaagaaatggaccagagaaagagatccatgtgaaacaactgtgacatcttctagatgtagaatggcaatcaaatcggccaatcgtaattggactctgcccgcaaccttgtggcactcacaactgagaacactgcagagtgcgactctgcttgctaggtacaccgcatagtatcctgaaatctacagtatatt

SEQ ID NO: 25111 - DNA, 372 bp, Oryza sativa
  Clone ID: PAT_MRT4530_3002C.1
cccacgcgtgcgatgactcgtgtttcttgaaagagccttaccgtagcaacgggtcgaggcatgaccaggaagtccctcatgttcgaagaactggagcacccaccagtgctatatcggcactcgatctaggatacatgcggtgcattatgctaattctcggtatcgagcgacgttactctaccacatctttaccatcgctgccatggacggcatagccccggctggcttgccttgctgagcagcaccacatgactgacatggacgtttagctcgactcgacatcgcctctgctatggctccgactccaccgatgacccacactttctggaacagaaccgacggctgtagactgatggcggaaacacaaacgct

SEQ ID NO: 25112 - DNA, 2208 bp, Oryza sativa
  Clone ID: PAT_MRT4530_30030C.1
atggccctggcgccggcgacaccagcgtcggctcagccattgcctggctgccctgacaagtgcggcaacatcagcatcccctaccccttcggcatcggcgccgtctgtgcccgcgggcccaaattccagctcgagtgcaaccacacctactcccctccgcgcctcatcgccgtcatcgattcccaatccaatttggagatccatctcgaaagcctgtccctcgccgatggtgaggcccggatatacaacaacgcgtcgcggagcttgtacaaccacagcacgggggacctcgtccgcacaaacgacgtcgtgtacttgttcttgggacgggaaggcccttaccgcttctcgtcggccaagaaccgtttcgtcgcactcggctgccccaacctcggccttctattagacgccacagaaaattacgtgaccggttgcatatccctgtgccggtcgtcgccgctcgccgtgtcagcaggggcgtgcgccggcgtgggatgctgccagagctcgataccctccggtctccacacctactacgtgaaccaggacaagcccaagaacgtcacccttcagtattatgccgccactgattaccgctacgtgttcttggcggacgccgagtggctcagtaccagctaccgcggtgacttcaaccggaccggcgacttcgccgtgcccgtcgtgctggattgggccatccgggaagtcggcagctgcgaagccgccatgcgcaacaaggcggactacgcgtgccggagcgccaacagcgactgcgtcgactccaccgagggagaaggctaccgctgcaactgctccaggggctacgaggggaacccctacctcgacggtggatgccaagacatcgacgagtgcgagcgagataaggacgcatgcttcggcaacaagtgcaccaacacgctaggagggtacttgtgcatgtgcccgccaggtgctcgtggtaacccgctcattgaaaaaggctgcgtcaaaactgatctaggtttaactattggtattggagttggcagtggtgcggggcttttggccatggcattcggtgcagtctttttaacacgtaagatcaagaatcgtagagcaaacatgcttagacagatgttctttaagcagaaccgtgggcatttgttgcaacaattggtatctcaaaataccgacattgctgaaaggatgatcatccccttagcagaactggaaaaagccacaaacaaatttgatgaatctcgtgagattggaggaggagggcacggcaccgtttataaagggattctatcggatcttcatgttgttgcgatcaagaaatcaaaggtagcaatccaaagagagattgatgagttcataaacgaggtagccattctctcacagattaaccatcgcaatgtggtgaaactttttggatgttgcctagagacagaagtgtcattgttgatttatgaattcatatcgaatggtaccctttaccaccatcttcatgttgaagggccattatcattgtcatgggaagatagactcagaattgcaactgaaacagctagagccctcggctaccttcactcggctgtatcattccccataattcacagggacatcaagtcccataacatcttattagatggctccctaacagcaaaagtatcagactttggagcttcaaggtgtattcctgctgaacagacaggagtcacaactgttattcaaggaacactaggatacttagaccccatgtactcttacacgggacgtctcaccgagaagagcgacgtttttagctttggtgttgttctaatagagttacttactaggaaaaaaccatactcatacagatcacctgaggatgacggtcttgtttcgcatttcactacgctactcacacgtgacaacttgggtcacatacttgatcctcaagtcgtggaagagggaggaaaagaagttaaagaagtagctttgttagctgtggcatgtgtcaagctgaaagcagaggagcggcccactatgagacaggtggaaatgacacttgaaagcataagatcattgtttctgcagcaagaagctatacatagcatggccaataaaagttctaaggagaatcatgtctcaatgagttacccggcaaatgaaggcacaagtatggagtcgacaaaacagtatagccttgaagaagagtacttgctctcttcaaggtatcccaggtag

SEQ ID NO: 25113 - DNA, 1863 bp, Oryza sativa
  Clone ID: PAT_MRT4530_30031C.1
ctaactgccagccgtccggactgtgaagatgtatcgcggtcctccggcgccatctgctacaaaggataccccataacgcagcatgtttctcctcgctccctcttgccagtcaccggtgctatcgctctcagaggtgtggcttcccatgtcgctctgctctctgttggtttcgacttgtcccgatgaggggaggctgacggcctccatgaactcctcgtcggcgacgagcctccccagcgcggccggcgccaggcaaacctccagcgacatgctcccggcgccgtccggcccctcgtacaccgtcgccttcccgtcgatcttgttcccgccgccgctccgcacccccaccggcctcccccacccgaagtcgttgcccaacacgtcgaaccgcggcgagctccccgtgatcagcgccacgccgccgccgccgccggactgcagcttcgacatgtacgtgaactccggctcccgcacccaccgctccagcgactccctcgtgcccgcctcgtcgaacgacgccacggcgcggttcagctgccatgccgtccacccgagccccttctcctcgatctcgccggccgtcgcctccgccttccccagcgtcagcgcgttcccgacgtaccccgccgggatgccgttcacgcgcccccggcatcccaccatcaccgtgtagaacgtcacctgctccggcgggagtcgccgggcgcggcacacacctcgccacaggtgcgcgagcacggcctggagcgacgagatggtggccgtgcccgtggccgcgccggccatctcctcgttcgccctcgccttgagcttccgggcgctcgttgccgagaaggtgaagaagcattcctgcacttccggccgctcgagccgccggacgatgtgctgcagcttgccgaccggcatggggatcggcaccgggctggtctcgacgaaccaccgccggaacaccggcgccggcgtggagatctccctgatcatcaggccgtcgctcacggcgccgccagcgcggcggttgatctccgaccatgcgttcatgaactcccagaaggtggtgccgtcgccgacggagtggttcagcgacatgccgacgaacacgccgtcggcgagctcggtgacctgcgccgacagcacgggccgcgactcggcggcggcgtcggcgccgagcaccaggttgtacgagtagaacgaccatacctccggcggcgtgtagagcgacgagacgacgtcggacacggccacgccgggcgccgccgcgtggacgaactcggcgccctcgccggtgcaccgcagcgcgacggtgacggtcccgtcgtcggcgcgctcctcggcgacgagacggccggcgaacgggtggaacagcgcgagggcgcgcgcgaaggaggacgcgagggcgtcggcgaggcggtcgccggagagcggcggcttgggcaggaggacgcccttctggatgtagtcgatgctgaggaggcggaggtcccacggcgtgaggtggatgtcgcacggcggcgcgtgaccggacgacgacgacgacgacgacgacgacggccggacgaggcgtcgggacaggacccggacacggtcaacggcgagtgctacgttccggtggtcattgcttcccatgtcacgctgctctcttggaatccgtacgcctcgatctatctgagattctagtattcgaggagctaacgatccaataaacagaaccaccacggtatacagacggaagacgtgacatagtttccaacccatcctagccatagacaagagtaccgacccaatcccacctacggccggaacccccgggacaggcaggcaggactgagcccctagcagcaggacaccggccctgtgccacgacat

SEQ ID NO: 25114 - DNA, 1839 bp, Oryza sativa
  Clone ID: PAT_MRT4530_30032C.1
ttacggccccgtcgacgttcgcagaggcgaagcgaagtagcgctgccttgccttgtcgcccttccccttcgactccattccctcccgcttctcgcgcaacgctatcccgccgccgccgcgtgtctccccaatcccaatcactagcctcctccgtcgaccgtccgccttcccctgagggcggcctgcgtctgcgtggctgcgccgtgccgccgtcgcgcccccgcagcttcttgcgtcttgctgcgcgccgtgccacccgccggcgcctgcgcctgcgccttcctttaccgggctaccaccctgcgccgtctctgactccccggccggcggtcgccctgcccgctgctcctgcacggcgtggctgcaccctagcccctgcccataactccattgtaacaccgcccccagctcgattgccgcccaacaagaaattcctggagctgccatacccaacaagaaattcctggagctgccattgcggcgctgacttccatggagaccgagggctggcctgccctccagcctctgctgtgcctcgcctggatcgccactacactccccatcattgtcgccgcgctgccaatccccgcagctgctggtggtcacctccttcgccggctgctctcggccttctcctcccgcggcaagaccgtgaggccctcccccgcctcatcctctggttcctcctcttctaaggcgaagttcactgttccacaaaaatacttcatgcatttttatgtggtcggagtgctggcaacaacaattttgcttctggcaatatggttctatgcatatatgaaaatgacaccattattgcctgagtcatcaagttattccacaattgccagccatcttgtaggctcaaattcattctcttttggtcgtgttcactcgcgcaccatgggacacaagtatcatgtctggcgaacagtatttgtacttctattgatggaaattcaagtgctgagacgactatatgagactgaacatgtgttccactacagcccttctgctcggatgcatattgtaggatatttgacgggtctattctattatgtagctgcaccattatctcttgctagctcttgtatccctgaagcagcagagtatcttcaaggtcaagtagctgagttcatagtaaagggtcgtgcgagaatgccagatcttgtaattgattcatcatctctactacagcctcttctgaagttggggtggacccagtggataggtgctgttatattcatttggggttccctccatcagatcccccacgcgtccgcggacgcgtgggtgcgtgagcacaaagattctgatgaatatgtaattccttgtggtgactggtttaatcgagtctcttgccctcattaccttgctgaactagtaatatattttggcatgttggttgctagtggtggagaagacattccagtgtggttcctgttcgtatttgtgatcacaaacctgtcatttgcagcagtagaaactcacaagtggtatcttcaaaagtttgaagactatcctcgctctcgctatgccatcattccatttgtatgctagtgtctacgaaatggctacattatgcaaagcttatgtatttgcacacaattacgacatgtaacttagcttgatgtaaatgtgataacaatcatactacgtaccaccgtagaggctggaagtgttgtattgtataacgtagccacgcagaatgtacctgtgacacttcatgctgtgtgttatgctacacacttggatatttatcaacattcttaagcatcgggaataaagttcttgcagaattggattgaaaaaaaaaaaaaaaaaaaaaaaaaaaaaaaaaaa

SEQ ID NO: 25115 - DNA, 444 bp, Oryza sativa
  Clone ID: PAT_MRT4530_30033C.1
ggaagataccgtcaccctgtgcattgctgtgagagattccgggaattagtctgcaagcacatcttatcagcaacagacaattcaaacagtgagaaggttccttctgggactgggaaggctatcttgaaagtatctgaggatcaaactcagatgttgctcaatgtaatcagcgagcttcctaacaatgaattgcttctccagaaacatttcatggctgttctttcatctgtttggagatcgaagtctgcctgtgagtcccactgtgttatgagttactctaacacactccagaaacctggcagactcagcgagaactggtccatgacaaacttcagaccaatacttaatctagtaaggacagccctcgcagatgctcaggttcaatgtccaagaatggtagttccaacaagcaatcatgagtcccgccgtaactttttggaattg

SEQ ID NO: 25116 - DNA, 525 bp, Oryza sativa
  Clone ID: PAT_MRT4530_30034C.1
actagttctagatcgcgagcgccctgccccttcgtcgtcgtcgcctgtcccccggcacgtggatgtaccgctacttcacggggagccaccccgtcggccccgaccgggtggattacgcgccaccggttccccgacacggcttagccacgtcaaggacttacgcgcgcgatgtacggcggctacctgcatacccggccacaaggatcccgcccccggcgcgtaaccccccgcagcagcagccaacatgtgtgtcaggtgtgtggcatccagcttagatgtgatcgttcttcttcggtgtgtttgtgttgtcgatttcctcacttcttctgtaggctactttaatttggtatttggatcttcttcttcttctctggatcgtacgtcactcgggttgtatttagtttggatcataagacgtcgcaccgggctgaattgatcttcgtcatttgccctgattcgatctcccaatggtcgatccaattcctcccagctcgaggttacgctcaaaaaaaaaaaaaaaaaaaa

SEQ ID NO: 25117 - DNA, 476 bp, Oryza sativa
  Clone ID: PAT_MRT4530_30035C.1
gcccgcgtacggagcggttgctaggatatggactctgtatgggcatggtgggaggtcaccggcttgcaacaatagtaaacgtgctgggaagacaggcgaagaccagagagactatcgaccctgaccctgactatagattgccaatcgaatactcgggatagctggtgcatttgcatatgcagacaatcttcttgctgatgcacctgtaagcctactgaggtgtcttgttttgtttcagactactagagtacgattagtcttccatgatgaggccctgcaagtgaaagcggtcgatcagttagaggagataggtgaaaatgtgttcgtcggtggcaagattctgtggatgtactcaacatttgtgaatagcgaactcgtggaggccacaatatactatctggggttattgcaaggagacccacacaataccctaacggcatattcattacttccctgagattattaacggacgacag

SEQ ID NO: 25118 - DNA, 423 bp, Oryza sativa
  Clone ID: PAT_MRT4530_30036C.1
ccggccgggaccctactacccaccccccgtacgccgccagccacacaccacaattgcgccgatctcataggcactgcatagtgaaagatgcccaaatacagccaacaagatacttgacacggttgtctgacttgctctttctgcaaatgccactactgcaatcaccactatgcagtatttcccagcaacattagccatgggcaccacggatccgtataggcagtacatgatgcaaacggtgtgcatgcggagctccacagccatgttcatatcacagccaatggctcccctgcagaaacaatggtgcatgcagctgcaaggaatgatgcctcagtgcaactgtgacacccgctaccaaatgatgcagatactgcgacaagtaatttgtgctagactacagcgaaaccagatgatgatgaacat

SEQ ID NO: 25119 - DNA, 455 bp, Oryza sativa
  unsure (1)..(455): unsure at all n locations
  Clone ID: PAT_MRT4530_30037C.1
cccacgcgtccgcccacgcgtccgcgctttttaattccgatggccccgccgccgccggcccgcgtataaaccacagtccgccccgcccccgcccgacgaatgcaccaccgcctcctcctccgccgcggcgcgatgcccgtccccccgccgctgcccccgcggacgccgccgccgggggtcgcgcgccccttcgcctccctccctcccncaccgcctctccagtcacgcagggaggtgcatgtttggtatgtttgccctgatgagctgaatgatcactcccacctggatatgtacatggaactcctttctccctccgaaaggaagaacgcgctgtctatgaacgggccgaggctgcagaaagatgctatgttgtcgcgtgcattgctgcgcactaccctctcaagatatacaaattctaaaattgatccaagatcatttgagtttaagaagaataa

SEQ ID NO: 25120 - DNA, 1486 bp, Oryza sativa
  Clone ID: PAT_MRT4530_30038C.1
tcactcttctctcttgggctctgggcaggccgaccaccaggtagggaggagaccgatggggcgaggcgggagaggaggtccggtggccggcgacgacacgggagcaggggagcaaggcatcggcggcggcggcggtagtggcgctctggcgagctcctcgccagcgcggccgatctcgttgtgtatccaaaagagaaaaggtatcctattcaaatgcaaacccgacggtacccttctgcgagttgcatggtcggccttgaagaggatggcgaagaggttggcagccttgaagaggaggagggcgaaccagtcgttggcgaggcggtggaggagatggcgttgggcgtgggtgcagggggcggcggagtcgaaggcggagtcgtcggagtcgatgtgggagaagagggcgtgggagatggcgatgtggacgaggaagaggaggaagagcgggaggacgaaggcggcggcgatgcgggcgacatcgaaagccaaaaaccactcaagaagctgcaaccgcgtaatctcgagaaaacggtttactcggcctaagacagtgggagacgacggcgacggcggcggcgggaggaagccatggttctcgctctgctgttgggctcctcctcttcttctcttgcggcgccacaccctgcttgctcttccagttgaccaggctatccctgcagagacctttgtacagccaaaattgtgccaggttgctgtggtagcagccatcgacaaggctgcggttcctctgaaattcgatagcccttctgatgatggcggcacaggtttgatgatgaagggtatgactgccaagaactttgacccaattcgctactctggtagatggttcgaagtagcatcgctgaaacgtggctttgctggtcagggacaagaggactgtcactgtactcagggggtgtattcatttgatgagaaatcacgctcaatccaggtggacacattctgtgttcatggtggacctgatggttacatcaccggtattcggggaagggtgcaatgcctgtccgaagaggacatggcgagtgctgagacagatcttgaaaggcaggagatgatcaaggggaaatgctttctccgtttccccacactaccattcatacccaaggaaccttatgatgtgcttgcaaccgattatgacaattacgccgttgtgtctggtgctaaagacacaagctttatccagatatactcaagaacacctaatcctggaccagaattcatcgagaagtacaagtcctacgctgccaacttcggttatgatccgagcaagatcaaggacaccccacaggattgcgaggtgatgtccacggaccagcttggtctgatgatgtcaatgcctgggatgactgaggctttgacgaatcagttcccagacctgaagctgagtgcacctgttgcattcaacccattcacaagtgtgtttgacaccctgaagaaacttgtagaactgtacttcaagtaa

SEQ ID NO: 25121 - DNA, 2553 bp, Oryza sativa
  Clone ID: PAT_MRT4530_30039C.1
atgggtttcgtctccggcatcgacgacttcgtcttccctcccgagcaggtgttcctgttcggcagcctcgacttcatcaccaacgactttggcaagatttctctccttgactcggatccgaaccagtcagggagaggccaggtctccgtcccgttcggtatcccaaactcggccgagatctactccaaaatcatctcaaccgagttggcttcaaaccactcgaacgagatccaatctactccgacacgacctgatcaagatgatggggcctatccctcaatcctgatgaaactccccgacgatttggccgctgttttcaccacaaggacatcttcttcccgtaggcctagacgggatccggccttggccccgatccaatctagctccagggaagtcggcgttatactccaacctctcgggacggttttgacggaagaattagatggctaccttagcaaccccggtgtcgattctcgaccgacggagatcctcgagtacgacgacttcggctaccactacgactacagcaacctcgacgacttcgacgaaagctacgaagacaactacacgcctctcttcttcggcattttcatggctgacaacgagacggcagaacagcacattgaaaggacggcggtttttcgcaccctgcagcagaacgcggtagccgcgattacccttctggacactctacttcagcaagatgcacctgaccacgtcgtcaacatcttaaaccagaccaagaccatgatcgtcgcctcggtcccagtgattttctcaagcgtccgtatgccgactgacagccgagttccacctcttcgatctaaagactatcaccaaccaagccttagcgttgccggcgcgggatctagtcgcaggagcagggatcatggtgaacgatctgttcactcacctgccgaccgacacagggagcgtccggctgaacagcctcgctctccacgttgcaggcgtcccatcgatcttcgcgatactatcaaccagcgtcgtgcggcgagaggccacattccctaccaatcactagatcgttacgacgacgatgtggatggagttgccgccttcacaagtgacttgcgtcgagtggattggccagccggcttcaagccgactggaatcgagaagtatgacggcacgacaaatcctgagtcttggctcaccgtctacggtctcgcaattcgcgcagcaggaggagatagcaaagccatggctaattatctgccaaagtccggagaatcccttcgagattacatccgacgtttttctgaacaacgtaacaagatttctgacatcaccgatgacgttatcatcgccgccttcactaagggtattcgccatgaactcttagtcggcaagtttggacgcaagcctcccaagacagtcaagcaaatgtttgaaaaggccaatgagtacgccaaagtagaagacgctgtcactacatccaagcagtcgggcagcacctggaagccaaagaaagatgcgccgactacggggggagtggaagtgccaatcacaaagatcgcaagccggtcacacatcaacaccttcgacaagatcatgaatgcccaatgcccgcatcatctgaattcaaaccacgcagccaaagattgcttcgtctacaaacagttcacagagcaatatgccaagaacgcacggaagtcgattgacagagatcaaagcacgtcgaagaagaaggatgatgaagacgatgccccgactggttttcaagactctcgcaaggaactcaaccatatctttgtcacctttggcactcgggagaactttcgcacagagaacatttgcttcgaagttgctgactttgagacagcgtaccaagctatactcagacgcctggcgttacccaagttcatggctgtcccacactatacctacatgatgatgaagatgccaggacctcgaggagtcatatctctgcagagtgacatcaagcaagccgtcacctgcgacaaggaaagctgcgagatggcacaaacacgcgagatcacgctcgctcgagaggagattcgactggctgcatcaacagcaaccgaaggagaagtgcctgcacccaagatatcaaagagcggagaaagcgacggcaagactaagaaaattcctcttgatccctctgatcccaccaaaactgctatcagcttgaaagagtccgactgcttgaggacctcattcattacgccttttggggcttactgctatattactatgccttttggattgaagaacgccggagcaacttatcagtgcatgatccagaagtgtttttcaactcagattggtcgcaacgttgaagcttatgttgatgacgtagtcgtgaagaccaagcagaaggatgacttaattgcagatctagaagagacctttgctaacatccgcgccttcaggatgaagttgaatcctaaaaagtgcaccttcggagtaccgtcagggaagccgcttggctttatggtatcccgtaggggcatacaagccaatccggagaagatcaatgccatcctcaacatgaaaccgccaagttcctag

SEQ ID NO: 25122 - DNA, 906 bp, Oryza sativa
  Clone ID: PAT_MRT4530_3003C.1
atgccggccgtctcaccggatccgccgcctccagatcccggcgaggaggagcctgggaaactacaatggttgccgctttcagatccggtcatcgtcatctacttccataccaccgcctcttcccactcgccaccgccccatcttcttgctgtcgtcgccttcggcctccagtctcgcggcaccctcttcccgccgccaccgcgcttgtgtcccgtgccagccgttgcgctcccgtcccgcaccggcctccgagctcgcctctcttgctggctgcgtgcttgctgcctcgctcgcaggggcgtgcctaggttatactacccggtgtcacaggacaccgggctcccgataaagaagacggccgcggctacgaggccgcatgattggatcggaccgcggcgagctggcgtcgccagtggcgtcaggcgcacgacctgccacctcgcacgcgccccgtgggacccccgcggtctcggcgtcgtctcggcgtcagggctcgcgctggccgacaagcgggctggtgttcacgtgggcccggctgaaaggggggctcctgcagctgggggcccacctgggcggtgtccgttggaagcatcccgttggtggatgccccgtgggcccgcggcggctgaggtcctcgggaagggtgacggtatccgtgggcgccaggcgctgggagcctgggattgggcggggtgtggggccacggcacttgcacggggtttgactgacggtgtggccgcgtgggaggcgatggatggattgttccgccaccacgcgagccgccgtgacgcggctgcagtgctctgctctcgcgtggttggcactcaccacctcacctcatattttgctgcttgcatgattggtttggaacagcgacactggcacactgctcccctgaatccctga

SEQ ID NO: 25123 - DNA, 389 bp, Oryza sativa
  Clone ID: PAT_MRT4530_30040C.1
tgcgtccggccgtccgcccactcgtagaagagacggcacaatttacacttcgccccctccaaatcttctcctactcctcctcctccttctcgccgtcggcgacgggagcgggcccgctagggtttcgggcccgcggggggtacttcttcttcttcttcttttggtcctgtggtcaagcggggccccccgtccgatggtcttcggggcaaccgccgtcgccgccgggggtggagccggggccgccgggggccggaaaggacaacaagctgcttgtcttgtgccggccctaatggaaccccttggcccgttactcgatcggcttcccgtcgacctcgatcgccagaaacttcgctcatttactacacttgccgcaattacaatcacactta

SEQ ID NO: 25124 - DNA, 395 bp, Oryza sativa
  Clone ID: PAT_MRT4530_30041C.1
atggggtactgggcaagaagcggtgacagcaagcagcggcgatgggatggagcaagcggagcaatggcagtggagcaggcagcaatgtctggccgtggactgaaggaagcacatccagtggcggcggcgaggcagtggagagctcgtgctgcagtggcaggtctagcaacaacacgagcagatccattgacggcggcggtgggcaagagcaggcctgacggcgtgcaagcagtcctagtggtggcggtcgcggtgagcaaatccaagggtgcggtgggtttggcaccgcttcgctgtgacgcggtgccaataggcccaatggcaacgttggcggtgaactccatcaccatcattctcaaagatgatgacaacaacacgaccaagactaataacaa

SEQ ID NO: 25125 - DNA, 497 bp, Oryza sativa
  unsure (1)..(497): unsure at all n locations
  Clone ID: PAT_MRT4530_30042C.1
cccacgcgtccgcccacgcgtncgcccacgcgtncgcccacgcgtncgcccacgcgtccgcccacgcgtccgcaaaaacattatgatactcatgaaacggtggaggaatgccttgctgatcaaaatcctcgcgttctcaaggaacagtggcaatatttagttgcatattggggtacggaaaaagcgaaggaacaaagagctttgcacggataattgaggaggagaagcagaagcggcctaacaatgaggagcccactgctgcggatttgttcctattgactcatacacacagaaacgggaagcctatgaagaaggaaaaagctgatatcattgcacgagtccgtgaacaatctcataagcaagccgaatgctcaggaagtgactctgcagcacacaaagtcggacttgaatcctgctccattggcctgcgtgggaagaggggtcatcgtcggaaggcagtcttgcaggcatccttcaaggaagctgaggaggctaaa

SEQ ID NO: 25126 - DNA, 288 bp, Oryza sativa
  Clone ID: PAT_MRT4530_30043C.1
atggcggcggaggctggaggccggcggaggcgcacggaggccggtgcggagggccgcgcggcaggcggtggcggcatggaacttgtgatcaactaccgcttcaccacttttcacgacgtcacctccgttttcaccgctttggcgaaaacactttccccaatctcctccgacaaccccctcgagctctccggtgacttcgcaggcgacccccttcgcggcaataaccctgtttctgacaatgtcaagttccgccgaacccccgagcgcgccatccgccgaatatgctag

SEQ ID NO: 25127 - DNA, 354 bp, Oryza sativa
  unsure (1)..(354): unsure at all n locations
  Clone ID: PAT_MRT4530_30044C.1
acgaggctaacccgcatgggcgcgcgccaagnaggcgggaggagtagcacaccgccaccatcaccagcagcagcatggtgcagctgagccgccgccggcaccgcnagcacgctccatagccctctgccatggcggcantttccgtcctcctcctcctcccttcccccttcctccgtccgtggtccccggcgcaccggcgcgctgcggcattgccaccacgacgacgacgagcacgagcgggaggagggggctcttcctcttggactngcgctgccgccccggcccacggcgacgcgcggcgtggcggcggtgcttcngagcacggtttttccagcccagcacagggcgggcggt

SEQ ID NO: 25128 - DNA, 3145 bp, Oryza sativa
  unsure (1)..(3145): unsure at all n locations
  Clone ID: PAT_MRT4530_30045C.1
gcgaagtgaagtagttctagtcagtgtaaacaaaacagaagagagtatcctgttacagtagccaatanaacagaagagtacaagcactgggctccgggtttagagagccaacattacacatgaacggccaactaaacgtctaaacctcttcgtttcatacaccattccacgatcaagatggaatcaaccatgcatattggcattgtctgtggtgcgattatcatcgaaatcgtggactaggggaggcagaaggatcgtacagtgcagagtagtcaagatatggctgcaaaatctcatgagcgcttcgtgaattttggacctgtggaaagttttgcgtttgaccatccgataggtcaccagttgacgtcgtcttctgcatagcactaactgtactcttcatattcgccaaatcctcttgcagtttcttctgactttcttccattgccaccatcttcttcctcagcgtcgctgcctcgtcttcagcctttcttttagcctcctcagcttccttgaaggatgcctgcaagactgccttccgacgatgacccctcttcccacgcaggccaatggagcaggattcaagtccgactttgtgtgctgcagagtcacttcctgagcattcggcttgcttatgagattgttcacggactcgtgcttccttgtgtctcacaatgatatcagctttttccttcttcataggcttcccgtttctgtgtgtatgagtcaataggaacaaatccgcagcagtgggctcctcattgttaggccgcttctgcttctcctcctcaattatccgtgcaaagctctttgttcctgcagtatgcgtagcggttacatttgcccgacaagctttatttcgactactcacagccttcgctttttccgtaccccaatatgcaactaaatattgccactgttccttgagaacgcgaggattttgatcagcaaggcattcctccaccgtttcatgagtatcataatgtttttgttttaagagagctttccaactcttccactttcttcctatacacttcatgatccagaattcagcagctggagcaatgtcaaatttgagcttgacaatatgatacatcacatccttgtttttctctggaacacgtctccaatcttgatgtgtcagaggtgccaatattccgtcacgtgctaatgcacccagaaaggtagataaggtgcctgcctctttcccaacaggctcccccgaagcgttcaatagcactggaatgcggacacccttaggcaaattccacaccttgagacagagtgtaagaccacgaccacgaccacacccttgattcctcttggtaccaacattccagcgttcgtcgcaatcttcagaatcacttaatgcatgcacatcaccagaacttgcctgtgacatcgcacgctcaaatgatgaattactagatcttagcttcgcaagggcctttctaacttcctgcggaacgtagttacatgcaaaatgctcaggatcagacatgtcgatatcggaaggtggtggtgtagttaactggacgttgtcaaactcattagagactttttcaggggtcatatgcctaggggatgaactagggcatatgctgttaatgattctgtcgatatctggagagttagacaaactctgatctggagaaggcatatacagatcatcaggctcattttctgatggttcactgtctgtgatggcagctggcatgtggccagttgaagatgcagcttgcctctcaacaggatccctgtgtattgattcagtatccatgactgcagcagatacttggtcattttgagaaacctgctgctcaaaagacttgtttttgctgtgttttttgtcttttgcagcaggagaatctttggccaaacgtttactgcgcctaagttcaagacctgaatttgaattagccaacaaactcttcgtttttctcttgcgaattgtgcagctaaaaggttccgattgttctttttccgggcatctaattctcccactgctatcccctgcaacagtctgattgtccagttgagcacatgtctcttgtctatggtttacttgacttgcagtcctcaattgcttttcctggacatgaaccacaccatctgcatgcttatcctgagcattctcttgagaaattgcaatataagaaggctgtttttgtgcctgttgtatgatccgcttggagttgggagcctgtgcctgattcttatctacatttataggtttgggtccaacagagtgcaccgttgtgcaatttatacgcgttgcagtagtctcatcaatcagcgcaatgcatcttgactcactaaaaactgtgggatcaatagaatctgcctgtacttcattaactctatctctatgatctagatgtgtctgcttcatacgaaaagcatagctagaatgttgatcttgtgcctgatgcctgaactggttcagaggcttttcttgtgtcttttctgcacttatgattccacggccaacagattctctgtttctctgcttatgatgccttctaataatctcattggccccatgtatcccttctccatccatcatgtaatcagaacgatacgggtctgactgctccggaagctgatttggacgctttgtatgtccctgttccatacgatttagtggatcgttaggttctgcttggatgagtcccgtgcgactcgcaatattaggatgctcttcgtgcgcctcccggacttggaggatcggcggtggcgacgaggtgccgatcggcaccacggggacggcgccctccaccgcggcggacgacaggaggtagtgccggagccgcgcggtgtcgacggcgagctcggcggcgcagatggggcaggcgcagcgcgccagcccgacgggcacgctgagcagcgccccgcaggcgccgcaggggagccgcgcgccgcggacgtcggcggcgccgcggggcaggggcagcgccttcctccgtggcggcggcggcggcatgagctccgggggcagcgactgcggcatggcgcagtcggggcagatgaactccgtcagtcccggctccacctccagcgtctccccgcaccccgcgcaccgcacctccagcggctccggcgagcctccctccgccgccgccgacgccgcagcgcgccctggcgccat

SEQ ID NO: 25129 - DNA, 343 bp, Oryza sativa
  unsure (1)..(343): unsure at all n locations
  Clone ID: PAT_MRT4530_30046C.1
attcttttctcacccacgtgcttcttctccaagggggggttttcttgaacccaccctggggtccaaacacccatcactacctnaatcagacctcgataaaccatctctacctcctcatcaacctctttccagtctacctccagcactctcatttccaacacctcatgctactcagaaaaatctgatgttacatctgctccacacctcattctcacaatttatgtcctcctgaacacatcccatctggtttaaccacccctcatataccatcctcaaatatcaccccactcccatggcaacacttactttccactccagaatttcctcagatgcaccttcatcc

SEQ ID NO: 25130 - DNA, 582 bp, Oryza sativa
  unsure (1)..(582): unsure at all n locations
  Clone ID: PAT_MRT4530_30047C.1
gaaaaatttatcaagggcgcctccccccttgacggatatattgtctcactactacaacaaaaatttttgcgtgtggtcaaaaacaattttcccgtgcaaatggtcagcctgcacccaattttcacttgcgggtgcctcatccgcactttaaaattggattttcgcatgcgggcccttaagccgcctgcacaaaaaaataaaaattccaaacaaaaaaaaaaaaaaacaaaaccctaactctaatctaccgccgccgccgctgtcctcaccaaggccccgccgccgtcacccccgcggtcaccggctanggattcgtcacccgctcccgtcgccggncnaaaaaacnccccccccctgctngntnntgcnagggaagggntttaccccntttnanttttnanccgctgcccncncctntcaaggncccttccnctttgccnttgaanccccnccctccaattncaanggggggnctcctccccnctttcccccncgaggnttnaggccccnttttcaacncncccccnnagggngacctccccccgtgnattgccccccntncggnttncgaacctntccccc

SEQ ID NO: 25131 - DNA, 528 bp, Oryza sativa
  Clone ID: PAT_MRT4530_30048C.1
cggcacgaggagaggaactagtctgagttttttttttttttttttggtactaaaatgttgttctgcatataccactttgatataccaggaacaaatgccaatcatccagcaggcatctctctctctctctcccgctctctcagaaaaactaaaaaagaaaaaacagagggttccagagatgttggtccaaatctctggattcgaccgagccacattggtcaggctcgtaccacctcataccacctgtcacatagcactagcagcaagcagtaaccaccccaagaaaaaaaaaagaaaatttcttcgtaacagctaagctagttgcaggctccaacgtgtccagcgcctctggactcgttcgcacttggccgcttcctcctccataacaaaaaaaaaaaaaaaaaaaactcctcttctgcgctggtgcaccaattccacacgcaagcctccccaattccagttttttctcctcttttttttttacatttcttttttcttctaatcgaatcgacggctagtaaacgggca

SEQ ID NO: 25132 - DNA, 3658 bp, Oryza sativa
  Clone ID: PAT_MRT4530_30049C.1
atgaggctgagcaggctgtacagtttcgcgtgcgggcggaggccgacggcagtcgacgacgaaagctccagcaggatcggcgggccggggttcacgcgcgtcgtcaacgccaacggcggcggcggcatcccggagtacgggtaccgctccaactcggtgtcgacgaccaagtacaacgtggtcaccttcgtgcccaagtccctgttggagcagttccgcagagtggccaacatctacttcctcatctccgcctgcctcacctacaccaacctcgccccctacacctccgccagcgctgtcgcccccctcgtcctcgtcctcctcgccaccatggtcaaggaggccatcgaagactggaggaggaagcagcaggataccgaggtaaacaacagaaagacaaaagtgctccaggacggtgctttccattctaccaaatggatgaacctccaagttggtgatattgtcaaggttgaaaaagatgagtttttccctgctgacctaatcctcctctcatctagctacgaagacgccatttgctatgttgagaccatgaacctggatggggagacaaatctcaagctcaagcaatctctagaggcatcatccggcttgcaggaggatgacagcttcaatagcttcagggctgtaataaggtgtgaggacccaaatccacacctctattcctttgttggcaacatcgaaatcgaagaacagtatcctctgtcaccccagcagatccttctcagagactcaaagcttcgcaacaccgagtatgtgtacggtgtggtcatcttcacaggccatgatacaaaggtcatgcagaatgctatgaaagccccatccaagagaagtaagattgaaaggaagatggaccggatcatctacttgcttttgtctgcacttgtcctgatttcagtcatcggatcggttttctttggcatcacaaccagagatgacctacaagatggcaggccgaaaagatggtaccttaggccggacgactctaccatctacttcaagccaaccaaagcagccatatcagcaatacttcatttcttcacagccatgatgctatatgggaacttcataccaatctctctgtacatctctattgagattgtcaagcttctgcaggctctgttcatcaaccaagacattcatatgtatcatgaggagaccgacacaccggctcatgctagaacatccaacttgaacgaggagttgggtcaagtggacacgatccttacggataaaactgggactctgacttgcaattccatggagttcatcaaatgctcaattgccggaactgcgtatggccgtggtatcactgaggtggagagagcaatggcgaaaagaaaaggttctcccttgatcgccgacatggccagcaacacccaaggctctcaagctgcaatcaaaggatttaatttcacggatgagcgtgtgatgaacggtaactgggttagccaaccccactctggtgtgattcagatgttcctcaggttgttggccgtttgccatacgtgcatacccgaagttgacgaagaatcaggcacgatttcttatgaagcagagtcacctgacgaggctgcttttgttgttgccgcacgggagctcggtttcacgttttaccagaggacacagaccggtgtttttctgcatgagttagatccctcgtctggaaaacaagtcgacagatcatataagctcttgcatgtccttgagttcaacagtgctcggaagcggatgtcggtaatagttaggaatgaggaggggaagatctttctctttagtaaaggcgctgacagtgtgatgttcgagaggctatcaagtagtgattgtgcgtacagagaagtgacccaggatcacataaatgaatacgctgatgctggtctgagaacacttgttctcgcataccgccaacttgatgaggccgaatatgcgaatttcgacaggaagttcactgcagccaagaactctgtcagtgctgatagagatgaaatgattgaagaggctgcggatttgcttgagaggaaattgattcttcttggtgctaccgctgtcgaggataaactacagaagggggtgcctgaatgcatcgacaaacttgcacaagctggtatcaagatatgggtgctgacgggcgacaagatggaaaccgccatcaacatcgggtatgcgtgcagtctactgagacaaggtatgacgcagataaccatcacactggagcaaccggatatcatcgccctggagaaaggcggtggcgacaaagcggctgttgcgaaggcatcaaaggaaaacgtggtgaagcaaatcaacgagggaaagaagcggatagatggatcggtagttggcgaagcctttgctttgatcatcgatgggaagtcgctgacatatgccctggaggaggatgccaagggcgcgttgatggaccttgcggtgggctgcaagtcggtgatctgctgccgttcgtcgccgaagcagaaggctctggtgacgaggctggtgaaggagagcacggggaaggtgagcctggcgatcggggacggcgccaacgacgtgggcatgatccaggaggcggacatcggggtcgggatcagcggcgcggaagggatgcaggcggtgatggcgagcgacgtgtccatcgcgcagttcaggttcctggagcggctgctgctggtccatggtcactggtgttacagcaggatatcggcgatgatctgctacttcttctacaagaacatcacattcggcgtcaccctcttcctgtacgaggcctacacctccttctccggccagaccttctacaacgactgggcgctgtcgacgtacaacgtcttcttcacgtcgctgccggtgatcgccatgggagtgttcgaccaggacgtgtcggcgcgcttctgcctgaggtacccgatgctgtaccaggagggcccccagaacctgctgttccgatggtcgaggctgctggggtggatggcgtacggcgtggccagcggcgtgatcatcttcttcctgacgtcggcggcgctgcagcaccaggcgttccggcggggcggcgaggtggtggacctggccatcctgagcggcaccgcctacacgtgcgtggtgtgggcggtgaacgcgcagatgacggtgacggccaactacttcaccctggtgcagcacgcctgcatctggggcagcgtggcgctgtggtacgtgttcctcctcgcctacggcgccatcaccccggccttctccaccaactacttcatgctcttcaccgacggcctggccgccgcgccctcctactgggtggtcaccctgctcgtccccgccgccgcgctcctcccttacttcacctactccgccgccaagacgcgcttcttccccgactaccacaacaagatccagtggctgcagcaccgtggctccaacgccgacgaccccgagttcggccacgccctgcgccagttctccgtcaggtccaccggggttggcgtctccgcccgccgcgacgccagggacctccacctccctcctccttcccaatcacattcacattcacaaaccacatctacctagtaatagtatagtctagcaagcagctactgttcactaacagcaccatttttttttccacatccaaatcaatttccctttttcgtgtaca

SEQ ID NO: 25133 - DNA, 6278 bp, Oryza sativa
  Clone ID: PAT_MRT4530_3004C.1
tacataaaatttacgtaattgatcaatgttccaggaatttgccaactcgcgaccatcgccgtctgcgattttgaatacgcctggccgcagaacttgtgtgatcgtgtacggtccttcccattagggtgagagcttgttgcgccctgcttggctttgaacccgtcggaggacgtagtcgctgatcgaaagcgtgcgtgctaggatgcgcttctcgtggtaacggtgaagggcttgttggtagctggctactcgaacggcaactcgttcgcgatgttcctcgagtagattcacatcgtcgtatcgctgctcctcctgatcctcattggaatacttctgtactcgtgtactttgatgtcgtagctcggtggggagcatggcctctgagccatacacgaggaagaagggtgtctccttgttggacgttgtcggtgtggtacgcacaacccatagtagggtcttgattccttgtagtactatgccgtttgccctctcgacttgtccattgctctgagggtgagaaaccgaggcgaagcagatcttgactcccagcctgatgcagtaatcctggaaattggcactgatgaactgggagccgttgtctgttatgatacggtggggcaatccgaacctgcaaaatatccctttgatgaatttgatggcgttgtcggccttgatttcccccgtgggtatcgcttcaatccacttggtgaatttgtcgatcgccacgaataggatcttgtagccgccctgtcctcgtgggaatggcccgagcatatctagcccccagcacgagaacggctaagtgagagggatagtctagagtgcttgtgctggcagctttgtgtgtttacatgtcgcaggcgtctttgagggcggttggccaaaaaaacccttgtcggaaagcttttctgactaatgtccgaccggcggcatgtgacccacagatcccttcatgtatgtcgaggaggaggtgtctgccgtcgtcggatgagacgcattttagaagtatcccgtttggtgccttcttgtatagatcgttgccgatcatacaatagacttttgatttacgggatattttctcggcttctgcgtcgtcctcgggcagctcttcgctgcatatgaatttaatgagtggggtgcgccagtcgtctgtggtctcgatatcggcaacagcgcgctctgcctttgtagcccccgagccgacgttgggggcgtccgggctatcttcgccggttgcctctttcactgatggccttgtcaggacgtccagaaaggtgccaggttcaagtggttctcgtctggacgcacgtcgtgctagatcatccggttcgatgttgtctttgcggtatacatgtcggacctcgatcccatcgaaccttttttccagcttcctgacttctgcgagatacttggataactcggggctagagcacttgtaatctttatgcacctggttcgcgactagttcggaatcccctttcacgatcagtcgcctgactccgagtgcagctgcagctcttatcccggcgagtagtccttcgtattcggctgtgttattggttgccctgaagttgaggtgaattgcatgcttgaattgatctcccgaaggtgatgtcaagatgaatcctacccctgctccctggctgttgagtgtgccgtcgaacgccattgtccacgtttcattgtcgatttggttgtctgacctgttatcaggcatggtccaatcggctacgaaatcggcgagtacctgggacttgatggctgttcgtggcacgaagtggatatcaaattggcttagctcgactacccatttggcaatgcggccgacaacgtctttgtttctcacaacttcaccgagagggaaggaggagacaactgtgaccctgtgggtttggaagtagtggcgtagctttcttgatgtcatgattactgcgtagagcagtttttggatctgtggatatcttgtctttacgtcgtggagagcttcactgacatagtagactggtcgttggaccttctctctctcgacaacaatgacagtgctaacggaatatggcgtggtggcaatatagagaaataattcttcattaggttgggggggcaacaagtacaggtggatttgataggtagcgcttgagtgcaatgaatgcctcttcggcctcttgtgtccatacaaatttgtcttgctttttcagcagagcgaagaaaggttgtcctcgctatcccatcctagcgacgaacctgcttagtgctgccatgcatccggttagcttctgtacttccttgagtcttgtaggtgacttcatgttctcaattgccttgatcttctcgggatttgcttctattcctctgccagagacgaggaagccgagtagcttgcccgatggtactccgaacgtgcacttctctggattgagcatgaggcgatatcgtcggaggttgtcgaacgtttcccgcagatcgtcaatcaatgagtcgcttgtcttggtcttgacaacaatgtcatcgacgtaagcctcgacattgtttccgagctggtcgctaagtgcaccttggaccgtgagctggaaagtgtttcctgcggttattagtccgaacggcatcttaacgtagcagaataccccgaacggcgtgatgaatgatgtcttctcctcgtcctctttcgccatgctgatttggtggtaaccggagtaagcgtcgagaaagctcaacaactcgcaaccggctgttgagtccaccagttggtctattcgaggaagaggaaagtgatctttgggacacgccttgttgaggtcggtgaaatcgacacacattctccatttcccgttggctttccgcaccatgactgggttggctagccactctggatggagtacctctctgatgaaaccagctttgagaagcttgtcgagctcttctcatatggcttgttttcgatctggtgcaaatctccatagtttttgttttactggcttggcatcgggtcgcaccatgagtttgtgctcaatcatctccctgggtacccccgacatgtcggacggctgccaagcgaacacgtcagcattgtcgcggaggaaggtgatgagcgcgagttcggtcttgtcggggttggcactggagagtgggacgatcttgattgcgccgtctggtttcggcgtcttgtttgtcttgctcactttcttggatggctctgctgtggcaagcgggttgggcgtatgctcgaccatgtcgaggctctgcttgtcgcattgtaccgccagcttagtgttcccttgaatagtgattgttcccttcggtcctggtatcttgagcacttgatacgcatagtgagatgcggccatgaacttcgcgagtgcagttctcccgatgatggcattgtatgctgtatcgaattcagcgacatcaaaggtgatctgttccgttcggaagttgtttgcttggccgaaagtcacaggcaacataattttgcccaatggtttggacgatgactgaggagtgattccatggaagggttgatcggtgggcgtcaactcgcttcgtgggatccccattgcgtccaaggtgctggcgaagagaaggttgattgagctgccgccatcgatcaggactcgttcgaccttgatattacgaatagtgggttcgaccacgattggatatcgccgccgtggaacctccgaagatgtgtgagacatggagatcggaatctggttatgctgagtccgattcctgagtaggcgcctcaacgtccttctcaaccacgcgtactcgcttgtctttttccgatgccatgtgttttgcaagcgactttttgaagacgagacaatcttctagagagtgtctgtccgacttgtgtatagggcaccatgctttcttcgtgtcgctgccttgtgggtctgcgcgattgggagggtccgcgtattctgttgcgagaacttccgattgagctttccttttcccactcttgcgatttttcttcttgcttgactcaggtgcatccttggctggtttcttctctcctccggtcttcggtttgtcgttcttgcgtctcagtgcgtcatccgcatgagcgcatcgattgacaatttcgaataatctccgagtagtcgtgacgcgcctcgttgccaactcttgagtagtatagcgatctctgacaccggatttgaaagcgcgaattacagaaccgtcggtgatctcggggattgtgtttctgcactcgttaaagcaccgaacataatccctcaaggattcacccgggttctgtgtcaacgcatgtaggtcatcttcgatcgcgtggcgcttgtaagttccttggaagttggctacgaactggtgccacaagtctgcccacgaagagatcgagtaggggggagatgcatcagccatgacgtgcagagcctttcaatgcggttggtaagtaattcgccaacgcgttgtcgtccgctccggcagcgtagagtactgtggagtaaactggaaggaactcttctgggtcagtgctcccatcgtatttctctattgctccaggtcggaatctttcaggccattggacatcccgaagtgaacgaccgaaagctctacacccagcgctgggggcggtgggttgtcggcgatcatacgtccttcgtggatgtctgtctgatgatgaagatgacgaggatgataacgatgacgatgggtcacttggttccggcgtacgattacgaggacgtcggccgggttctcgagaatcctgtcatcgtctcccgttgttgtctcggcgccaatctccatcatcgtcgtcattatggcgacgtcctcgaccagtatcgcccagcacccgccgttcgcgatcgtcgtgatcgtggcggttgtggcggttatcaccgttatcgtgaccccgtgaagagacatgacgccgtgaacggttctcgttgtctcgtgtgcgtcatgcctctcggcggccgttcaggtgatcgcggagatcgccggtgccgcgaggtggaggggtgactcgatgaggcgattcccggcgttcagggttttcaccattagcatcgcggttggtggctgttctgggtgcgctgcggcagcggcctcttcgaacgcgttgctgaggttggtcactgattcccgtagtcgttctatccaacgtgcgagatcgtcgttcagaacgggatcgtagggggtttccctcagtattgtgttgacagctctgatgtgctgggccagagtagtcacttgattctccgcttccgtattggtgcacgctgacgtgccgacatcatcaatagccaatacctcacatggcgtacttgttgtcgatgatccatgtcttcgagcaggtgcaagactgatggttcgtggggatcaatgtcgattaccccaataaatcgatctgaaatcggcgtcgctccttgttccttgtccttatccctgatggggatgcgtgactgctgtaccttaggaggcggcgtcttcatggcgctgagaaagaccttgcagctcaagaggtcgtgattctttgtcttgtgaatagaacaatagacatcacgagttggagaggtacgctgaatttcacgctctttgcaggcacgaatttcagcatggacgttgagaaagactcagcaggcttgcaggaagtgtttcctggttttgtggataggacaccaggaccttgtcacctcggaagtaatcctcgtcggctcgtgattcctattggaaaaacaaggcttggccgcactaggatccttctcgggctcggatgtcgtcgacgttccgatctccgcttcggcgggaggatccttcgacatggagtcgccccgggttgtagccactgcgttctcgtttccggctattggcggaccagctaagatcggcactgtggtgtaaaccggaaagacaatttcgccgacttgagtccacaccagtgttgttgaagtaggaactccttagttgaggttggtgttgacgctgttgtcgacgaagctggatgtcatagtagtagaaccttgagcaccaagtgcccctacctagcgcgccactgtcgatgggggatacccgtaaaccggatatagagggtattggggtacgctggtacgaggatttcgtaggctgtggtggatgtgttggctctgagatttgatgccttaggtcctcccggggggtcccttttataccgcaggtcaactggtctccaagtaggactcggagatatcggacccgacacgatacaatgacgacccagttctatccgagtaggactctttccatctatagactccgtgatggacttccttaac

SEQ ID NO: 25134 - DNA, 295 bp, Oryza sativa
  Clone ID: PAT_MRT4530_30050C.1
ggagagagagagaaaggagagagagaagaggggagagagaagagggaggagtgaggatgacatgtgtgggcccacgtgggtcccataatttttttattgttttatgtgtgtactaacatgtgggtcccacggattttattattttttcgggtcgaattgccacttaagtgctgcgtaagtgccatgtagatgaagaccgagtcaaattagccacgtaggcgccacgtcagccaaaaccgccctcaaaaccgccgagagaccttatctgcaccggttttaatagttggggggaccc

SEQ ID NO: 25135 - DNA, 1281 bp, Oryza sativa
  Clone ID: PAT_MRT4530_30051C.1
atggagggtgaaccctcacgccgcctctctttgctggaccggtgcgacgatgggagcgaggatccggtggtgccaccgcgagttcccaccatcctcaacctcacctcccaccaccgtcttgaccgatcgaaattcctaccattgatccaccctactcctgcccgcttcatctcttcaacaggatcttccttccccccctactcggaaccaccaccttcggcccctatgctagaacttggtagtggctttgggcctgaagacttatactcgttctttcctaatcattttttcttgatggaatccatcagtctaccaccatatgatgttgtagatgtgccgccggtgatccctgtcgcactacggtcggggagatctaaccaggggcttcctagcaagctaccgcttattgaggggcataggcggtcgcatagcgacatccccttcgggtattcacaagaacacccacaaatgccacctgtagcatcagttaagccggaggtcacaacgatcaaggggcaccaattggaggatgtggcggctgctgccctcaaggacatgggcatacaggcatggagcccttctggtagcatagacaaagaagttaagagctccggtgctggcagcacaacccaccattgccgcagcttgtcggttgacagcttcatgatggggaacctcaacttcggagttgttggacagcagatgtccagcccccctttgctaactacagaggtgaatgttggtggaggtgagcccattggtagtactgcttctccctttgctgcagagcttgcgaatgtgaaattcactgaggatgagaagaagaagattgtgatggataaatccctctcagagattgtcttgactgatcctaggagggtcaaaaggattctcaacaatcgggcatctgccacgaagtcaaaggagaaaaagatgaagcacgtaggggagcttcaacgcaaattgcaggtgctgcagtcggaaactactacattaggtgcacaagtgacagtgatgcagaggaacaacaatgagcttgtatcacagaacaatgaactgaaaactaggttgcaagcaatggatcagctagcacagttgggagacgctctgacttcaagattggctgctgaggcccagcacctaagagctgttgttagtgagatcagtgatccaaatctgccaagtggttcacaccaacaactgagctctgacatcgaccaactgcagcagctgcttacacagaggcagacatcacaaatccagcataatcagccacaataa

SEQ ID NO: 25136 - DNA, 912 bp, Oryza sativa
  Clone ID: PAT_MRT4530_30052C.1
atggagcttttgcttcttgtgtttcttcttctggcggctatgtcagccgccgtggagagcatcacgagcacggcggtgaaaacggggtgccaggagcgctgcggcggcgtggacatcccctaccctttcggcatcgggcccggatgctcccgccacggcttcgagctctcgtgtgtcagcaacggcagcggcgccggcccgatcgcggtgctcgccggcacgtcgatccaggtgacgcgcctgtccgtcgagccggccgagtcgcaggtgatgctccccgtggggtggcagtgctacaacacctcgcagccgaccaggacataccccgactggagccgcgcgaagacggagatgaaccgcggcggagtgtaccgcatctccaacacccacaacatgctggtcgtgctcggctgcaacaccgtcggctacactgagagcttgaggagcgagggaggcgcctactccagcacatactacatcggctgcatgtcctactgcaacaactcggcgagcgcgcaggacggccagtgcgccggcgtcggctgctgccacgtcgacatcccaccggggctcaccgacagctccgtcaacttccgggtgtacgaccacaccggtatggtggactacagcccctgtgactacgccttcctcaccgaccggaccaactacagcttccggcgagccgacctcatcaagatggacaagaaccggaacgttccggtgtggcttgactgggcgatccgcgagaacggctccatgtcctgcgctgaggccaagggcaagccagggtacgcctgtgtcagcgtccacagcgagtgcgtcgactctactaatggtccgggttacaactgcaagtgtaccgcaggctacgagggaaacgcctatgctcctgatggatgtactagtaagtaa

SEQ ID NO: 25137 - DNA, 909 bp, Oryza sativa
  Clone ID: PAT_MRT4530_30053C.1
atggtgcctggcaacaacaggcctcgaagagctgtctataagtccatgccaacaccgttggagccccaactaaaacggcccagatcatcaagttggggctcagcggtgttggcatggacttatagacagctcttcgaggcctgttgtcgccaggcaccatcatccaacattagtggttgtgtgctggtgattcagatgtggatgtggctaagactaccggttggcaagcctaagtggaggcaaagctttaccctttggccctacaatgagccagacatggagaagacagtggcctacctatttgagagtatagccactgcacatgctcaccgggacgtcgcatacaagcagtacgacagggtgagaacaaagaaggtgaaggactgggtgctagagtataacagatccattgatgaatggaggacagcggaaaggaacgataggtacatcgaggcaatacagcaaaatcatctttttactgagtacgttcgttggctgcataggacatataaactgttcctacgccctacttggacggaagccaatatagaggaagaccgcgactctgatgaggggcgacatccctacgacgttcggactagggttggatatcaaatggagcacgccccacttagagacagagtcggaaggggaaaggggaaggcacaggctccacctagcggcgacgacgaggaggaggaggaggaggaggatgagggctacatcgcaccagacgccgaggagataggcatgtcgcagtctccgatgcacctcatgcatcacagcccacccaatacaacttgtgatccactcggccagcgaaaaagagatacactccgggctcacaagctattcggcgccaacggaaaaagtgatttctatgaagttgatctatgtgtcatatgttaa

SEQ ID NO: 25138 - DNA, 929 bp, Oryza sativa
  Clone ID: PAT_MRT4530_30054C.1
gtgccgcaaacttgctgcaagattaggttacaggtcggttggattggacgacgtgtaccaaccgcggagagtaccaccaccactacctcaatccgtgtgtccaagtactgctcgacactccatcaggatagaagagcgtgaacaagttggtggttcgtcgtcgtcacgcattccacagggaaggggaaaggggaaggcacaggctccacctagcggcgacgacgaggaggaggaggaggaggaggatgagggctacatcgcaccagacgccgaggagataggcatgtcgcagtctccgatgcacctcatgcatcacagcccacccaatacaacttgtgatccactcggccagcgaaaaagagatacactccgggctcacaagctattcggcgccaacggaaaaattggcagggaggaagaggtcgggcgccagccaccctggcgccgtgttagggggcggcgccagctaatcgttcgaggcagaaggcctcggggggtggtggtcggcgctagtcacccttgtgtcgtctataggggcggcgccatccacccgcccaaggcagaagatctacgggttgggggagcagcgccaagcacgctggtgccatgcttcgaggggcagcgccagcaattcggccgaggcagaagtcctcggggaaggttagagcttggccccctaggaggggtgcgccagggtgactggcgccatggtatgaggggcggcgccaaagtggctggcgcccccatttgccacgtcaccccttcaacgcttgcccttgtgccaaggtggcacggtcacggtgccagggtggctagcgccgctatgttggagtacggcgccagccactctgggtaaagatagtgctaccaaccatagtgataaaatccacaccatcaacacaacatggattgtctctgagaaaggcagg

SEQ ID NO: 25139 - DNA, 922 bp, Oryza sativa
  Clone ID: PAT_MRT4530_30055C.1
atgaatggaggacagcgggagaatgataggtacatcgaggcaatacaccaaaatcatctttttactgagtaccttcgttggctgcataggacatatagactgttcctacgccctacttggacggaagccgacatagaggaagaccacgactctgatgaggggcggcatccctacgacgttcggactagggttggatatcaaatggagcacgccccacttagagacagagtctccagagagcttcttaggagtgtgaatgaaatggggcatgccctccgatctccaaggggtggtaaggatacggagaacaaacttcgcaatgtcttagagggaaggggaaaggggaaggcacaggctccacctagcggcgacgacgaggagaaggaggagaaggagaatgagggctacatcgcaccagacgccgaggagataggcatgtcgcaacttcccgatgcgcctcatgcgtcacagcctacccaatacaacttacgatccactcggccagcgaaaaagagatatactcagggcttgcaagctattcggcgccaacggaaaaaactgtccaatgaaatttgttgttggcagggaggtagaggtcggcgccagctaccctgacgtcgtgctgggggggcaacaccagcaaatcggccgaggcagaaagcctcaggggtgggagggttgctggcaccgtgctatggggggcggcaccagccacccgctcgaggcagaaggtctacgggttgggggggacggcgccaagcacgcttgcgccgtgcttcggggggctgcaccagcaattcggccgaggcagaaggcctcaagggtgggaaggggggaggggcggcgccagccaacctggcgccgtgctttggggggggggggtggttgcggtgccagcttcccgcccgaggcagaaggttag

SEQ ID NO: 25140 - DNA, 346 bp, Oryza sativa
  Clone ID: PAT_MRT4530_30056C.1
gatgaaaaggtattttttattacatgacactaaacataaaccagttcacttttgattggaccaagggccccggtagaccactatgggacattttattaatttacacatacttgaagggctaagaggggaacttcctaggccatactggatttcccaacaacattccaattttccctaatatagactggaaacaaggttttaaggatattacaacaatattgaagggcatttatttcaatatggacataaggagcaatactcggcaatatgagtagacactaactggatgctgtgccgaagatgttgtggtaggttattttgacgggcgcatatcagcactgtgaga

SEQ ID NO: 25141 - DNA, 1056 bp, Oryza sativa
  Clone ID: PAT_MRT4530_30057C.1
cggactcgtgggcgccgccgccgccgccgagcgataccggggccgccgctccccatggacgccggcgacgcgagccgcttgggggagtcgctggacgccgtctccgccgccttccagtcccgcgtcatggagctccaggagctcgtcctcgcccgcaacatgtacccggctacggcgataccggacctcgccgccgtcgacgtgtcgctcacggccatggaagcgcagttgcaggcggtccgccgccgcctccaggaggagcgcgaagccttccccaaggccaagaaactagtacaacagtccttgaagcaacagcggaggctgcagcttatgcttgcaaacatgccaactgggatgcgcgaggatgtctttgctacacctctggaacataattcatcaatgatgtttcctgagtcgctcaatttcagctcggctgttccagaagtcagagaccatgatttaaagattaaggaggagccaactgcaccacccaagaagaagggaagaggacctgcacctcgttggtacatatccactgaggagcttgattcgttgtcatcatacatgagagggaggctcactctggagaaggttaacattgccatcaatgaagtggcttcatatgcggacggcaatgctcatcttgttgcatgtccaaagaaaaagttatcagaagacacatgggagaaggcactggaattaagggacattgcagcaagagagtcagttaaggggaggcatttcttcttggaaactgatataaagggaccgggcttaaaacttgataccacagggaaagcaatccttactgtccttcgtcatctcggccgcttccaggagacccggattgggcatcatcgcgttttcatactttcaaaacaacagtgaatgaagggtctcctccaagctttatttaggtgctggagaatataaagtttaatttggtgttaggctggagatagatacgcatgcattgagcttgtttactaattgctatgctgtagtttgttgtatacaggtcagggcaagtactataatgctctatatgctacccct

SEQ ID NO: 25142 - DNA, 174 bp, Oryza sativa
  Clone ID: PAT_MRT4530_30058C.1
atggcagcggtgtcttcggagcgcggggacgacgacgaggttggtgacgcggagcgagagacggtgatgaggggaataaaatgcaaggtcatactccgctctggtgattcaagtagcattgactctgactctgccccatcagttcttaatggtccattattctcattaggataa

SEQ ID NO: 25143 - DNA, 543 bp, Oryza sativa
  Clone ID: PAT_MRT4530_30059C.1
atggcgtggatgcgttgggcggcgaaggcggtggatcggacggcgaaatttgaaacgcgagcgcgggctggcagcgtggagcggtcaaggtgggggcggcgagctggccactggcgtctgcgtcatggtgctctgcctccgggcgcaaggagacatgggcgggagagagagagacccagcccagaagggaaaaaggggagggggacggtgaaaagggaggcatgtcccttccgtttttgggaggagagggggcgggagcacgagctgtgcctcgcggctttggacgcacgcggcgtggggcgcagggctcgacaggatgacgccggcgacgactgcaaaaggacggggactgtttggagggttcaaggtggatccaagggaggggtcaaggaagggcttcaaaagcgggaattttggtatttttgggatggatttgtatttggcggcatgaaggattatttcagaggatttcaaaaagggaagatcattattcaaaaatggaacaagggagatagcggtagaatgccatggatagatagatag

SEQ ID NO: 25144 - DNA, 872 bp, Oryza sativa
  unsure (1)..(872): unsure at all n locations
  Clone ID: PAT_MRT4530_3005C.1
tcgcctgctgaggcatcgcgtgaggagaatgtntacatggcaaagcttgccgagcaggctgagcgttacgaggaaatggtcgaattcatggagaaggtggcaaagaccactgatgttggtgagctcaccgttgaggagcggaacctgctttctgtggcttacaagaacgtgattggtgctcggagggcatcgtggaggatcatctcttctattgagcagaaggaggagagccgtgggaatgaggcatatgtttgcatcaattaaggagtttaagtcaggagctgaggggaaggaagcagctgagaacactcttgtggcatacaagtctgcccaggatattgcactcgctgacctgcctacaactcacccgataaggcttggacttgcactgaacttctcagtgttctactatgagatactgaactcaccagaccgtggcttgcaaccttgcaaagcaggcgttcgacgatgctattgctgaactggacactcttggcgaggagtcttacaaggacagcaccttgatcatgcaacttcttcgtgacaatctgactctctggacctctgacaatgcggaggatggtggtgacgagatcaaggaagcagcgaagcctgaaggagagggccactaatctgtcctgaagtctatttctgagtccatttactcagctacctgctgtattactggatcataagatgtactaggatcaattgctatgtggaatcataagattagggctgcgtatgtcaaaatgtgtcgagctgaagtacccagtggacacagtttatgtgcactacattgcttccgtgacttatttactagttaaaaaaaaaaaaaaaaaactcgagactagttctcgctctctcctctc

SEQ ID NO: 25145 - DNA, 259 bp, Oryza sativa
  unsure (1)..(259): unsure at all n locations
  Clone ID: PAT_MRT4530_30060C.1
ccaccaaccatgctgaagattaaaaggtggttagtggtgcgatacaatccggatgccattgcaaatgtaaaaccaaagctgcgccgttgctgtgccctgtatgttagtctctgatgagttgtgtcctggaaatgtgcggacaaatgatgttcatgcctgaaatgtttgtatgatccggtgtaacttacacagtatttataattttnctgcatcatcgatttggtaaaaaaaaaaaaaanaaaaaanaanaatanaaaaa

SEQ ID NO: 25146 - DNA, 335 bp, Oryza sativa
  unsure (1)..(335): unsure at all n locations
  Clone ID: PAT_MRT4530_30061C.1
aagatcaaacaaaaggtgaatatcataaatgtttggttccgtgatcaatatcttcgcttgctacagctacacaaattttcatttatgttctatgtttgttctttttctttattttgattgtggatctgccattgaatgtctcgattgtctcctcgctgtcaccagatcttggatctcgtattctcatctgtcgcaactgtatgattgattttcagtcttgatgannnnnntnaatccactcaacactctattttgtgggtgggcgacggcatcttggtgtatnttnnnnnaccaccttttgtcgctcccggaggggtttggaatccatggacttg

SEQ ID NO: 25147 - DNA, 483 bp, Oryza sativa
  Clone ID: PAT_MRT4530_30062C.1
atgaggaaggcatgccctggctctaggtggaatgaagacatcaacttgtggaggcaagtatttgtcaataatccggttttcgacaggagtttatcgggttttgttgttcatctcttcatgtgtacatggaaaaataaagaaccacatttgtcggctattaatgatagtgacgagctaaggaaacttttttttgctaaatctactgatgtaccaacaaaatgagtgtgaaagcaatattcctaacggcgcacaagattttctgaagtgtataaaaaatgcacaacattagggtagttatttaactatatggagtgatttaatttgaggtgatcatccattagaattaccgtatctagaaatgctggatgttccatattttttgcttgtgctttatttgtatgacatcatcaaattttcatagctgtcttctatctatgttgctttttataatttaataaacgccatgagattgttttatgcgcc

SEQ ID NO: 25148 - DNA, 317 bp, Oryza sativa
  Clone ID: PAT_MRT4530_30063C.1
tcgattcagtacttctatatgagcatgtatatggctgctatatacgtcttgaaagaggaaaacgaactctatgctagtatgcacacatgttatatcgtgtcacgagtaaacttattacgtgtcctggatatgttaacttacaccatctgcctaactctgtgacatcttgggttgcagaactgcagagttaattgtgccaggttgtgccaactgcatgtcatctgacccggctactgacactgcacagtcaggtatacgctctcccaggtgaacttgcacaacccgactatgtatgtatagaccactgccttcaccgt

SEQ ID NO: 25149 - DNA, 667 bp, Oryza sativa
  Clone ID: PAT_MRT4530_30064C.1
gggttttatagttataacattacgtactaaagactatcagtactaaggtactacacatgtccatcacagcgtaaattcatccatctttttttttggtgttttcaagagcccgtgccagacctccgcggtgaaagtgcagcctagtgcccgtttttctcttcatatccttcatttccaagtcgtaaggagcgtctttaggaagctatgtagcaatattgactatgtgctgtgctggagggttctctctcgagagtgggttgtcggaccaagttcatatggtttcttgtcgttggaagtcttgtgcgggtgctggacaagcttttggggaacaaagtctttgtcaggaggtgaatggaagcctgaaagcgggctcgtgaccgggttcgatgccgcttagagaccagcaggagtctggcagaggatgctttgtccaaggatgggcagaacgcagcagcgggcgcgctggccaacaccggcgcaagtggcctggaactgggcggcagaagtaagagtcttgccagggccggcacagtcgaggtcagcaacacccaagacgtcggtggcacagcactgagggctgtcgtagaggccagagcacgggtcgtaggagcccgctccgttaccaccgccttcgttaccaccaccaccatgaccaccaccgccattg

SEQ ID NO: 25150 - DNA, 254 bp, Oryza sativa
  unsure (1)..(254): unsure at all n locations
  Clone ID: PAT_MRT4530_30065C.1
aagaattccacgnaaagatcaatcaaaaagccaaagcgaagttgtangaaggagagagagatccaaaaagctcgccactaacctctagctgctccccgcttttggtttcggattcgcgtcgggcgtgcgtgtgctgaggaatcgagtcgagctagggagggaggaaggtggctggcgcgcgtcggcgncgtcggcgatggacggcgacgngagngcgaggagcgncgatgncgtggggtcgngccctggtgcta

SEQ ID NO: 25151 - DNA, 801 bp, Oryza sativa
  Clone ID: PAT_MRT4530_30066C.1
atgagacagcacgacaacgccctaaggagggttagtgatgcacgaatgccatcgttgccgacccggcctaaggttgggctgggttttcatccgtcgtcgcccgcctacctatccacagctgaaccttcaccgctgcgtgggcacgattgcgctggcgccccgccgtcagctagcctccacgagctgtcaccgaccgcacctcctcgtaccacacgcctcttcggcctcagcttccgtcagcctctcctcccgctgcactggccacaaccaccgtcgaccgcgcctcctcgcgcctcgccggtctctgccgccgccgaccggccggccactgctcccgcacctccggccggccactcactgccgctgtcatcgccgcaagcttcagcctcctctgccactggccactgccgtcacgccgccgcgagcctccgctttaccgcgatgtcgttgctgccacgagctcgggtcgtgccgcaccggcaagcacctcatcggcctctcccttcaccggccttgcctcttgctgccactagctcagatctgccaccagacgggttgggggaggggatccgccccgccggccactccggccgccgtctcctgctgaatgtgtgccgctccgcctcccacgccgaggagaagctccgctaccattttcctcacttttgcctgcctagctgggcgcggtttccgacagctggctccggcggcgtcgaggttgctagaggcgttgaggagggtggcggagtgggcgacttagggtttcgcctccgagccgcccttaccttccgttataactag

SEQ ID NO: 25152 - DNA, 595 bp, Oryza sativa
  Clone ID: PAT_MRT4530_30067C.1
cctctcctcctgctgcactggccactaccgccgtcgaccgcgcctcctcgcgcctcgccggtctctgccgccgccgaccggccggccactgctcccgcacctccggccggccacccactgccgctgtcatcgccgcaagcttcagcctcctctgccactggccactgccgtcacgccgccgcgagcctccgctttaccgcgatgtcgttgctgccatgagctcgggtcgtgccgcactggcaagcacctcatcggcctctcccttcaccggccttgcctcttgctgccactagctcaggtcggtgccgccgcgagctcgtcctctcacgatccggccgtggggtgggtagggggtgggggctggggggcagatctgccaccagacgggttgggggaggggatccgccccgccggccactccggccgccgtctcctgctgaatgtgtgccgctccgcctcccacgccgaggagaagctccgctaccattttcctcacttttgcctgcctagctggtcgcgcggtttccgacagctggctccggcggcgtcgaggttgctagaggcgttgaggagggtggcggagtgggcgacttag

SEQ ID NO: 25153 - DNA, 672 bp, Oryza sativa
  Clone ID: PAT_MRT4530_30068C.1
atggctgaattcaaacaggccggtctctctctccctccctctctcccgtcagccgtgtgctttgaccgagacaatatgcagtatgaagacctggctggtcaaaacttccgatgcacatcaggaccccttacaatatctagtgtatttatggcctcagttacttatattgatgactccggttctgaggtaattgatcctccaaagactgaggtgctggatgttaccgaacttgctggtgatcctgttccgcattcaccaaaaccaaatgtgtgctctaatggtcatacattgtgctctggatgcaaaccaagggttcacaatcgctgtccaacttgtaggcatgaactgggtaatattagatgtcttgctctcgagaaggtggctgcgtcgcttgaacttccatgcaagtaccagaacttcgggtgtgtaggcatttatccttactactgcaagctgaagcatgagtcacagtgccaatataggccttatagctgtccatatgctggatctgaatgcacagttgctggtgacattccatacttggtgaatcacttgaaagatgaccacaaggttgacatgcataatggctgcaccttcaaccatcgctatgtcaagtcgaatcctcatgaagttgagaatgccacctggatgcttacggtatcccctcgttaa

SEQ ID NO: 25154 - DNA, 297 bp, Oryza sativa
  Clone ID: PAT_MRT4530_30069C.1
atggcgacagcgtcggcgcaggcagtggccgttgttcgaatcctcatcctcagggtgtccatctacgacggaggtgggacgccggaggtgaccgaggcaagctacaccatcctggtgctgcttcctccccacgacgccgccgacggatggagcagccacaacctggagatcgtccaggctgttgcccgggcgccacgtgtgcaaattcaagtcaaaaccgctgaaaacagtgttgaggggggtaattcgtccggtattaaaagttcacatctgatattaaaagttcagggtgagtaa

SEQ ID NO: 25155 - DNA, 358 bp, Oryza sativa
  Clone ID: PAT_MRT4530_3006C.1
ttttcgcgtgggcggaggagggagcggtggggttgtcgatcgaggccaagatggtacatgggcctgtgggcctactgcatgtacatcctgccaaagtactgcgacaacaacgagggggtaaagggggtctgcaacgaggacggctggaccgtcgagcccagcgggaccacataccgcatgggatggaagcctcctcaagcagagggtcctgagccaattggaagatcggattcgacaagctcttgctcttcatattaaccaagtacgcggactatatacatccaaggtcctgcatcgatcttctttccaagctctggatactgctcgtagatcagtattggtggaaacaggttgattg

SEQ ID NO: 25156 - DNA, 489 bp, Oryza sativa
  unsure (1)..(489): unsure at all n locations
  Clone ID: PAT_MRT4530_30070C.1
ctcccncggtccccggttatataccccccnnanatntcgnttgcncaaaanaaaactttcggcccaanancgggtttgttcaaattttncncgnaggccgaggtggttaaaatggccnncncccccnaagttggcttggngggcttcttnttttcaaaaaacatcccccgggngtaccgngnggccnaagctntcnaggtgggcatggngggggtcaacncgggtntcatcaacgacgtggcgagcccctttggnggngtcaaaaaaantgggttcgncanggagggtancatntntngaattcncnagnnccaggtccccaanaccataacctttgggggcatgggtaannanctncangggtnatntggatataaaaaacaaaaggttnatttntnatgtanacatagcatancaannnatgngtttttttttttttnaaaaaaaaaaaaaaaaaaaaaaaaaaaaaaaaaaaaaaaaaaaaaaaaa

SEQ ID NO: 25157 - DNA, 692 bp, Oryza sativa
  Clone ID: PAT_MRT4530_30071C.1
ctgcaggaatcgcacgaggatttctttcctcacccccaacccaagcccccagccgccactctccaatctccaccggcggccgcactatctccctccggcggactgacagcagcggcgtcggtgcgcgggtggctatctgtgccgaagtcgacagtcaggcgcgtccgggggcgaggggcgacgcttcctcagtggctgccagaggcggcacgacgcccaatccccaaccaccccacaaccgccgctgaccgccttgtcaccgagccccctcatcgccgccgaccacctcgtcaccgagccccatcgtcacggcgcattgccaagccccctcgtcgccggccgcctcgtcccttcgtcacctcgtcgtcagccgtcttgtcgccatccacctcgtcatcattcgccaagtctcgcgccccctcgtggacatccgtcgttgcagccatcgcgtcgccggagctagtcaccctacggtctccattgatccgtcggcggccacccagtcgttgccgctcctagccgacgcgatcacaacgatgttgcagcagtcggcagccgtccagccatcgccgcccccagtcgccgtgcctcgtcatcgcccgacgcgcagacggagctcgcctgtcctcgccacatccagccgggtgctgcgggccccgtttacccacgggtcccctgcggaggcgggggcg

SEQ ID NO: 25158 - DNA, 314 bp, Oryza sativa
  Clone ID: PAT_MRT4530_30072C.1
tcttttactatcctaccctcctcgacgcggggctagggttacagacccctactcctcctactcataaatctaacagagtgggaacaaggaccgaagcgatatcgacaaataacaagaagctaaatctatacaacacaaaaaaacataaaaacaaaaaaaaataaataataatatatataaaactaaaaaataaaacaaacaaatattaatacatcaactcaaaaaattaatcatcaataaaaaaaaatcattaataacaaaagaacataaaaaaaaaaaaataaaaaattaaataataaataaaaaatacacaa

SEQ ID NO: 25159 - DNA, 734 bp, Oryza sativa
  Clone ID: PAT_MRT4530_30073C.1
cagcgagctagcaaactctccattgcaaacttgtgagcatgcaagcatcttccatggaggcaagcaattgctccattgcacttgaaatcagccatgttgcaaccccaggtttacctgtcctgctgcttggatcttcactggctctgcttgctgtgtttctggtatacttctatgcacctttctggagcttgaggacagttccagggcctccaaccaggttccccataggccaccttcatcttctcgccaagaacgggccggacgtctttcgcgccatcacgaaggagtacggtccgatcttcaggtttcacatggggaggcagccactggtgattgtggccaatgctgagctctgcaaggaggtcggcatcaagaagttcaaggacatccgcaaccgcagcaccccgcctcccaacgtcggcacgcttcaccaggatgccctcttcctcaccagggactcgacgtggtcgtcgatgaggaacatggtgatcccgctgtaccagccggcgaggctcgccggactcatcccgacgatgcagtcgtacgtggacgctctggtggacaacatcgccgggtgcccggaccaggactgcatccccttctgccagctctcgctgtgcatggccatcgacatcatcggcaagacggcgttcggcatcgagttcggcctgtccaggaaggcggccgacaccgccgccggcgacgacggagacggcgacgacgacgacgacgtg

SEQ ID NO: 25160 - DNA, 171 bp, Oryza sativa
  Clone ID: PAT_MRT4530_30074C.1
tttttttttttttttttttacaaaaacctattttctgattttgggggattcatataacatggtaacaaatcgtacttaaagacccaaaatattttgtaataaaacctatacatgattgcaactggacaacgttgtcaaaaaaaacatacttacccactttttttctgtcac

SEQ ID NO: 25161 - DNA, 1815 bp, Oryza sativa
  Clone ID: PAT_MRT4530_30075C.1
atggccggcggcggcgacctccagagcccgaagaagcggaagcgtgatgcggcggggaagcccaagacgctggcgaaggggggagacgacgggaagaagcggaagaggccctcagatgccaacatggcgcaaggcggcggcggcggcgaggtcaaggtgaagaaggagccggttactgccaaggagaagcgcctggctgctaaggaaatggcagagtcaaggaagaagaagaggaaacggaattacagcctcgagaaggagcttactgtactatgggaaaagatgcgatgccacaatgtgagcagcacggagagatctaagctggtaagtgaggctctccgtaaaatggatgggaaatattcagaaattgctggttcccacgtaactgcacgtgttttacaaacatgcgtgaagttgtgctcacaatcagaaagggatgcgatttttgaagccctacagccagatttgctaactctctctctcaagaaatatgctgttttccttgtaaagaagctcattaagcgagccactaaaaagcagtttgaatggttcatctcttctcttcacggtcgtgttgctaaacttcttcgtcatactataggagcttcagagacaatttccaaccttggattacaaaaatcatctgtactgcagcatatgactaccgtgatttatccgatcttggagaaaggtatcgttgaatatcctatagtgcacacggctgtattggagtattttacaatcgctgacaagacctcggccactgatgtgattcgacaatttatcccccttcttacacaaggatcatctgccattgatggagatgagccatcggttgcccctgaattacaaaagaaactgaaagctaagaaaaaaaggttgacagagccacttcttgttcggattatgaacaccagagaaggattaaaaataggagttagttgcctcaagcatggaagtgcaaaggataggaagaagatcattaaaagtttgaaggggcacattatgaagcttgctcttagtgattatggatgcattttacttgttgccattctttccgttgttgatgacacaaagcttgttaccaagatcgtaattcaagagctcgccaaacatttgaagcaacttatttttgacaaggatgaagcttccgagagtgctgcagaagatatcccagagaataaggtggatgttgcaactaataaggagcaagatggttcagaaagcatgcagagtgcgtctgacagcaaaaaggacccatttcaacggcgacatgaattgttgatcaaaagtgaacttgccgaggtgctcatccagactctcattgagaatgtcggggagttacttcgaacaaattttggcaaagatatggtgaaacctgctttttattatatgctaacaatttttcatgtcataacctcattggcatggcatgatctttggctggttgcggttggtggagaagataatattctggagggcatcactgacaggatccacagcttgcacaatgcaatagcttctgatgcagcacgtccaaaggcagaagatactgaacatgcctttgataactatcattccagccgtctaatcagaagacttatacttgaatctccagcatttgctgccatcctatggaaaaaagctcttgaaggcaaatgcaagacatgggctgatgggcacagttccaaggtggtcgcagcattccttgaatcgcccgattccaaggtaagggatcttgcaaaagctgagctgcagccgctggttgatcgtggcattctgaaaatctcagaccataaagcagtcgaaaaatga

SEQ ID NO: 25162 - DNA, 1317 bp, Oryza sativa
  Clone ID: PAT_MRT4530_30076C.1
atggctcgccttcctcttcgctcgcgtgctgcgcaccttcgtcgacgcctgcaaccgcgagtagtccctgccgagcaaccggtctttccgccacctcgcgaatcggatagtcaccggcggcggacagatgatgggaagggaatggcggaggaagatggagtggagagaggggaggaggagttggccaccgacgaggtccactctggtggcggcggagaagagggtctttcactagagacacaacacactaggtactcgatacttaggtggtaccaggtaccggataccccatatatcataatatctagtactgggtatggtacctttaggtatcaggctggtctaggtaccagatatcaggctggtctaggtaccaggtatctgataccccaggtactcgatgccctataccagatctggtacctatgggattcatgccgatctaggtaccaggtacccaatgcccagtaccaaatatggcacctatgggattcatgccgatctaggtaccaggtaccttgctaccccaggtatcaggctggtttaggtaccaggtatatgataccccaggtacccgatgcccagtaccagatctggtacctatgggattcatgccgatctaggtaccaggccctcatgccgatgggagctatgagaaaaagggaaaagagacgaggcaagcacaaaaataagatggctatcttccttggaggtggaagaacactattccttcttgttgccatccttgattcggatcgccgctgctacatcctcgacacgcatgtgaccatgatggttatggacatcgcctgtgacaagctccacctcgacggcggtgaacaccacgaacagctccgggccatcacggtgttcgtcgtcggtctccaagaacctggcgatgcaggaacctgccgacgagcgtgtaatcccgaggaagaaggctgcgaccacaccggcggcttgccggcgtcaagccagaggttcagcatcaaggggcgcgtttacccggcgattcttcccgtcgacggcaaggaggtctcagggaaggttttcaagggcatcactgacagggagctcaatgtgctggatatatttgaagatgaggagtatgtcaagagaaccgttgagatatcactaactgacacatcggagaaattgcttgcttatgcatacatttggggcaatcaggatgatcctgacctctatggtgaatgggactttgaggaatggaaaagggtgcacttggaggattatgtcaagatgacacaagagttcatggaggaactggaacagctcgaaccaaagaccgagacctga

SEQ ID NO: 25163 - DNA, 1938 bp, Oryza sativa
  Clone ID: PAT_MRT4530_30077C.1
atggccggcggcggcgacctccagagcccgaagaagcggaagcgtgatgcggcggggaagcccaagacgctggcgaaggggggagacgacgggaagaagcggaagaggccctcagatgccaacatggcgcaaggcggcggcggcggcgaggtcaaggtgaagaaggagccggttactgccaaggagaagcgcctggctgctaaggaaatggcagagtcaaggaagaagaagaggaaacggaattacagcctcgagaaggagcttactgtactatgggaaaagatgcgatgccacaatgtgagcagcacggagagatctaagctggtaagtgaggctctccgtaaaatggatgggaaatattcagaaattgctggttcccacgtaactgcacgtgttttacaaacatgcgtgaagttgtgctcacaatcagaaagggatgcgatttttgaagccctacagccagatttgctaactctctctctcaagaaatatgctgttttccttgtaaagaagctcattaagcgagccactaaaaagcagtttgaatggttcatctcttctcttcacggtcgtgttgctaaacttcttcgtcatactataggagcttcagtcgttgactttgcatatcaactggcaacaccgcctcagaaaagaaggttgctattggaattgtattctactgagctccagctgttcactgacctgactggacagaaaacccacagtttgttagagacaatttccaaccttggattacaaaaatcatctgtactgcagcatatgactaccgtgatttatccgatcttggagaaaggtatcgttgaatatcctatagtgcacacggctgtattggagtattttacaatcgctgacaagacctcggccactgatgtgattcgacaatttatcccccttcttacacaaggatcatctgccattgatggagatgagccatcggttgcccctgaattacaaaagaaactgaaagctaagaaaaaaaggttgacagagccacttcttgttcggattatgaacaccagagaaggattaaaaataggagttagttgcctcaagcatggaagtgcaaaggataggaagaagatcattaaaagtttgaaggggcacattatgaagcttgctcttagtgattatggatgcattttacttgttgccattctttccgttgttgatgacacaaagcttgttaccaagatcgtaattcaagagctcgccaaacatttgaagcaacttatttttgacaaggatgaagcttccgagagtgctgcagaagatatcccagagaataaggtggatgttgcaactaataaggagcaagatggttcagaaagcatgcagagtgcgtctgacagcaaaaaggacccatttcaacggcgacatgaattgttgatcaaaagtgaacttgccgaggtgctcatccagactctcattgagaatgtcggggagttacttcgaacaaattttggcaaagatatggtgaaacctgctttttattatatgctaacaatttttcatgtcataacctcattggcatggcatgatctttggctggttgcggttggtggagaagataatattctggagggcatcactgacaggatccacagcttgcacaatgcaatagcttctgatgcagcacgtccaaaggcagaagatactgaacatgcctttgataactatcattccagccgtctaatcagaagacttatacttgaatctccagcatttgctgccatcctatggaaaaaagctcttgaaggcaaatgcaagacatgggctgatgggcacagttccaaggtggtcgcagcattccttgaatcgcccgattccaaggtaagggatcttgcaaaagctgagctgcagccgctggttgatcgtggcattctgaaaatctcagaccataaagcagtcgaaaaatga

SEQ ID NO: 25164 - DNA, 2219 bp, Oryza sativa
  Clone ID: PAT_MRT4530_30078C.1
ccacgcgtccgcctactccgatcgagaccgcgtcgccgtctccgagatcgccatggccggcggcggcgacctccagagcccgaagaagcggaagcgtgatgcggcggggaagcccaagacgctggcgaaggggggagacgacgggaagaagcggaagaggccctcagatgccaacatggcgcaaggcggcggcggcggcgaggtcaaggtgaagaaggagccggttactgccaaggagaagcgcctggctgctaaggaaatggcagagtcaaggaagaagaagaggaaacggaattacagcctcgagaaggagcttactgtactatgggaaaagatgcgatgccacaatgtgagcagcacggagagatctaagctggtaagtgaggctctccgtaaaatggatgggaaatattcagaaattgctggttcccacgtaactgcacgtgttttacaaacatgcgtgaagttgtgctcacaatcagaaagggatgcgatttttgaagccctacagccagatttgctaactctctctctcaagaaatatgctgttttccttgtaaagaagctcattaagcgagccactaaaaagcagtttgaatggttcatctcttctcttcacggtcgtgttgctaaacttcttcgtcatactataggagcttcagtcgttgactttgcatatcaactggcaacaccgcctcagaaaagaaggttgctattggaattgtattctactgagctccagctgttcactgacctgactggacagaaaacccacagtttgttagagacaatttccaaccttggattacaaaaatcatctgtactgcagcatatgactaccgtgatttatccgatcttggagaaaggtatcgttgaatatcctatagtgcacacggctgtattggagtattttacaatcgctgacaagacctcggccactgatgtgattcgacaatttatcccccttcttacacaaggatcatctgccattgatggagatgagccatcggttgcccctgaattacaaaagaaactgaaagctaagaaaaaaaggttgacagagccacttcttgttcggattatgaacaccagagaaggattaaaaataggagttagttgcctcaagcatggaagtgcaaaggataggaagaagatcattaaaagtttgaaggggcacattatgaagcttgctcttagtgattatggatgcattttacttgttgccattctttccgttgttgatgacacaaagcttgttaccaagatcgtaattcaagagctcgccaaacatttgaagcaacttatttttgacaaggatgaagcttccgagagtgctgcagaagatatcccagagaataaggtggatgttgcaactaataaggagcaagatggttcagaaagcatgcagagtgcgtctgacagcaaaaaggacccatttcaacggcgacatgaattgttgatcaaaagtgaacttgccgaggtgctcatccagactctcattgagaatgtcggggagttacttcgaacaaattttggcaaagatgtattgcatgaggttgcggttggtggagaagataatattctggagggcatcactgacaggatccacagcttgcacaatgcaatagcttctgatgcagcacgtccaaaggcagaagatactgaacatgcctttgataactatcattccagccgtctaatcagaagacttatacttgaatctccagcatttgctgccatcctatggaaaaaagctcttgaaggcaaatgcaagacatgggctgatgggcacagttccaaggtggtcgcagcattccttgaatcgcccgattccaaggtaagggatcttgcaaaagctgagctgcagccgctggttgatcgtggcattctgaaaatctcagaccataaagcagtcgaaaaatgagttttgcacctgacttccaagcatctacagcaatacgagaaatcgacagacgaacatccgtgcttctgtgttggatgttttttttgtaacatgagtatgttctgcggagcaattttgtcacctgttaaaagagtgtagctactgctgtcaccagtgagtgagtattaactctccgtaatgttatgtacctttacagtaaaattgcatttattttggtatgactgccaagatacgaattcaaaaaaaaaaaaaaaaaaaaaagggggggcctgcagcccgggggatccactagttc

SEQ ID NO: 25165 - DNA, 278 bp, Oryza sativa
  unsure (1)..(278): unsure at all n locations
  Clone ID: PAT_MRT4530_30079C.1
tcgacccatgcgtccgcgancactttttcactgnctcgttcacgtaggtgagctgctcaacacaatggcgtcgcagcagcagcagaagcagccgaggaaggcgaagcagaaggaaggggaagggcactcggcggaggaggcggcggtgctggaggagatcggcaggtatcgcgcccaggctcatcataactcgagggaggccatccncnacnccttagagcggtactccaaggctaacctggagcacggcggcgcgacgctggcgcccggcgccaccg

SEQ ID NO: 25166 - DNA, 2055 bp, Oryza sativa
  Clone ID: PAT_MRT4530_3007C.1
atgtgtatggattatcgtgcactaaatgatgtgactatcaagaataaatacccactgcctagaattgatgatttgtttgttcagcttaaaggagccaccgttttctccaagatcgatcttcgatcagggcagttgaggattaaagaggaagatatacctaagacggattttaccactcaagatgggttgtttgaatgtactgttatgtcttttggacttaccaatgcccccgctttcttcatgaacttgatgaataaggtgtttatggaatacctggacaagttcgtggtggtttttattgatgacattcttatctactcccgaaccaaagaagagcatgaagaacaccttcgccttgcactagagaagctacgagaacatcaactgtatgccaagtttagcaaatgtgaattttggttgtctgaaaaagatgtgaagtacaagtggtcagaagaatgtgagcagagttttcaagagttgaaaagtcgcttaatatcaacacccattttgattttgcctgatccaaagaagggtttccatgtgtactacgacgcatctaagcttgggttaggttgtgttctgatgcaagatgggaaggtggttgcgtatgcatctcgtcagttacatccgcatgagaagaactaccctagtcatgaccttgagttagccgcagtggttcatgcgttgaagatttggcgtcactacctctttggtactcgtacggaggtgtacacgaatcacaagggtttaaagtatatctttactcagccggatctgaacatgagacagcggagatggttggaactgattaaggattatgacatgggaattcattatcacccgggaaaggctaatgttgtagcagatgctctcagcaggaaaggctattgcaatgctacggaaggacggcggttgccgtgggaattatgcaaggaatttgaaagattgaatttgggaattgtcagtagaggttttgttgcagctttagaagcgaagcccactctcattgaccaggttagagaagctcaaatcaatgatcctgatattcaagagattaagaagaacatgagaaggggaaaggctatcgggtatttggaagatgagcaaggaaccgtatggttgggtgagagaatttgtgtcccagagaacaaggagttgaaaaatgcaatcttgaaggaagctcatgacactttatactccattcaccctggtagtaccaagatgtaccaagatctcaaggagaaattttggtgggcaagtataaagcgtgagatagcagaaacgtcatcaggccatgactctatttgggtgatagtcgacaaacttaccaaagtggctcatttcatccctgtgaggacaacatattccggaagtcgtttggcggaattgtatatggcaagaattgtgtgtttgcacggagtgcctaagaaaatagtatccgatcgaggtagccagtttacttcaaagttttggaagaagcttcaggaagagatgggttccaagctgaacttcagtaccgcttatcatccgcagacagacggacaaattgaaagggtaaatcagattttggaagacatgttgagagcttgtgctttagacttcggtggaagttgggataagaatctgccttacgcggaattctcatacaacaacagttatcaagctagtcttcaaatggctccttatgaagcactgtatggtcggaagtgccgcactccgctgttgtgggatcaaacgcgagaacgtcaggttttcgggactgatattctgagggaagtagaagagaagttgaaaaagtgtttaagggtacacactgaagaagctaatcttgagcagattgaaatccaagaggatttgacatatgttgagaaaccaatccgtatcctggagacagatgagagaagaaccaggaatcgagttatccgtttctgtaaggtccaatggagtaatcactcggaagaagaagctacctgggaacgagaagaagaattaaagtcagctcattcgcatcttttcgccagctcttccgaatctcgaggacgagattctgtttaa

SEQ ID NO: 25167 - DNA, 678 bp, Oryza sativa
  Clone ID: PAT_MRT4530_30080C.1
atggctgttgagatcaaattagctttggtagtaactatgatctctttctgtaaacaacaagagactaacacggccaaacctgacacatttctctgtattgttgtcccttctttgcagttagactgcgagggcggccatggcggcgtgctccggccagcgcggcggagctcggtggcaccggcggacgggtggagggacccatgcggcgatgagcaacagatccggcagcatccagcggtgcggccgaagacgccggcggcgccaagcggcgtggtggaagacggctgcgtcaacgacaccgtcgtcgacggtggaggcacagcaccgaagctgcgcggccgcggaccctgccaacgccattggcgcgcgaggtggggggcgagcttctggagctccgcccagaagacggcggcagcaccgagcggcggatctcgggaggcttcccgagccccacgcagcgacggcgagctccacctagaagatggcggcggcgccgagcggcggatctcgggtggcttccccgagcccaaggcagcgacgggctgatccccgagcgcctctacttcggcgagcattcgacgagcaccacgcagcggcggcccctactttgcgtgcctcctttcttttgctttctcgtttctcgtggaggtgcccctttttttggacaaaagttgttga

SEQ ID NO: 25168 - DNA, 1259 bp, Oryza sativa
  unsure (1)..(1259): unsure at all n locations
  Clone ID: PAT_MRT4530_30081C.1
ttttgccgttgagttttttttttgcataaatcggtgcaacttttaactcacaaaaggaagacatgtgattttcttttacataaaattcagacaatattattatgccaaaactcgaactctatctaccactgcatacaactccagggcgcgcgtgcaaacaacacatgctactagcattcattcgtactattcactataaacaggacctcccatctgaaccacccccaaccttggttccgcattcgataccgatttacacgttgctgcaggacgcttccatcataccattccggatttgctcgctgatatccctgacatggcctgggccatgaggtatgaacaccgtggtgttcttcgagccatccccaagttctttgatggtgtcgaagtactgcgtgaccatgatgagatccatgacttcttttgctgaggtgcctgaaaccgagtgcgagaagttcaggatgttctctctcaggccatcagttatcgcctgccgctgtctagcaatgccgacaccggaaaggtgttttgcctctgcctctgcttctgctttcttcaccagaagaatcttctccgcctctcctttgtagacacttgcaagctgaagcctttgtgctgcatttatttcattcattgctctgcgtacagcagcatcagggatgatgtcaaccatgagaatgtgctcaatgctgtaaccataatctcccatcaccttttctagctcctgaagtacagctttcgccacatcattcttttgctcaaaaagatcatcaagattcattctcggaactatagctcggaccacatcaaagacgtaggcctgaatttgctgttggggattctgcaactcatagaatgcatcatcagcatgttccttaacaacccgatattggattgtgcagataagctgaacaaagacattatccttggtcttggtctcgacgcggacgtcgagcgactggacgcgggtggagagcgtcccggcgacgaactcgccggcgaacgggttgaagaagtggaggcccggctcggcgaggcggaggaagcggccccacttctccaccaccgcgacgctcgcctggtccacgcacccgcacagcaggaagaaggcgctcaccatggctctcacctcaacctcaacctctcctcgtcggcctcgatcgcggcggcggatttggattttggacgcgacgggtggggaattcggcggcggatttggacgcccctcttanttcgtgttctttttgtcccttttgnan

SEQ ID NO: 25169 - DNA, 359 bp, Oryza sativa
  Clone ID: PAT_MRT4530_30082C.1
ggggaggggggcccttccaaatttaaaaccggcccgttggttccacccggaaattcggaacgggtccttgaagggttacaaattttccttttagggggtcttttaaaagtttggggaaaaaatggaaaaagttttttcctgggagaaattgttttccgttaaaatttccaaaaaaaataaaacccgaaaatttaaagggaaaaacttgggggccctaaggggggggctaacttaatttatttgggtgggcttaattgcccctttttaaagggaaaaacttttttgcccattttttttaaaaaattcaccaacccgggggaaaagggttttttttttttggcccccaggttgtttttttt

SEQ ID NO: 25170 - DNA, 514 bp, Oryza sativa
  Clone ID: PAT_MRT4530_30083C.1
tttgaggtctcgtttgttggaagagacaccttaggcttgcagaccgagatgaaggtctttctgccattatatgcctccggcgtagtcatgacattgtcgtgtgcctggggcgtagagaacgatccagagtacctgaaaaggatcgaggatatgcagtatgtctacaactttgcttcgattggtgatcagtggaagcaccgggggtgggtggatgaggaactacatagcgggtctgagagaagagtctgtggctctagcaacgctgagctatgacgaagctgcagctggtatgggtacaagagatgtcttcgcagagtcgcaggaggatttcatacctagtaggtgcacaattttgtaaggcatttgcgagttggaattttcaatacatcacaacaggcaggacatcaaatctgtggctctaaggctcgtatgctgcttgattgagttgttcagctcgaatgcacaaggctcaggattaatgacctgcaccggtccacaacaaaaaaaaaaaaaa

SEQ ID NO: 25171 - DNA, 414 bp, Oryza sativa
  unsure (1)..(414): unsure at all n locations
  Clone ID: PAT_MRT4530_30084C.1
ttcttggaaccggggcaaangtttaacttagaaaggcccgtccaagaaggtcgnttccggtactacccagcatnaagcccttaaggtgccgaagttcgggaacccgttcancaggttgaactctatcctncttgacatgcccctttaaataaaggccgttagaggtgatggtctccgtagatataagctgtcacaggtgatctacctgtgacggccccaaaagtaaaggcccatcacaggtagcnctcaccnctngacgggcctttatttgctaatccgtcacaggtgaggttacctttgacggatttttgtttcgacccgtcactgatgagttaattccagaaaaaaaaatgctaaatattggttagcctcaggatttgctagccatgccctctgaaaaaaaaaaaaaaaaaa

SEQ ID NO: 25172 - DNA, 328 bp, Oryza sativa
  Clone ID: PAT_MRT4530_30085C.1
aaaatcccccaaaccaaaccccccccccccccccgctcggtggaatcggttgctcgaaccctagcccctccaatggacgaccaccaaacccaggatctcgtcaaggagctcgtccaccgcctgatctccgccgaatccggcggcggagggagggatgcggggggcgcgctgaggttcgcgcaccggttgttctcgagccgcctcgcgccagccgtcctccccgacgagcacgcgctcgcggagtccgtcaagcgccgcctcgccgcgtggggccgccccgacgacgcgctcgccttggccgacctccacgccaagctctccgccaggt

SEQ ID NO: 25173 - DNA, 403 bp, Oryza sativa
  Clone ID: PAT_MRT4530_30086C.1
gcggagaagctcgtgctgccgctgctgccgccgtctaataggagcagctccgacttgctgccaggcgcgaacatggcgatcatgggcgccaccaccatggactcccgcttattacagtcgctcggcatcggcgacacgatctgcaacactggcgccctcaacacccagatccagagggtacagcagatcatgccctccatctgcggctcatcttgcacgacgtacctgaccatgccgctggtcgtgctctgcgaggtctggggcaacgactacaacgcgcatgtgatgagcgggtacacgccggagcaagccgcgacgcacatctactaccatcgcggaccgcatcagtaaaggggtggagcatctgatcagtctggtcgccatatacgtattcgcacccgga

SEQ ID NO: 25174 - DNA, 664 bp, Oryza sativa
  Clone ID: PAT_MRT4530_30087C.1
tcagaccctctccctctcggcggccatggacggcgaggcggtggggttctcgccttctcggcctcttccgccccggcgctggcaatggcggcatccggcgggcggcaacaagggcatggcggcgagggtgtcggttgcagccgctgggcccatctccttcgtcgtcctcctcctcgtcgaccaccccgccgccggctccaacatctctgccccaccacgcgccgtcccctcggcaacgcagtgcgccgtctgctcgcgtcggcgctgggctttttcgtccccgtcgtctccaggaggatggcctctcgccctctcgccggagaccggaggggacgatgtcgccgaccagggcccgtcctttgcctgtgcgccggtcatcctccgtgagctcacctcgacgacctccccgccgaccgcctctccaccaccggccagcctcttcttggccgccgccgcaggagggccctatgccgatctgctagttactggaggtgtgcccacgaagtgcgaatacggccatggccaacgctccacgctggagcgtggttttggcgaggaactggcgagaaactgcgttgggggagaggcgttgtcccgtgtcgtagccccgggaccttgcggccaactacctctgatgccaatggcgaagatggcgaggagctag

SEQ ID NO: 25175 - DNA, 1764 bp, Oryza sativa
  Clone ID: PAT_MRT4530_30088C.1
atggcgccgctcgccgcgctccgggggctccgcgccctcagcatcgccaacaacaacctcacggggccgttccccgacgtgtccatgctcccggcgctcaagatgctgtacatgtcgcggaacaagctcgacggcggcatcccgcccgccgcgttcgcgcacatgaggggcctccgcaagctcttcctctccgacaacgcgttcaccggcccgatcccgacctccatcacctcgcccaagctgctcgtcctgcagctctccaagaaccgcttcgacggccccctgccggacttcaaccagaaggagctgcgcctcgtcgacgtctccgacaacaacctctccggccccatcccgccgggcctccggcggttcgacgccaaatcgttccaaggaaacaaaaatctctgcggcccgccggtcggcgccccgtgccccgaagtgccaatcctcgcgtcaccttcgccatcgccgctgtcgtcgtcgtggtggtcgcctcgcagcttgaagatcctcatgatcatcgccctcgtggtggtcgtcgtcggcgcgctcctggcattcgccggcgcgttgacggcgatgctcgcccgacgccgcgaggccaccaccgaaacccagggcggcggcgtcggcggcgccgccgccaacgccgccgccgccaggatgaaggccacgcccaatccggccgtcaccgtcgcacacggcggcggcggcggtggcggcgagcagcagccgcacgtgacggtgtcggccgtgccggcgaagcgcggcgggcggcgggacgaccacgggcggctggtgttcatccaggaggggagggagaggttcgagctggaggacctgctccgggcgtcggcagaggtgctcggcagcggcagcttcggcgcgtcgtacaaggcgacgctggtggaaggccagtccatggtggtgaagcggttcaaggagatgaacggcgtcgggaggcaggacttcaacgagcacatgcggcggctcggccgcctcgtccaccccaacctcctccccgtcgtcgcctacctctacaagaaggacgagaagctgttcgtcaccgagtacatggtcaatggcagcttggctcacctcctccatggagggtcgagcatggcggcgctggactggccgcggcggctcaagatcatcaagggcgtgacgcgcgggctggcgcacctgtacgacgagctgccgatgctcaccgtgccgcacggacacctcaagtcgtcgaacgtcctcctcgacgctgcgttcgagcccatcctcagcgactacgccctcgttcccgtcatgacgccgcgccacgccgcgcaggtgatggtggcgtacaagtcgcccgagtgcggggagaccgggaggcccagcaagaagagcgacctgtggagcctggggatcctgatactggaggtgctcaccggcaagttcccggcgaactaccaccggcaggggcggacggggacggacctggcggggtgggtgcactcggtggtgcgggaggagtggaccggcgaggtgttcgaccaggagatgcgcggcgctcgcggcggcgagggcgagatggtgaagctgctcaaggtcggcctcggctgctgcgagagcgacgtggacaagcgatgggacctcagggatgccctcgcccgcatcgaggagctccgggaacgcgacgccggcgccggcgccgacgacagcagcgccgcctcgtccgtggccagcggcggcggcggcggcgaggcgtcgcgctcccactcctcgtag

SEQ ID NO: 25176 - DNA, 547 bp, Oryza sativa
  Clone ID: PAT_MRT4530_30089C.1
acccctagggggcctaaatttacttaaaaaaggggtttgcccatgtttacaaagttccaacttcaacaaaaagctgtcaaagggaaaggattttttcacaggggcaacttcccaaaaaaaaaaaaaactttttttttaaggacaactaaattttttttttaaaaggcttttttgtcccccttaagcacatgggacataaaacattttttttttgttataccgaagaatgaaatcatgggggttttccttaatcaaggaaacggaggcttttgccccccctggttttgagtaataaaatttgattggggggattggtttccccaagcccaatgaagggccaggtttgttaaagtttatgggggcactgtttcctgaactttgaacaactaattttaaggcttattgtttttttttaaaaaaaagcggggggtttttaattatttgcaggcgagagtttttttaaaaaaccaaagcctgttttttttgggccatttttcaaacccttttgagcaagccttttttattttagggcaaactttttcacgat

SEQ ID NO: 25177 - DNA, 3747 bp, Oryza sativa
  Clone ID: PAT_MRT4530_3008C.1
atgtcatccagcttcgtcgacaacagagtcaacaccaacctcaaccaaggagttcctgcttcaacaatgctggtgtggactcaagtcggcgaaatcgtcttcccggtttacaccacggtgccgatctcggctggtccatcaatgatcggaagcgagaacgcagtggcttcaacccaggacgactccatgtcgaaggatcctcccgccgaagcggagaacggaacgtcgacgatatccgagcccaagaaggatcctagtgcggccaaaccttgtcttttcgacaagaatcacggcccgacgaggataacttccgaggtgacaagctgcaaggtctttctcagcgccacgaagacgccgcctcctaaggtccagcagtcacgtatctctcttagagatgcagacaaggaacaaggagcgacactgatctcggatcgattcgttggggtaatcgacatcgatcctcacgagccgtcagttctacacttgctcgaagactatggctcatcgtcaacaagtacgccacgcgaggtattggctatcgacgggaccagcacgtcagcgcgcgctaatgcggaagcggaaaatcaagtgactacaccagcccagcacatcagggccgtcaacgcaatactgagggaaaccctctacgatcccattctgaacgacgatctcgcacggtggacagaacggctacgggaatcagtgaccaacctcagcaacgcgttcgaagaggccgccgctgcagcgcacccggaacagccaccaactggtggtgctaatggcgaaaaccctgaacagcgggaatcgcctcatcgagccacccctccacctcgcggcaccggcgatctccgcgatcacctgaatggccgccgagaggcgcgacgtgcacgacacaacaggaaccgttcccgacatcgcgtctcttcacgacgtcacaataacgaagaacgaggaggccgctcgagcgaagacgaagaccgcgataaccgccacaaccaccacgatcaaaacgatcgtgaacggcgggtgccgggccatgctagtcgaggacgccaccataatgacgacaacgatggagatcagcgccgggacaacaacggggggcgacgacaggattctcgagaacccggccgacgtcctcgtaatcgtacaccggaaccagatagacatccacggaggatgtacgatcgccgacaacccaccgccccctgcgctgggtgtagagctttcagtcgttcgctgcgcgatgtccgatggcctgagagattccgaccaggagcaatagagaagtacgatgggagtaccgacccagaagaattccttcaggtctactccatggtactctacgctgccggagcagacgacaacgcgttggtgaattatttgccaactgcattgaaaggctctacgcgttcatggctgatgcatctcccgccctactcgatttcttcgtgggcagacctgtggcagcagttcgtcgccaacttccaaggaacttacaagcgccacgcgatcgaagatgaccttcatgcgttgacacagaacccgggtgaatccttgagggattatgttcagcgctttaatgagtgtagaaatacaatccccgaaatcaccgacgcttctgcaatccgagctttcaagtccggtaacaacaagccgaagaccagaggagagaagaaaccagccaaggacgcacctgagtcaagcaagaagaacaatcgcaagaatgggaaaaggaaagctcaagcggaagttcttgcagcagaatacgcggaccctcccaagcgcccagacccacaaggtagcgacgcgaagaaagcatggtgccctatacacaagtcggacagacactctctggaagtttgcctcgtcttcaaaaagtcgctcgcaaaacacatggcatcggaaaaaggcaagcgagtacgtgtggtcgagaaggacactgaggcggctactcaggaatcggactcagcatacccagactccgatctccatgtctcgcacatcttcggaggttccacggcgtactcctcaaagcgagaatacaagaaagtggaacgtgaagtctgttcgacgtggcagggggctgcacccaagatgaagtgctcaatcaaacttctcttcgccagcactttggacgcgatggggatcccacgaagcgatggagatcccaccgatcaacccttcaatagaatcactccccagtcatcgtccaaaccattggacaaaattacgttgcctgtgactttcggccaagcaaataacttccgaacggagcagatcacctttgatgtcgctgaattcgatacagcatacaatgccatcattgggagaactgcactcgcgaagttcatggccacatctcactacgcgtatcaagtcctcaagatgccaggaccgaagggaacaatcactattcaagggaacgctaagctagcagtgcaatgcgacaagcggagcctcgacatggtcgagcacacgcccagcccacccgccacagctgagccacccaagaaagtgagcaaaccaaacaagacgccgaaaccggacggcgcaatcaagatcgttccactctccagtgccaaccccgacaagaccgtcaagatcggggcatcactaggcgagaataggaactcacgctcatcaccttcctccgcgacaatgctaacgtgttcgcttggcagccgtccgacatgccgggggtcccttgggagagaggtactccatccagagtggctagccaatctagtcatggtgtggaaggccaacgggaaatggagaatgtgcgtcgatttcaccgacctcaacaaggcgtgtcccaaggatcacttcccccttcctcgaatagaccaactggtggactcaacagccggttgtgagttgttgagctttctcgacgcttactccggctaccaccaaatcagcatggtgaaagaggatgaggagaagacagcattcatcacgccgttcggggtattctgctacgttaagatgccgttcggactgataaccgcaggaaacaccttccagcgcacggtccagggctcaattagcgaccaacttggaaacaatgtcgaggcctacgtcgatgacattgttgtcaagaccaagacaagcgactcattgattgacaatctgcgggaaacgttcgacagcctccgaagatatcgcctcatgctcaatccagagaagtgcacgttcggagtaccattgggcaagctgctcggtttcctcgtctctggcagaggaatagaagcaaatcccgagaagatcaaggcaatcaacaacatgaagtcgcccacaagactcaaggaagtacagaagctaaccggaagcatggcggcactaagcaggttcgtcgctaggatgggagagcgaggacaaccattcttcgctctgctgaagaagcaagacaaatttgtatggacacaggaagccgaagaggcattcattgcactcaagcgctacctagcaaatccccctgtacttgttgctccccaacctaatgaagaattatttctctatattgccgccacgccatattccgttagcactgtcattgttgtcgagagagagaaggtgcaatggccagtctactacgtcagcgaagctctctacgacgcaaagacacgatatccacagatccaaaaactgctctacgcggtaatcatgacatcacgaaagctacgccactacttccaagcccacagggtcacagttgtctcctccttccctctcggcgaagtc

SEQ ID NO: 25178 - DNA, 2226 bp, Oryza sativa
  Clone ID: PAT_MRT4530_30090C.1
atggcgccacctcccctgcacctcttctccccgtccccgcggccgccgtcgccgaccccgccgccgtggctccacggcccgcatgtcccctcgacgtccgtctccccgccggaccccgccaccgaggcccctccggctccgaagcagcaccgtgggcccagaccggcgccaagaaaccccggctccgccaagcccctcaccgccggcgtccccggcggccgcacccgccgcgcggtcctcggaatcatccgcaaggtccgctccctcgagctctccgacccgcgcacacccagccccaatggtggtggtggtagtagtagcagtagcaccgcgaccgcgcgcgtccccttccacctcccgatacatccgccgccgccggagcgggaggaggaggaggagaagaaggggattcgcagggcggtgccgtgggccgcggcgagggacgaggagaccaaggtggtgctgcggcgggagaagaagacgcgggtgccgacgcgcgcggagacggagctggaggccggcgagctggagcggctgcggcgggcggcgcgggggaaggagcggtgggcgcgggccaagaaggccgggatcaccgacgaggtggtggaggaggtgcgggggcagtgggcgaagggccaggagctcgccggcgtgaggatcgtggagccgctccggcgatgcatggaccgggcaagggagattcttgagattaaaacaggaggcttagttgtttggacaagagggggcatacattttgtgtacagaggaagcagttacctagaaaacgcaaagcggcatcgtgactttgttaattataatgaggaactttccccagtaacatctaacaatcctacatcccaagggaaatattggagtaaagatgaaactttaaccaatgataatgatgaagctgatgataaggacgacaaacctatcaagggaacactatatgaaagagaagtcaacagactactggacagtttgggccctcgatttatcgattggtggtggaacacaccattgcctgttgatgctgatctccttcctgaggttgtccctgacttcaagactccatttagacaatgccctcctggtgtgagaccagcactagcagatgaggagctgacctacctgcggaagcatgcacggcctttgccaacacattttgtcctaggtagaaatacaaaactgcagggtttggctgctgctatactaaagctttgggaaaagagccttatagcgaaggttgcagtgaaagtgggtatccaaaataccaatcatgaacagatggccagaaatcttaagcgtcttacaggaggaactgtcatattgaggaacaaggattatattattatatatagaggcaaagattttcttcccggtggcgttgctgaatcagttattgaacgggagtctcaggtacatgaccagcaggcgaaagaagaggaggctcgattaaagatggctgactcacttcaaatgattgttggactatcatcggagagaagttatgtgggaactttcagagagtatcaggatttccatgatagccatgcacgtagaacaactgaaaacaacttcagaattcaactagaggcaaagaagcatcgattggaaaaggaactgaaagaccaggaatggagactttccatgcttaccaagaagattgaaagatcaaaccaagtgctggcaaagcttcatagttcttggagcccttcaaagaaagatggagacagagaactcttgacagaggaggaaaggaggatattccgaaaaattggcctaaaaatggatgaacatgtgctgcttgggagacgtggtgtctttgaaggcgtaattgaagagattcatcaacactggaaacataaagaggttgtgaaagtaattaccaagcagaaccaagccagccagatcacgtacacatctatgatgcttgaggttgagacaggaggcacattaatagcaatagagaggttcactaccagccatgccataatactttaccgaggaaagaattatcgtcggccaacaaaatcagcacccagtaatctcctgacaaaaagagaagcattacaaagatcaattgaggttcagcgacgagggtcaatgaaatacttcgctcaggagaggaaaaagtccattgatgaattgaagagagaactgaggaatgtgacatgggaaatcaggaagctaaaccatgatactgaacagtcttggacagcatga

SEQ ID NO: 25179 - DNA, 655 bp, Oryza sativa
  Clone ID: PAT_MRT4530_30091C.1
ctcttcccccccccccccccccccccccctctctcttctctttttttttttttttttttttttttttttttttttttttttttttttttttttttttttttgaaaaacaaaaaatttccaattttttggtttggaaaaccggggggggcaggccccaaaaggggcccaggctttttggccctttaaagggggggcccccgcccaccaatcttttttttaacaaaacggggggttttttttcccccccccccccccggggaaaaaaaaaggcggggggattggccccaaccggggggggggtaaaaaagggccccaacaaaaccccttaacaaaggggaaaagcccccccgggggggaaaatttcttattttttcaagggaacaggccaacaacccccgggcgggggggcccaaagggggggggttttttccctacccccccccttttgcccccaaaaaatttgtttgaaaaggggggggtttaaactttacttttggcccagggggaccctttcaaaggggcccggcccccaggtgggcccttaaagaaccccaaacaaacacccttttaaaccaggtttttgggagaattctgcaaaaacgggggcccaaaagggggaacccccgggggacccctaaacgggccttggggggga

SEQ ID NO: 25180 - DNA, 428 bp, Oryza sativa
  Clone ID: PAT_MRT4530_30092C.1
caagaagcaaagaacccatccaaccactctaagttaagcctttaatttggggggtaaaaccttgccggtttgggcaaagcaaacccagtcaacaacacaaaaaaccacgggggaggggggggggccttacaggccccaccatgcaaagaaaattaacaggttgaaaacgggggaaaaggccaaaaaaaaaaaagaaaaaaaaccccaaaggcccacagggcaggggggcacactcaccccccatccacggttaaaactggcaaggaacaacggaacctattccaggagcaacggaaacagcacactttaatctaaccctgcaggctggaacagaaggggaccactgggggttcgaaatcccccaacagggaacgctgttcgtcgttagccggcggttaactctgaagctcggaaggccactgccaaaa

SEQ ID NO: 25181 - DNA, 394 bp, Oryza sativa
  Clone ID: PAT_MRT4530_30093C.1
gtaaccaagtccaaacatatagaacccgctgcgtcagtcttaatgatctttaaacaaagacacagctggcatattaaaacgataccagattcagtaaaacaacttgcgcaaccaggttacatatcacccaatcacatataatacacgactacaagctggacgacacattacagaacatgtctgactgtacaacatatcaccaccactggatacatactggccgatctacatgtcacgtatacaggatgagacgagacgccagctaactgtccaagggactcatacacactgacaccagcaggagatccagatgcactaatgtgcatgtgtaatacaaggatctgagagagcatcaaccgaccggtggagagaacgatcttgcctgtgcagaaca

SEQ ID NO: 25182 - DNA, 367 bp, Oryza sativa
  Clone ID: PAT_MRT4530_30094C.1
cggttgttttgcctgattatatgtaggtaacttgaggtcagccttggtcaatggtgaggaccaagactatgctcatggaggagcaaaggtctagtgtggtcgggatatcatgtgaaaaagtgactagtcaggattcttagagattaattttggtcaacggtagggatcgagactagacttagggaggagttgaggtctagacggtcaaggatgctgggtgacgaagttggatacgagatggcacacgttggatggacacactgtgtgaaagagatattcgcaacaggcttcacgaggtgtgcgtgcaagcgtcgatgttcacgaagaaaattggttaaagaaaattgagcaagaggatatggtgcta

SEQ ID NO: 25183 - DNA, 442 bp, Oryza sativa
  Clone ID: PAT_MRT4530_30095C.1
ccacagagtaaattttaattacttataatgatattcaattaatgcagagtaattaacaagataaaaaaggtaagaagagaattaatttgcatcgacaacttcttctacattactctctctctattctaatatacaataaagtacactagagcctcttgtaattcagctcatgcttcaagtgtgtgtgaatgagggagaggacaggggtatttatagtgtggaggtgagttgagagagtggagatactgtgaaatattcaacatagaatcctaagagcatcttcttaacttctccttttgccatgtgtcctcttgatgacggtttccaccagtattaacgctcctaaccgtcataggatgaggataactatcagttggtaaaatattgtgctggttgggctagctgctggttcagccgaaccctggctggcccatccagccta

SEQ ID NO: 25184 - DNA, 462 bp, Oryza sativa
  Clone ID: PAT_MRT4530_30096C.1
ggggggcaaaccccccttttttaaaaagcatcccgggggcccccaggaaacgggtttataaaaaatacatttcttccgggccccgggggcccttaaacccaaccccaggggaccctcccccccccaattctttgcaaaaaaagggttgggcccccccgaccccttgggggctcccccaaacggggtggtttccgacccccccggggggggggccccccgggggggggggcccccctttggatggtggacaccgggagggggcggccccccccccactggttgcccaaaaaaaacaacccccggtggggggggggaaccccccccttggcccggaacctggcccctccaatatcaagggggggggggccctcaccccccaaaggggggggcttccccaggaagggcttcacaaaaatctgcttccccccccggggacaaaccccccggggggggggacacccc

SEQ ID NO: 25185 - DNA, 2157 bp, Oryza sativa
  Clone ID: PAT_MRT4530_30097C.1
atggatttacttgggtttgctgttgtgctattactgagtttagcctcttccaccagctcctgcaaagatcatgagaagagcttcttcctccagttccttgccggcctctcggaggacggtggcctcgccgtgtcatggcagaatgacacggattgctgcacatgggaagggatcacctgcggcacagatgcaacgatcaccgaaatttcgctggtttctaagggccttgaagggcacatctcaccataccttggcaacctcaccggcctgatgcgcctcaacctgtcccacaatttgctctccggtgaacttccattggaggagttggtgtcgtcaaccagcctcgtcatccttgacatcagcttcaatcacttaagtggagctctgcaggagttctcagctcaaataagtgaaacaactatccggcctctgcaggtactcaacatctcgagcaacttatttacagcacaatttccaacaaacacatggaaggtgatgaacaatctggtggctctgaatgccagtaacaacagctttacgggacaggcaccaagttctttctgcatcagtgcaccatccatcactgagcttgacctctctttcaatcgatttggcggtagcgtaccccaggacataggcaattgctcgatgcttagagttctcaagggtggccacaacaacttccatggtgctctcccagatgaactattcaatgcttcatcgttggagtacctttctttcccagacaatgttctaaatggagtacttgatgatgccaatatcataaaactcagaaaattgtcaatcctagatctcgaaaggaatatgtttattggcaaaatacccaactcgataggtcagctcaagagattggaggaactccatttgggccacaacaatatgtatggagagctgccattaactttaggcaactgcacaaatctcaaaatcctcgacctcaagatcaactacctcagtggagaccttggcaagatcaacttttccagcctatctaatctaatgataattgatcttctcgtgaacaacttcaatggtacaattccagaaagcatttatgactgcacaaatttgattgcactgagactttcatggaacaaattccatggtgagttctcacagagaatggacagactgaggtctctttccttcctatcagttggtggtaatgcttttgctaatatcagaaatgcgcttcacatcttcaagagctttagaaacttaacggtgctatctattgaacagaacttcatgcatgagatcttgccagaggatgaaacaattgatggttttgaaagcctacaacatcttgaaatatatgggtcctcgttatctggaaaaatgcctgtctggctatcgaagctcaaaaatttggagaagttgtttttatatgacaatcgattaacaggaacggtacctgtatggatcaacaaactcaactttctcatctgtctagatatatcaaataatagctttacaggggaaatattgatgacattaatacagatgccaatgcttaaatcagagaagacagtggccaatattgatgcaagggtcttaatattaccgacatatatgtcctcaaaaaaggacttacctgcacttaaagattggaaatatgaatatcgcatcctccgagcagaagtaaatgtagctagaaatggctttacaagtgtgatccctccagagattggtcggctgaaggcactcgatatgcttgatttgagcttcaatagcttctctggagagatcccacaagcaatttgcaacctcaccaacctggagatgctagacttgtctagcaacaatctaatgggtgcaatccctttggaactgaacaagctgcacttcctttctgccttcaatgtttctaacaatgacctggaaggacctattccaactggaggccagtttgatacatttgacaactcaagcttcattggtaatccaaagctatgtggtggtatgctcagtcaccactgtaattcagcaaaagcagttcatgctcctgcctccactctttccacagatcaattcagtgacaaggttatctttggcgtcgcatttggcctgttctttgcacttggtgtgctgttagatcagatagtactatccaagctaagatttcttcaattctga

SEQ ID NO: 25186 - DNA, 390 bp, Oryza sativa
  Clone ID: PAT_MRT4530_30098C.1
ccccttaggggggtttttttttttttttttttggaagggcaatggcattaaacaaattcttcccttcaggaaagcgcaatacagggcctccttgcccttttgggcccagaattcctggcaaaagatgtttttttatgggaaccccgggtagcataaatctcttcaataaggttccccaataaaaatctcccccaattttatgtccccctggtgtataaacaacatgccggaaatggcctcccattgacagcgttggcctgcccccgactaaaagggccaagtgccggaccgaacccaccgaaagggttttaacccctttttttggggaagcccaggagggcaaaaaccgaggcaaagaagctgccctttatcagccctctaaggaacttt

SEQ ID NO: 25187 - DNA, 137 bp, Oryza sativa
  Clone ID: PAT_MRT4530_30099C.1
attaaacacggcaaggcaagaacagggagacttaagattaaaactggtgtctgactgatatttacaaagacataaagaaccagaccacactgttacccttggaacagtgaatgttttatcctcaaaagaaagtttgg

SEQ ID NO: 25188 - DNA, 720 bp, Oryza sativa
  Clone ID: PAT_MRT4530_3009C.1
atggcggccgacctcccgcgccggtttcctcccttccccggccaccctccctcgccccggctctatttaaaccctccccgtgcctccctcctccgtttccgccactcgccgctctttctccccgtcggaatcgagctcgcgccgtcgtcctctctctccgccgtcgccgccgagctccggtccgccgccgtcgtcgcctcggacctcctcccgcttcggcatcgcctgcttcggcatcgccgcgtcctcgccgatctcgtctaccccttcgtttcgcccgccgaccgccggaacgccgccgtcctcgtcgacccgagccgcgccgccgcctctctccgcttcggtcgccattcccgtcgtcgccgtcgacccggggtgagccgttggccgccgtttcgcttcccccttccctcccctctctcgggcgccactccgccgcgccggtggccgccggcggcgaccatcggggcgcgggcgcgctgcctcccgccggccgcgctggttcgccgccctcgggcgcgccgagtggctgccgcgtggggcccggccgtcagccgcccgcgccctcgggtgcggctgacgcgtgggacccccggcgccggccggtgtgagccgggtgcacccgacgcagcagcttcggaagatccgctcttcgtggaagttgaagccgacgtttgggaaagcgagcaaggcaagtcacatcatcctcgaacagattga

SEQ ID NO: 25189 - DNA, 978 bp, Oryza sativa
  Clone ID: PAT_MRT4530_300C.1
gcacgaggcggcgccatcgaaccctccaaaagcctcgtttaaagcccccacgaaacaccaccaccccggccgggcctccctcccgcctcggtcccattcccccccccccctcttatctctctccccaatctcctccacacagcaatggcgaagccgaggctgctcgccctcctcctcctcgccgccctcctcctcgccctctccttctcgcacggggaagcgaaggacgtgcagctggtgaagccggcgcgccgctacgggcggtggcgctcggccctccaggccggcgatgggatggtgtcgacggtggcggactactccgatcccaagcccaacaccaacccccgcggcggcgtgctccccccgaccgaccccaactcgccgccggcgcactgaccgccgccgaccaccgtcgatctacggtctccttccaccccggtcagccggcgacgtatctgcgtataaatacactatatatactgtactaccgtataaatacctagtagtagtaaatacggcgtataaattcggaatacatgtgcgtaattaagagtagtagaggaagaggaaggatcggaataagctgacggcgttcttctccttgggcatatacggtgcagtgaccgtatacatgtacgcgtacatacgtatacatgtacgcgtatacgtatgcgcggcgtacacactagccaattattgaagtagacctagctagacttgtgcttgactgtctgtcatgtgtgtgtgtgattattgcgtgtctgatgttgatcgtcgttgattgattattatgagattctgaacaatgttttgtttgattaatttggacgattaattgttactagaacgtatacacgtgcgtgtgtgtaatgttgatgtgtcctgcatttcgtccccgttgtatcacaccgatccatgttatttgcaataaaatcatcataataatgtgtcattgttggatgtaaaaaaaaaaaaaaa

SEQ ID NO: 25190 - DNA, 466 bp, Oryza sativa
  Clone ID: PAT_MRT4530_30100C.1
accaccccacgccacaaagacgacgaccagcatctttcaacttagctattctctaagaacgtattaaaattcagggcgactgtccgccagagccatgatctacaacacaaatatatacaaagtggactaatactatgttcaagataattagagttcaactaaatcaaataatatgctaaactcccactcaaaaagtacatctctctagtcatctgagtgggtcatgatccactaacactatcccaagtccgatcatcacgcgagtcgactatagtttcagtggtaagcatccctatgctaatcatatcaactatatgattcatgatcgaccttacagactcatgtgtgccgaggccatgtctgcacatgctaggctcgtcaagcttaacccgagtgccccgcgtgcgcaactgttttgcaccccttggatgtgaacggtgagtgtatcacacccgaacatcacgtg

SEQ ID NO: 25191 - DNA, 199 bp, Oryza sativa
  Clone ID: PAT_MRT4530_30101C.1
ttaggggtcgaggtttgttcctgctccaacattcgccgtggtcctcgacgtcgtcgacgatgtcaactgtgttagaggaagctttatcgtccactgcttcgccagcgacgcatgtgccgagcaggttgtggacggcgcaaggtgccacaacctgccattggggaataggacgatgggcgtgtacctttgcagtgattag

SEQ ID NO: 25192 - DNA, 496 bp, Oryza sativa
  Clone ID: PAT_MRT4530_30102C.1
ctaaggggggggcggctgcgccgacaggtgggccccgcttgtcagcggctcaagagagagagggggcgccggcacgtgggccccactggcagtggcacaaggcgggagggggtgcggctggcaggcgggtcccaccggccgcggctccaaagggggggtggcgcctggctcggctcggctccgagccgaccggccggccatggggcagcggcgcgcgtggagctggcggcggcacacggttatcggcggcggcgcgggagtcggaggcaacggctggaagcggcggcgtgggaggcggcggcgtcggccgaaggcgacggcgtgtgcgtggagagggtgcggcgcaaacgagagagaggggaccagggaggagaggggatcctcaccggcgagcacggcggccggcgcgaaggatgaaggcggcggcgatgacccaacgagcggaggggcagacgggcggcgattgcacctacggaggaaaatggagaggaattag

SEQ ID NO: 25193 - DNA, 231 bp, Oryza sativa
  Clone ID: PAT_MRT4530_30103C.1
atggtggggactgacaggtgggccgatgctgaccaggtgtacaacatcactcctagtaactccccatttcacaatgatggtatgatgatcgaaggggcaatgtccgaagtgccccccaaccgccatcagggagtgatctgggacgtccatgccaaaacctgggatcaacggtccggccgaagggcttcatggcgtgcctccaacaagcccctcacgggcaagggtgagtaa

SEQ ID NO: 25194 - DNA, 191 bp, Oryza sativa
  Clone ID: PAT_MRT4530_30104C.1
tgccgcgccaagacgccaggccgcgccacgacgccgtgacgccaagacgctgcgacgccatgacgccgccgtggcacgccaccgccgcgcaatgtcgccgccgcgccgcgcgccacgccgaagccacgccgcggctccgctgccgccacatgaatgaacgatcgatcgtgaacgaacgaaacgtgacttag

SEQ ID NO: 25195 - DNA, 398 bp, Oryza sativa
  Clone ID: PAT_MRT4530_30105C.1
cgacagcgggatctctggctagctgggaataatagaaaccctcaggcctactggcgtgaaggtgaggagtggtcacaacacatattgagcggctttagcactagagactgctgtacgaggcttccggcataagcaaccaagacagccggctgctccagtgccaaaatgacctaaaacgagaaattgtccgccttgaacgcgtgctcacgatgctgcaaccatatgcatcactgcaagagcaggagcaaggacaaatgcactcaagagagcattatcaagagtgacgatatcaccacagtcaatatgtgagtggctgctctaacgggatggatgagaccttttgcaccatgagggtgacgcaaaacatcgatgatgctaaccgtgctgatacatacaac

SEQ ID NO: 25196 - DNA, 201 bp, Oryza sativa
  Clone ID: PAT_MRT4530_30106C.1
atggagttgttgctgcagtgggtcgattgtggtgttgtggctagcgagtcggttgccctcgtcatcaccgccgagtggacgacgttcgagaaagggagtggtgacggacgagagacagtagatgagaaaggcgccgctggccgccaacggcggcggcggctgtggaggaaccgccgcaacgagctagacgtccgattctga

SEQ ID NO: 25197 - DNA, 355 bp, Oryza sativa
  Clone ID: PAT_MRT4530_30107C.1
ttttggtgatttaaatttattggggatgacagttgtaagacactggacacctcgatccatcattggctcaggagaaaaacagaagctcgacagacaactaaattaagacggagaggacgagaagaatgaaaaagccctgggcgatccccatgacaacaactacagcattgctagaccgagcccttcaactaatccccgggcagcggttcacgctagctcgcccgatgggcggagctgcatctccgaatacactgggaccggattaattcatagggcgcagcgcctaatgacaacggacacggaacgaaccagggtgttcgaccacgggctgacccggcagcgcgccaggtaggcg

SEQ ID NO: 25198 - DNA, 174 bp, Oryza sativa
  Clone ID: PAT_MRT4530_30108C.1
atgatttacggcctcgacgagttcgactgcgagcttttcattcccgatctagacaatgttgtgatgcacggcaatagtatcgagttacctacacacgtgctcaagatgctcgacgagaagcgcgaacatgagctcgctgctggaaaggatgatgccaaagcaacgcaagagtag

SEQ ID NO: 25199 - DNA, 2714 bp, Oryza sativa
  Clone ID: PAT_MRT4530_30109C.1
gctgagtggggccctctccgtagtgtgcgcgtaattaaggaacgatcttctggcatgtctcggggatttgcttttatcgacttccctactgtggaagctgcccgcagaatgatggaaggtgttggagacaatggccttctaattgatggtagaaaggtattttttcagtacagtagtaaaccaactagtgggatgagtgggccttctcatggagaagaaaattttacaaggtataactatgggcacaggactgctgctgcgccatgtgattggatatgtactatatgtggatgcatgaactttgctcgcagaacttcatgttttcagacactagcattttcaggtccaactcatgttttagttgttcgtggtctgactgaaaattttgactagaaagtgcttcgatatgaatttgccaagcatgcacctataaaggacattcgccttgttcgggataagtttactcatgtgtccagaggttttgctttcatccattttcattcagtggaagaagctacaaaagctcttgaagctacgaatgggattacacttgagaagaatggtcaggttttacgtgtaacttatgctaaaagcacacatggaccggtatcaggggcttcacagtcaaacagccttgctgcagctgccattgaggctgcatcattttctcagcagtatgatgctataggttgggccccaaaagagtacaatcctgatgacaaactgaatagcaactcggaacctcagagcagtggctctgctccacagtctggatttgtttgggatgaaaagtctggttattactatgattcagcctttcattcagtggaagaagctacaaaagctcttgaagctacgaatgggattacactggagaagaatggtcaggttttacgtgtaacttatgctaaaagcacacatggaccgggatcaggggcttcacagtcaaacagccttgctgcagctgccattgaggctgcatcattttctcagcagtatgatgctataggttgggccccaaaagagtacaatcctgatgacaaactgaatagcaactcggaacctcagagcagtggcgctgctccacagtctggatttgtttgggatgaaaagtctggttattactatgattcagcctcaggattctattatgatggaaataccggactttactatgatggtaatgctggagtgtggatattcatatgcatcaacaaactcgccagtatgtcccttgtgagtgaacagaacagcagtaaagcagctggggacatggcaaatactagcacgaagacctcagaaagtagtggtaaaaatgtagtgatttctgcacctgcagccacgattaaacaaagtgagaaaacttcattacctgaagctgttcaagctgctgcaagtgcagcgctggctgcaaaaaataaacaaaacagtaacagtttaggaactaccattatgggtgtcataagaggctctggtagaggaatagtcagatcagacactgcatttcatgcgccatctgatgctggtggtgctgattctttctcctacttaccaacatgaaaatgtgggttaaaagtatgttcttgggaacctacatctgctcccttaataaccgagttatgtactcaagcatcttataatctatcttgtggtacagggtatggtaaaggacggttttcctagctacaagtctcttggacgaacagctgcaccccacagaaatgatagattctgatataaagcctacaccctgtcagtaacagtttaggaactaccattatgggtgtcataagaggctctggtagaggaatagtcagatcagacactgcatttcatgcgcgatctgatgctggtggtgctgatgctttctccaacatacaaacatgcgcatgtgggttagcagcaagtgctggggctgctagcaatgtgggcttccgtactctatgcaatatgggttggcaagaaggactgggtctcggaaaaactggtagtggcatcaaggatcctgaggctccaggacattcacagtacagagatcgggctgcagaaaggcgaaatctatatggatcatcttcttcacttggaagtgataatgatagattggataccactagtgagtacccgccaatggctccattcggggtgaggtctttgccatttcctccaggggtgggtgaacgttctagcggtgaaattggcaatactgaaaattatgaggttatcactgctgatagagcaatagatgagagcaatgtgggcaatcgtattctgcgcaatatgggttggcaagaaggactgggtctcggaaaaactggtagtggcatcaaggaaccagtgcaggctaaatctgtcgatgtgagggctggacttggaagtcagcagcggaaatcttctgacccgtcgctggaggcgcaagctggtgatagctacaaaaccatcatccagaagaaggctatggcaagattcagggagatgtcttgagctgtattgccaatttttgttgtaatgtcgatgtagtaatgttttactcgtggtatttgtccctgcatcacttgattgtgcttgtgttgagcagacttgatcctggcatatagtatgattaaaattttaaattattgagagctcttgtcgtatgactattaaatatcgatgtttgtgatatttctcaaccataccaaaatttggtttgtttccattcaaaaaaaaaaaaaaaa

SEQ ID NO: 25200 - DNA, 840 bp, Oryza sativa
  Clone ID: PAT_MRT4530_3010C.1
atggcgcagtttcttggagctcatggtgatcactgcttcacctacgagcaaatggatgagtccatggaggcaatggcagcgatgttcttgcctggccttgacaccgactccaattcttcttctggttgtctcaactacgatgtgcctccacaatgctggcctcagcatggccatagctctagcgtcaccagcttccctgatccagctcatagctatggaagctttgagttcccggtcatggatccgttcccgatcgccgatctcgacgcgcattgcgccatcccctaccttactgaggatctgatcagccctccacatggcaaccatccatcagcaagagtggaagaagctacaaaggttgttacaccagtggctaccaagaggaagtctagtgctgccatgacggcatcaaagaagagcaagaaggctggcaaaaaagatcctattggcagcgacgaaggcggcaacacctacattgatacgcaaagttctagcagttgcacctcagaggaaggaaacctggagggcaacgcgaagccgagctcgaagaagatgggtactagggccaaccgtggggcggcaaccgatccccagagtctctatgcaaggaagaggagagagaggatcaatgaaagattgaggatcctgcagaacttggttcccaatggaacaaaggttgacatcagtacaatgctggaggaagcagtgcagtatgtcaaatttttgcaacttcagattaagttgctaagctctgatgacacgtggatgtatgcaccaatcgcttacaatggagtcaacatcagcaatattgatctgaacatctcttctctgcaaaaataa

SEQ ID NO: 25201 - DNA, 757 bp, Oryza sativa
  Clone ID: PAT_MRT4530_30110C.1
cccacgcgtccgaaaaatgtagtgatttctgcacctgcagccacgattaaacaaagtgagaaaacttcattacctgaagctgttcaagctgctgcaagtgcagcgctggctgcagaaaagaaagaaaaggagagagcaaaagagatcaagttggcatcaaaaggtagtcttttggcgaataagaaaaagatgaataatgtcctagcaatgtggaaacaaagaaatcaagaaggccaggcagggcgtgctatccttgatgacaaggaaccatccaactctgctgatgataaattaaacaatttacacaattcaactggatttgcagtgaaagctaagcctaaatctgatgttggaaatgctaaggacatgaactcgcctgctagctataattctcttggacgaacagctgcacccacagaaatgatagattctgatataaagcctacacctgtcagtaacagtttaggaactaccattatgggtgtcataagaggctctggtagaggaatagtcagatcagacactgcatttcatgcgccatctgatgctggtggtgctgattctttctccaacataccaacaagcacatgtgggttaacagcaaatgctggggcacctacttctgctcccttcaaaacagaattatctgctctagcatcttatactccatctggagtttcagggagtggtaaacgtcggttttctgaggctccaggacattcacagtacagagatcgggctgcagaaaggcgaaatc

SEQ ID NO: 25202 - DNA, 516 bp, Oryza sativa
  unsure (1)..(516): unsure at all n locations
  Clone ID: PAT_MRT4530_30111C.1
ctggtctgactgatcttaatccaccgcggcggcggacgctctagaactagtggatcccccgggctgcaggaattcggcacgagccgcgcgcgtgctccccctcctcctcgtcgtcgtcgtcgccgcgggcatggcgaaagcccccacggccacgcgtggggcaaggatggccactacatggtgtgcaagatcgccgaaggtttcctgacgaatgatgttgtgactggggtgaatgagctcctcccccggttgggccggggcgaactcgcggaaacgtgctccgtgggcggacaccgagcggttccggtaccggtggtccaaaccccctccacttcgccgacaccccccgggaaatgccaattcaactttccccccggaatttgctccaaaaccaaccggttaaaaagaaacttttttttttgttcggaatccaatttataaatttatacccctatggcgcttccaaagaaatcccactcnatttttcatttttaattcctaccccccaaaaaattt

SEQ ID NO: 25203 - DNA, 531 bp, Oryza sativa
  Clone ID: PAT_MRT4530_30112C.1
gcgcaccttctgctgaaagtcgggaaaggcaatggcggcagtaagatctattgggtctctcccagtgcctaatgtgcaagcactggcaggaacttgcaacggttcatacgaccagatgtcttggaggcacattacgacagaggctacttgtgaggaggtcatcagcaactaccatggggacatggcgatgacaatcattgatctcagtaggttgttttgtccacaatcatcagcagcagagtgtgtgaagctgacacctgcctgccagtgtcggggattctttcaggtcatcaagcatggagtgccagaggaagtgattgataacttcaggagcatcattattgagttcatgagcctgccactggatgccaagacggagtcctaacagctgcccaacagccttgaaggctatggacagacctttgttgtctctgaggaccacaaactagactggcgagacatgttgtaccttcaagtgcatcctaccgagtcaagggacttgcgattttggccagtcaccctgcatctttc

SEQ ID NO: 25204 - DNA, 611 bp, Oryza sativa
  Clone ID: PAT_MRT4530_30113C.1
cggcacgaggtatccttagcaaaggtatatgttacacacttctgcttccatatttttcgctttgctgtgaggaatatctggcattatattgtcatttctatgctttttgcatcaacattgtatcctacaacaaaatttactgtttagactggactatatgagattcctttcaaatgtagtttgcactctgaattacagaattctgttcagtaagccaaacataaagttcaagatgatattgtgtgtatagccatgtattcttaatacataatcaggaccaacatcaatgccaagctcagttgtatttctacgtgatatcgcatttctttagcatgcaccgaacatttgtcaagtcctcttttgacaatctgtgatggatgggtaaaactgtaaatgtagtttacctactgtatgttgaaccatttgacttatttggaatttggacataggagtatcatgtccatcacagtattagatccatatggttattctggatggttatagacctacagaatgatagtattgcagatttgcagtgatgtgtccactggatttttcgctattagttggtttggtaatgttttgcagcttagtactgatttttcgctatt

SEQ ID NO: 25205 - DNA, 422 bp, Oryza sativa
  Clone ID: PAT_MRT4530_30114C.1
gttcttcttctctctctcttgtcactcatcatcatcactcttcagcttgcttggttggttggtggagcttgggagttgaggtcaaatagccatcgatacacactcctctttcttttctctcttcatttctttctttacatcgtctctttcttgatttcccaatctactaagctcctactagctctgtgctctgctgcttcctcccatccatggcggcggttgccagcgacccacctacctacaagtagcttaagctcaagctcagctcagatcggagaggggtggtagaggtagtagcagcagttgagagagagagtgaggatggagagcagatggaggaaggccaagatgtcgctggggctcaacctctgcgtctacgtgcccaagacgcttgacgatcgcgactcggcgtccccgggtcg

SEQ ID NO: 25206 - DNA, 312 bp, Oryza sativa
  Clone ID: PAT_MRT4530_30115C.1
gtaatataaaaagagaaaaaagaggagaggcctggcaactgcaaaccctcgctttctccgatcgaattgctcgcccgagcaccaccagttcgccgcccttgccaccaccagtcgcctgcctcccccgcgcagggtatctcctccggccgccccagtggcgattccccccgagctcccccgcgcggcgccgtggccatgtcgctcacctgaggatacggtcggtgggctgtttcttgcaagagtctctcccccgagccccccaagagaaacagcccgggggacgccgagttgttgattcgatcgccggagttg

SEQ ID NO: 25207 - DNA, 320 bp, Oryza sativa
  Clone ID: PAT_MRT4530_30116C.1
gcaggctcgcgaggtgtggtgcagtgtgcaggtgaagcatcagcgatgcctgggaaagaaaagaaatgggagaaaaaaaaagatagcatgaacaatccccaaacttttcagctccgcccactttattacgccaatctttcccttcatcaggtcatggctttccgtttgtttcatgacttcagctgcctgcctagctagttagtacctttggggaaagcggccaacaaaaagcctacgtccccgtcctgttcctttcctcaagctcccacaccggcgtccagttcaaaattcaaagttcaaacacctcattctccctccgg

SEQ ID NO: 25208 - DNA, 2947 bp, Oryza sativa
  unsure (1)..(2947): unsure at all n locations
  Clone ID: PAT_MRT4530_30117C.1
atgggctgcaccacctcgcacgacgcgttcgccgcagcgagggcgcgggcgcgggcgtcgtcgtcttcgttggagcggccgcggcgggcgcaggccgacccggccgcgctgtgccgcgagcgcgcggcgctgatccgcgccgcggccgaccggcgctacgcgctggcgtccgcgcacgccgcgtacttccgctcgctcgccgccgtcgggggcgcgctgcggcggtttgcggcggccgcgctcgcgccgggcaccccgccgtccggttcctccccggtgctcaccctcccgccgtccccggcgaagccggtcgacgcctcggccgccgcggccaggtcgagcctcccgccgtcgccgtcctcgtcctccaccgtctcgcctctctcgcacaccctctccgacgaggacctggacgcgcacggcgccgccaaacacgccaccgccgccgccgcgtcatcgacgaggtatcactaccactacatgaggaactctcccaccgtgcccaccacggtgtacgaggaccccaatggcgaggccagctatggtggctacggtggctacgggtacacgtattcgtacgggccctacggcgaggtggttgcggaggagaggccggagacggcgacgccgccgccaaccgcggaggtcgcggcgtgggacttcttcgaccccttcacctcctacgatcaattcatagaggattacaagggccacgacggcggcaacttgccttccaatagcccgaattactcggagctgaggagggtggaggggatcccggagctggaggacgaggcggagctcgaggcggcggaggcgaaggcgaaggcatccaaaccatcaacctccgtcgttgctgatcaaggtgggaaagggaagagaccaatttcttcagacgtcagctcgaagggggaggcttctgatgggaagctgctgcagaggaagggatccggtggcaatggcgagccagagaatgccagcttgaagggcagtggtagtggtgacaacaatggcagctccaccagcaagaagaaaggtatagccttcgatggcattgagcaaccgattgctgctgctcagggggaaggtgggagtggcaagtctgtgcagtcgactgctgtgagcagtgagtcgttctcgccgcttcaccaggggaacaggagtgtcatggaggccatggacgagatcaaggagaggttcgatgaggcgctgaactgcggcgaagaagtttccaagcttcttgaggtggggaaggttcccccccagagttccacgccccgagttcttagatatttgtcttccagagtgatggatcctctatctctgaccgtgccttcatcttcgtgcctgccgaagccacgtagaaagtcaagaacattgagcggaaaggccagcacttcatcaaatccatcagtagctggtagaagaaacagtgctggaagtctctcatcaactctggagaagctatgtgcttgggaaaagaagctttaccaggagattaaggatgaagagaagctgaggattctttatgaaaagaagtacaggaggctaaaatctctggacgaacgaggattagattcaactacgatcgacgccaccaggttatcagtaaggaacttgcaatccaggattaccatcaatattagaacagccaatgccttctcatcgaagatacagaatattcgagatgaagagctatatcctcaactcgttgatctcatcattggattgagaagaatgtggaaagctgttctattgtgtcacgagaagcagctatcggccattcaggacagcaaaatgcacctgatcaaggcagtgaccattagccaatccaatgctgctgcagtagccacagtagaattagagagggagcttgcaaaatggtaccgctgcttcaacaagtggatcagctcacagaggtcttatgctgaagcactgaacggatggctgaggaaatggctcactgagcctgaggtgcaggaggaaaacacaccggatggcgccccgcctttctccccaggcaagctaggcgccccgcctgtgtttgtcatatcaaatgattggctccaagtgattgagatggtttccaagaatgaagtgttgaagacaattgaccaattctccaagcttgtgcatgagtacaagaagacccaggaaaaggagcacaggcagaaacgaaaagctgatcatgcttcccgagattataacaaaaggcgcaaagttctgcagagggaacttgggttgagtaccagtcttgatatggttgcagtcatggagaacactcaccacagccatgacaaccgtgtaatcgagctagagaagatgagtagaaagaaggatgaggagaagaccaagcatgatgagattgtaaaacatgcccatcttgcagcttcagctactctaccagtcgggttggtccctgtgctgcaccagatcgtcagcttctcccaggaaaatgtgcaaaagtacacaagcatcagaacccgaggtgcccgggtccactgactgccgagaaatgggttttacacagaagtgtgtgatagatgatcaaaggttcaacagcttgttgcatgcaccaaaggagaactctttttggttgctcgtcctgaatgagncacacgtgtctgggattctttttgtagagtaattggtttaactttggggtttaggccacttcagttcttaccacgtggaccggtggtagatagaaagttagtgttatccatagattcttactgatatccaactcacctatgatgttaatgttatcgatagaccatatattcttactgttgtctgactctttgctcaaattgctgaaagctgagtacagngagtagactaatgatgtattattgagaagtttcagatgttactcatttattctgtacataacacttgcctccctaagtgacttgttcattctagcttcaaaaaaaaaaaaaaa

SEQ ID NO: 25209 - DNA, 568 bp, Oryza sativa
  Clone ID: PAT_MRT4530_30118C.1
taaaaaaaatacagtccctagaggcaaagaaaagaaaattgtacatgaaaacagagactatgactaagatgggaggaattctccgagacgccttgcgcctgctatgatccaggttcttgcctcttcctttatcttcgctataagattgggggccgctgtttccttatgctcaaagatccgctggttcctttccttccagatttcccacatgatgagtaggattaaggatctcaatcctttcttgggcacttcatttatgttagtcagcatttcccaccattcttggacactttggtatggctcccaatgagttgggtccaattactgataggccacccagctagccgttaggcgccagatcctcttggtgtatctacaagaagcgattaggtgaaatgccgtctcattcgtcgcacgacatagggggcacgttccactatttggccatcctcttgcagctagtcggtcggaggtccaaactctattttgtatcacaagccacgcataaaatttgcatttcgcaggggcccaagatttccaaattaaggaattgtagttggtaccgacg

SEQ ID NO: 25210 - DNA, 241 bp, Oryza sativa
  Clone ID: PAT_MRT4530_30119C.1
tcacccattcgacggcttgtataagagggcgacgcgcagggaaggggggagctttagggggcgctggcgttccgcgctcgaaggcctgacctagttaaacatccacgccgcgcggcctgagaagctgcccgcgctaatacccttcattactgctgctcgcgccgaggtcgtgatgccgacataacgccgtcaaccttctggagggataaaaaacacactggggcccggttaccgccacccg

SEQ ID NO: 25211 - DNA, 6315 bp, Oryza sativa
  Clone ID: PAT_MRT4530_3011C.1
tacatagaatttacgtagttggtcaatgttctaagaatttgctaattcacgaccgtcgccgtctacgattttgaatgcgcctggctgcaagacttgtgtgatcgtgtaaggtccttcccatttaggtgagagtttgtttcgccctgcttggctttgaactcgtcggaggacatagtcgccgatcgaaagtatgcgtgcacggatgtgcttcttgtgataacggcggagggtctgttgatagctggctgctcggacggcaactcgttcccgatgctcctcgagaagatttacatcgatatctctctactcctcctggttcttgtcggagtacttctgtactcgtgtactctgatgttgtagctcgcctgggagcatggtctcagagccgtacacgaggaagaagggtgtttccttattagacgttgtcggtgtggtgcgtacggcccatagtagggttttcattccttgtaatactatgccgtttgccctctcgacttgtccattgctttgagggtgagagaccgaggcgaagcatattttgacccccaacccgatgcagtagtcctggaaatcggcgctgatgaactaggagccgttgtcagttatgatgcggtgtggttgtccgtatctgcaaaatatccctttgatgaatttgatggcgttgtcggccttgatttcccccgtgggtactgcttcgatccatttggtgaatttgtcgatcgccacgaataggaatctgtagccgccctgtcctcgtgggaatggcccaagtatatctagcccccagcacgagaatggccaagtcagagggatagtctggagcgcttgcgcgggtagctttgtgtgtttacatgtcgcatgcatctttaagggcggttggccaaaaaaagccttgtcgaaaagctttgccgaccaatgtccgaccggcggcgtgtgacccacatatgccttcatgtatgtcgaggaggaggtgtctgctgtcgtcggtcgagacgcatttgagaagtaccccgtttggcgctttcttatatagatcattgccgaccgtacagtagatctttgctttacgggttattttctcggcctctgtatcgtcctcgggcaactcctcgctgctgatgaatttgattagtgggatgcgccagtcgtctgtggtttcgatgtcggcaatggcgcgttctgcctcggtgacctccgagctaatgtcgggggtgttcgggctgactttgccgctaacctctttcaccgatggcttcgtcaggatgtcgagaaaagtgccgggctcgagcgattctcgtctggacgcacgtcatgctaggtcgtctggctcgacgttgtccttgtggtagacgtgtcggacctcgatcccatcgaactttttctctagtttcctgacttctgcgtgatacttggataactcggagttagagcatttataatctttgtgtacctggttcgcgactagttcggagtcccctttgacgattagtcgcttggccccaagtgtagctgcagctcgtatcccggcgagtagtccttcgtattctgcagtgttattggttgccctgaagttgaggtggattgcgtgcttgaattgatctccggagggagacgtcaagataaatcatgcccctgctccttggctgttgagtgcgccatcgaacgccattgtccatgtttcattgtcgccttggttgtctaatttgttatctggcatagtccaatcggcaacgaagtcggcgagtacctgggacttgatggctgttcgtggcacaaagtggacatcaaactggctcagctcgactacccatttcgcaatgcggccgacaacgtctttgtttctcacaacttcaccaagagggaaagaggagacaactgtgactctgtgggcttgaaaatagtggtgtagcttccttgatgtcatgatgacagcgtaaagcaacttttggatctgtgggtatcttgtctttgcgtcgtggagagcttcactgacgtaataaactagtcgctgtactttctctctctcgacaacaatgacagtgctaacggagtgtggcgtggcggcaatatagaggaataattcttcattaggttggggagcaacaagtacaggggggtttgataggtagcacttgagtgcaatgaatgcctcttcggcttcctatgtccatacaaatttgtcttgtttcttcaacagagcgaagaaaggttgtcctcgttctcccatcctagcgacgaatctacttagtgctgccatgcatccggttagtttttgtacctccttgagtcttgtaggcgacttcatgttctcgattgccttgatcttctcggggtttgcttctattcctctgccagagacaaggaatccgagcagcttgcccgacggtactccgaacgtgcacttctcaggattgagcatgaggcgatatcgtcggaggttgtcgaacgtttcccgcagatcgtcaatcaatgagtcgcctgtcttggttttgacaacgatgtcgtcgacgtaagcctcgacattgttgccaagctggttgctaagtgcgccctggaccgtgcgctggaaagtattcccagctgttatcagtccgaatggcatcttaacatagcaaaataccccaaacggcgtgatgaatgctgtcttctcttcgtcctcttttgccatgctgatttggtggtagccagagtaagcgtcgaggaagctcaataactcgcaaccggctgttgaatctaccagttggtctattcgaggaagtggaaagtgatccttggggcacgccttgttgaggtcggtgaagtcgacacacatcctccattttccgttggccttccgcaccatgactggattggctagccactctggatgaagtacttctctaataatgccagctttgagaagtttgtcgagctcttctcgtatggcttgttttcggtctggtgcaaatctccgcagtctttgctttactggcttggcatcgggtcgcaccatgagtttgtgctcaatcaccttcctggggacccccggcatatcggacggctgccaagcgaacacgtcggcattgtcgcggaggaaggtgatgagcgcgagtttggtcttgtcggggttggaactggagagtggaacaatcttgatggcgccgtctggtttcggcgtcttatttgtcttggtcactttcttgggtggctcagtcgtggcgggtgggctgggcgtttgctcgaccatgtcgaggctccgcttgtcgcattgcaccgccagctttgcgttcccctaaatagtgattgttccctttggtcccggcatcttaagcacttgatatgcgtagtgagatgcggccatgaacttcgcaagtgcagttctcccgatgatggcgttgtaagctgtatcgaattcagcaacatcaaaggtgatctgttctgttcggaagttgttggcttggccgaaagtcacgggaaatgtaatcttgcccaaaggtctggacgatgattggggagtaattccgtggaagggttgatcagttggtgtcaactcgttttgcggaattcccatcgcgtccaaagtgctggcaaaaagaagattgattgagctgccaccgtcaatgagaactcgcgctaccttgatgttccgaatagtgggttcgaccatgatcggatatcatcgttgtggaaccgccgaagatgtgtgagacgtggaggttggagtctagatacgctgagtccggttcgtgaggagccgtctcttcgttcgtctcaacaacgcgtactcgcttgcctttttcaaatgccatgtgcttctcgagcgactttttgaaaacaaggcaatcttccagagaatgtctgtccgtcttgtgtatggggcaccatgatttctttgtgtcgctgctttgtgggtctgggtgtttgggagggtttgcgtattctgctgcgaggacttccgcttgagctttcattttcccgtttttgcgatttttcttcttgcttgactcagatgtgtccgtggctggtttcttctctcccccggtcttcggcctatcgttcttgcgtcttagcacaacattagcgtgggcacatcgctcaacgatctcgaataatctccgagtgattgtgatgcgtcttgtcgccaactcctgggtagtgtagcgatctctgacaccggatttgaaggcgcgaattacaaaagcgtcggtgatttcaggaattgtgtttctgcactcattgaaacgtcaaacatattccctcaatgattcacccgagttctgtgtcaacgcgtgtaggtcgtcttcaatcgcgtggcgcttgtatgttccttggaaattggcgatgaattgttgccacaggtctgcccacaaagagattgagtagggaggaagatgcatcagccatgaacgtgcagaacccttcaacgcggttggtaaatagttcgctatcgcgttgtcgtctgctccggcagcatagagtactgtggagtagacttgaaggaactcctctgggtcggtgctcccatcatacttttctattgctccgggtcggaatctctcagaccatcagacatcacgtagggaacgaccgaaagccctacacccagcgttggggcggtgggttgttggcgatcgtgtgtccttcgtggatatctgtctgacgatgaggaggacgcggatgatgacgatgacgatgggtcacttggttccggcgtacgattacgaggatgacggcctggatctcgagaatcctgtcgtcgtcttccactgttgtctcggcgccgatctccatcgtcgtcgtcgatacggtggcggccatgaccagtattgtctggcacccgtcgttcgcgatcgttgtgatcgtggtggttgtcgtggtcccggtcctcgtttgagcagtctcctcgatttccgttatcatggcgccgtgaagagacatgacgtcaagagcgattcacgttgtctcgtgtgcgtcgtgcttcccggcggccgttgatttgatctcgaagatcgccagtgccgcgaggtgaaggggtagctcgttgaggtgattccctccgttccggatcttcactattggcctcgccagttggtggctgctcctggtgtgctgcggtagcggcttcttcaaacgcgttgctgaggttagtcaccgattcccatagtcgttctatccaacgctcgaggtcaacgttcagaacgggatcgtaaggagtttccctcagtatcgcttgaacgggcctgatgtgctgggcttgagtagtcgattgtttccccgcttctgcgttggcgtgcgctgacgtgccaacatcatcgatagccaatacctcccgcggcgtgctcgttgtcgatgacccatagtcctcgaggagatgtaagaccgatggttcgtgaggatcgatatcgattactccaacgaatcgatctgaagttggagtcactccttgttccttgtcattatccctgatggggacatatgacttaggagactgagctttcatggcgccgagaaagactttgcagctcgagaggtcctgattctttgtcttgtgaataggacaatagacatcccgagttggagaagtacgctgaattccacgttctttgcaggcgcgaatttcagcacggacgttgaggaaaacccagcaatcttgcaaggtgtgtttcttggttttgtggataggacaccaagaccttgtggcttcggaagtcatctttgtcggctcgtggttcatgtcggaaggacaaggtttggccgtatcagaatccctcttgagcttggatgtcgtcgatattccgttctccgtctcgacgagaggattttttgacatggaatcgccttggttcgtagccactgcgttctcgtctccggtcattggaggaccggttgagatcggtgtcgtggtgtaaaccgggaagacgatttcgccgacttgagtccataccagcattgttgaagcagggagtacttggctgaggctggtgctgacgttgttgtcgacgaagctggatgacatagtagtagaaccttaagtaccaaggccccctacctagcgcgccactgtcgacgggtgatacccgtagactggatatagagggtattggggtacgttgatacaaggatttcgtaggctgtggaggttgtgttgggtctgagattcgatcctaaaccctccccggggggccccttttatatcgcagatgtggaggtctcctcatagaactcggaggtatcagaccctatacgatacgccaacgacccagttctgcccgagtaggattcttcccatcttgacagtagccccgacttctgcttaaaatgaactcgtgcaaccat

SEQ ID NO: 25212 - DNA, 2631 bp, Oryza sativa
  Clone ID: PAT_MRT4530_30120C.1
ccaaagggctgccaggtatgttttggggggaggcagtcaccacagctgtttatctcctgaacaggaacagaaggtgctgcgcctggtgaaggcgttgtatggacttcgtcaagccccgcgtgcgtggtacaccaagagatggagggagctctagtgagcacagcaaccggggccttgaagcccgtccttgcgaagctagccgctctgcttggtgataagtacacgatcttcaaggggctgcacaaggagatcaagtctctctctaccgaactcatggccatccatgcgttccttctcaatatgtcagaggaggagaatcctgatgcccaagaccaggcttggatgacggaagtaagggagctatcctacgacatggaggacattattgacgagttcatggtccatgttgatgatgaatctgccactccagatgggttcatcagtaagtgtaagaaatcgctcgcaaatatgaagactaaacgtcgaattgccaaggcaatagaagatttcaagagccaaatcaacattgtcggagaaaggcatgcaaggtatagatcagagaagaccatctgcaggaccagcaatacaatcattgaccacagggctctctctatctttgagcatgcttcaaatcttgtaggtattgaagggccgaaaaatgaagtaatcaaattattgtccgatgatgatggctgtgagtcaaagcaacaacatccaaaggttgtctcggttgttggttttggaggacttggtaaaactactcttgcataccaagtataccaacagctcaagggaaatttttcctgttcggttttcgtatcagtatcacgaaatccagacatgatgagaattctgagaactattttaagtgaggtgacacaacgtgattatgctgtgactgaagctggagatgaacaacaacttattattaaaatttccaattttctttcaaaaaaaagtaaaattatcaccactactcgcataagtgatgtcgctagatcgtgttgttcttcatttcgtggtcatttgtataatatacggccccttgataccgtgcactcaagaacgttatttcatagaaggctattcaaccctcaggaaaaatgtccatcacaccttgaagaagtttctgaccaaatattgaaaaaatgtgacggcttacctctggcaatcatagccatatctggtttattggccaacaaactaaggacaaaggatcaatgggaacatgtgaaaaattcaattggttgtgcacttgaaagaaatcctacggttgagggaatgataagtattttatcattgagttactttgatcttcctcctcatctaaaaacttgtcttttgtatctaagtatatttccagaagactatgtaattaggaagaatgacttgatactgagatggattgctgagggattcattcataaagaggacagtaataccttgtatgaatcaggagaaatgtgtttcaatgaactagtcaacaggaatttgctacaacttgagaagcaaaactacaatggatgtcgagttcatgacacggttcttgattttatcatctcgatgtccaagaaaaataactttgttactttagtgacttctccttgtctaactattgagggacagaacaagatccgtcggctctcccttcaagttggcagcgaggaaggaaattcaatccaacgaacaatgttgtctcatgctcgatctcttgatgtgttttggctgcatctacaggagatcccttctctagtggagtttcggcacttgcgtgttctgagctttcaaggttgcaggtggttgcagagccagcatcttgcaaatataggaaagttgtttcagctaagattcctgaacctcaggaaaacaggtctaaatgaactgccagaagaaatcggatttctgcagaacttgcaggcgctgaacttagaaggcagcaatatgcatcgactaccaccacatattacaaggctgggaaatttggtacatctatttactgacattcggattcaactcccggaaggtattgcgaagatgcggtcactagagacattaaaatgggttgacctatccaaccattcatctaacattgtaaaagaacttggccagctagagaatttgagggaactgaagttgtttatgcccaacgatgatatatgcgatgagcacgtgaaggttattgcctcttgtctagttgaattaggtagacataacctccgtcgtctatatatcgtgggttataccgaattgcctaacagcctcttaccagatccgtggtgcccttcaccacttaaactcgaagaacttgacatctctgactcacctatggtacaggttccgagttggatgcgctcattcgtccagcttaaaaggttaggccttattctaaaggatgtcagtgatgaagatctaaccaccctcggtcgcctaccttctctgctacatcttcatctcaatataccaagaggagaaccagggtacgaggataggctcctcatcagtggctgccatggattctcatgcttgaggcagttttatctcacgggtcagcagccaatttttacagcgggatctatgccaaggctagagctactcagaattcaaatttgaatcgggtatgtaaacttttga

SEQ ID NO: 25213 - DNA, 2281 bp, Oryza sativa
  Clone ID: PAT_MRT4530_30121C.1
atgcctcgggcgacgccgctcttgcgacggcggcggaggacccgacgccctcgggcaaggcggcgctggacggcggctcagcaatacgtggtggcggcggtggtgcggaggcgaagcggcgaggtggtgcggcggcgcgtggcggcaacggctcagcggtgcgtggcagcagcggcggcggtgcggagcggcgtggagttctcaacggcgcgcggcggtgctgcggtgcggcggctcgacgcagcggtgaggaggcgaggaggaggtgaacggcggcgccgcggcctccatccccgaccgccgggggccacctccatcccccaactgacgggcgccacctccgaccgcctggctctagatccgtcctccacaaggtcaggggacgcggatccggccaccgggcgtcgtctcctccgtccgccggctgcgtccccaactgacgagtgcagaactgcagattcccccgtcggctgcttccgggtgcagaaggcgaagagggcggcgtcgaggagcagtaatagggacgaggtcatccgcaaggaggaggagcaaggtcgcctccaggccgagctcaagaaggtctagcgcgccaaggagttcaagcccaccacctcgttcccggccgttccgaaccccggccgccgcgtagggtgggcgagccccttcttcgacaccggcgcctcgccagcggacgcggacgccgccgctgcgggtggcgctagcgcggtctccgacacgaacagcttctgctcgacctccttggccgacggcgccctgtagacgacggccggctggtgcccgggttgctggtacttcggaggaggccctggcggccgcggcgtcatccccggcagcgaccacacggagccagcagcgggacggtacggcggggctccaacgccgccgccgcctcccccaccgctggggtcgccgcggccaccgcctccgtcgcagtaggccgccatggcataggggtggaggaaggcaagaacgagaggggagggtgctcatccatcggcccccgaagcaccaccctcgcgctcgtcgcgggctcgcctgagtaccgacctgctcctccttaccctggatccgttgtctgctgacccaagtcaagagccgccgcctctagcttgccagaaccagccaccatccaaggctccaactcgctcagcgctatactgtcgtggtcgagctcacctgctgccttgacgccactgcctttccccttccgagcagcagcggccgcttcgcttcgcttcgtttgcttcgttcgccggcggcagcggcggtggcggcggcggcggtgagggtggggttggggattgggggatcgaacctcgctggatatatagatgcctccatggatccaatcggcgacccatcgccgcctcccgcgcgatcgccggagctgtcgccgaaggcgtggggaggggaggcgccggagctgatccggcggctggaggagctggaggaggcggcggcgcggctgcggggcgagaaggaggccgcggaggaggcggcgcgggagctgcaggccgagttggatgcggagcgggcgtcggcggagacggcgaccagcgaggccatgctcatgatcgagcggctgcagcgggagaaggcggccgcgcagatgggtacaggaagagctcgcctcgctctccgacctcgccgcctcctaccactcccgcctccagtcccacgggatcgacccggtggaggctctggaggcggacagggcggcaatgcggagggaaatcgcagcattgcgagcagagagagctcagctggtgatggcgagggcgatggcgcggcggctgtgccgggcccggcgacagcagcatgccggcggccatcatcggcgacggcaccgccggaggctgcgccggcgccgacgccgcggcctggcgctggccgagggtgaggagcagcgggtcgccgccggcgccgcatgctgccgccgcgccctgctcgaccatcgccggcgcgtcgtacgccggcatcatcaccggcggcgccgccggtggcttgcccgtcagccgctgcacgacggtcatgaactcctgcggccgcgcgtgcaccaccttgggcgtgtgctcgtacacgatcaccggcgccgccgccgacttcttggatgccccctttgacgccgacgacgacggcgacgaccccctcgacgacgacgacgacaccttcagcggcagcggcctcggccctcgcagcccacctctcctcgacgacgacgacgacggcatggccactgtcatggtcatggcagctacct

SEQ ID NO: 25214 - DNA, 490 bp, Oryza sativa
  Clone ID: PAT_MRT4530_30122C.1
tccacgtgtaggtggacgcatgatatgacgcgtgagtcagaattgatgatagacactgcgtcttaaggacgtgagaattagcagatgttgtgtctaggagatgacatgatcagagttgcaaacaacctctgcgggctcactattatcaaagactagagctagagagctctgcacataatcagctcgctctagagatctgtgatgctcttgatgcctaagctgagaacataactgatgctgctttatctgcataactgtattgatgaaaagtgggacgctgccttgcagctcaaccatgaagcatatgctagagtggatctgctggctgaccacatcgaaggctatgttgtacgtttgaacgcctttgacgacatcgaagcacaattaactatcatatgaaaaagctgcgcctaacgttgcgacttgcttaaggtggttgatcaggaatatataggtgttgttattggggctgtgtaatcagatattcttg

SEQ ID NO: 25215 - DNA, 462 bp, Oryza sativa
  Clone ID: PAT_MRT4530_30123C.1
cgccgcggtaccggtccgggtccaggtcgggccacgcgcacgcgtccgaacattttctgcaccgataaaaaaaatgcctggggcgacgccgctcttgcgacggcggcggaggacccgacgccctcgggcaaggcggcgctggacggcggctcatcaatacgtggtggcggcggtggtgcggaggcgaagcggcgaggtggtgcggcggcgcgtggcggcaacggctcagcggtgcgtggcagcagcggcggcggtgcggaggtgaagcggcgaggtggtgcggcggcgcgtggctgcgagcggcggcggcacggcgtggagttctcaacggcgcgcggcggtgctgcggtgcggcggctcgactcatcggtgaggaggcgaggaggaggtgaacggcggcgccgcggcctccatccccgaccgccgggggccacctccatcccccaactgacgggcgccacc

SEQ ID NO: 25216 - DNA, 383 bp, Oryza sativa
  Clone ID: PAT_MRT4530_30124C.1
caactaaaaaagcttggtggatcattttagcagcccgaacaaacgaaccatgggctcattgttaggagaatttaacatgaactcaacggaagcgcattagtcaagaatccacccatataattgactgattttagcacattgagaaaaggaaggataaaccttgggagaaagaacggtaaaaaaaaatagtgaaaactcagagcttgagattgattaacccgacatgtcctgtgattaattaattgccaaaacactcaaccaagaaagcaggctgatagcctgtcttgccggcacgtattccgacgacggggagggcccgccgccgtcgtccgcgctaaggtcatacccacctttgcctaccatcaccatctgggggtggtggc

SEQ ID NO: 25217 - DNA, 1123 bp, Oryza sativa
  Clone ID: PAT_MRT4530_30125C.1
ccaccacgaaaaaaaatgcctcgggcgacgccgctcttgcgacggcggcggaggacccgacgccctcgggcaaggcggcgctggacggcggctcagcaatacgtggcggcggtggtggtgcggaggcgaagcggcgaggtggtgcggcggcgcgtggcggcaacggctcagcggtgcgtggcagcagcggcggcggtgcacaggtgaagcggcgaggtggtgcggcggcgcgtggctgcgagcggcggcggcagtacccccatcctcctcccccttctttctcccctgctctcccttctcttatttctcaatccggtttttcttgaagtggcagcggcgtggagttctcaacggcgcgcggcggtgctgcggtgcggcggctcgacgcagcggtgaggaggcgaggaggaggtgaacggcggcgccactgtctccatccacgaccgacgggggccaccttcatcccccaacttatcggcacccttgagctcgctccgatatgctgctcttgagctcatccatcggcccccgaagcaccaccctcgcgctcgtcgcgggctcgcctgagtaccgacccgctcctccttgccctggatccgttgtctgctgacccaagtcaagagccgccgcctctagcttgccagaaccagccaccatccaaggctccaactcgctcagcgctatactgtcgtggtcgagctcacctgctgccttgaatcgaagagtggtcaaccataggagggagagtgcaggaggaacaagacagatgtaggatggggtgaggagacgaactgctgacggaatgctaaaaatagtaacggttccagttttgagtgctgaaggtaaattacctataactagatgtaaccatgttccaatacaagtcattgtaagtgtgtgtattgcattctttgacatgttcttcctcttctttttttttcttttttgcccaagcacagtttttgagctgtatgtttttatttggaagctttgagcttgtcttatagtgtgtttattcaaacctaggcgtgaatagcttgtaatcaggagctaactgacatgctctgtgtagagtgtacatcatagtaagctatggaatctgatcttgtttgcgcggttgccg

SEQ ID NO: 25218 - DNA, 1089 bp, Oryza sativa
  Clone ID: PAT_MRT4530_30126C.1
atggatccaatcggcgacccatcgccgtcgtcccggcggtcggtgaagcggcggcctcccgcgcgatcgccggagctgtcgccgaaggcgtggggaggggaggcgccggagctgatccggcggctggaggagctggaggaggcggcggcgcggctgcggggcgagaaggaggccgcggaggaggcggcgcgggagctgcaggccgagttggatgcggagcgggcgtcggcggagacggcgaccagcgaggccatgctcatgatcgagcggctgcagcgggagaaggcggccgcgcagatggaggcccgccagttccggcggtacgccgagggccgcgaggatcgcgagcgtgaggtacaggaagagctcgcctcgctctccgacctcgccgcctcctaccactcccgcctccagtcccacgggatcgaccctgattccttctccgacgacggcgaggaggagcagcacgacgaggaagatggcgaagaggtagaacagatcgacacggccgcgctacagacagatggaagcagcggcggcgactcaatcggtggcatgcaggtgaaagccatggtcgacgatgatgaggaagagcaattcacccctgtggagaaggagttcgagtacacggtggatgtgaggtgcgcgagctcgacgacgaaggtatccggggcggtggttgttggggagttcatgggggagggcaatgcagctgcagggggattgtacgccagggtggaggctctggaggcggacagggcggcaatgcggagggaaatcgcagcattgcgagcagagagagctcagctggtgatggcgagggcgatggcgcggcggctgtgccgggaggtggttgctgaacagaaagccaagaaagtggctgcctcaccacgaagcttctcggtgctaggggtttgcaagaaactaacagtcttgtatctctttgccgcagtgggtgctctcgataatcttttggagaaacagaagttccacagccaggtataccttcggtctgtcaactacgttccttggcttcctactgctgctcgacagatccaccatgttgagtccctggcgtcgtctgcctag

SEQ ID NO: 25219 - DNA, 225 bp, Oryza sativa
  Clone ID: PAT_MRT4530_30127C.1
atgagagggatcgcgctgccagagacatacgtactcctgctccgaccgacatggtgatcattccaaaaggggccggtggattaacgggcctatctacggcctgagagaggcacgtcaaactactcaggtacctgctatatgtggccaaacgtgctctaagcacgcgggacttgcagagggctcccgtatcgtcatcgatgatggccccaaggtgtgccaatctgc

SEQ ID NO: 25220 - DNA, 423 bp, Oryza sativa
  Clone ID: PAT_MRT4530_30128C.1
ctagcttgttctgctgtagtggttgttgtcggcgacgttgacgaggaagcggttcgcgcggatcatcacctcgttcccggccgttccgaaccccggccgccgcgtagggtgggcgagccccttcttcgacaccggcgcctcgccagcggacgcggacgccgccgctgcgggtggcgctagcgcggtctccgacacgaacagcttctgctcgacctccttggccgacggcgccctgtagacgacggccggctggtgcccgggttgctggtacttcggaggaggccctggcggccgcggcgtcatccccggcagcgaccacacggagccagcagcgggacggtacggcggggctccaacgccgccgccgcctcccccaccgctggggtcgccgcggccaccgcctccgtcgcagtaggccgccat

SEQ ID NO: 25221 - DNA, 365 bp, Oryza sativa
  Clone ID: PAT_MRT4530_30129C.1
atatataccccgagtcaatctgtatatttattgggggtgttttggggtatttgcagatatcatttttcacttattgacaaataataacaagatgcatactggttactggtcaacaatacataacacttcacattttatccgaaaaatctttcatattaggaaacgtggataaacaaaggcgcttcaaagcatttagggcagggggggcagaagcagcaacataccttcagtacgcatcaaaagcaaagaacggccaaccctcctaggaggaagccaaggcacaaaacaacgacgaggtggccaacatgttggaggccacagaggggaaagccaccgggggaccggaggcacccatggcggaggtg

SEQ ID NO: 25222 - DNA, 329 bp, Oryza sativa
  Clone ID: PAT_MRT4530_3012C.1
catctatgcctcgtcggtgccaaacgctctcaagtaacataatgtaactcagctcagattatttctctggactctacagaaaccatagacagtacatgtaatcttggggataaatcaccgcgcatattttgtaccaccgtgtaaaatagataaaagtttaattatatgtgccatctgtcccttgtctggtagatagcaaattaggcatattgtttttgtgtaatatagatcagagcagggacttttaaaaacgaattgatgtggtgtgggtaactgggagttaaaccattggttgtatactcgtctgaaataataacaatccatttttc

SEQ ID NO: 25223 - DNA, 504 bp, Oryza sativa
  Clone ID: PAT_MRT4530_30130C.1
atgaccatgacagtggccatgccgtcgtcgtcgtcgtcgaggagaggtgggctgcgagggccgaggccgctgccgctgaaggtgtcgtcgtcgtcgtcgagggggtcgtcgccgtcgtcgtcggcgtcaaagggggcatccaagaagtcggcggcggcgccggtgatcgtgtacgagcacacgcccaaggtggtgcacgcgcggccgcaggagttcatgaccgtcgtgcagcggctgacgggcaagccaccggcggcgccgccggtgatgatgccggcgtacgacgcgccggcgatggtcgagcagggcgcggcggcagcatgcggcgccggcggcgacccgctgctcctcaccctcggccagcgccaggccgcggcgtcggcgccggcgcagcctccggcggtgccgtcgccgatgatggccgccggcatgctgctgtcgccgggcttcgtcttctccccgaacaccatgcagtccatccaggagctcagccccttgttctaa

SEQ ID NO: 25224 - DNA, 561 bp, Oryza sativa
  Clone ID: PAT_MRT4530_30131C.1
cgtgtttggggggtttttttttttttttttttttttttttttttttaccaaaaataataaatgttattattacttaaaactgtccccaataaccccttttttacttggccatttttttaaacaaaaaagggattatatgattttttacacggggctggccgcaggttccaacttttattttaaaaatcctatgccaaaattggttataacagccaaaacgtcccaaagttacacaaaacatggacactgttgccccaaacaaggtaaaaggtaaaaaccactctttatctaaaggaaaaaccctctcaagaatcacaaacttttaaggtccaaaagtgcattcttgggggcgggggaaataacagcgtctaaaccattcggcaggaaatagtattaaccttgggcaacccttgcaatttccttggaaaatcctggggatacaaacttgttctgggtttcaataacaaaaagggaaattccacccttgtatatttggccagccacccaaagtatctcatccttaaattcttgaaaaaaaggtcttgaaccatctaaaggggc

SEQ ID NO: 25225 - DNA, 3069 bp, Oryza sativa
  Clone ID: PAT_MRT4530_30132C.1
atgacccgttacaagctattgttcatgacattgctgctcctcctcttacacacccagctcgttgtcccttcttcatcagcaacatcagctacgtacaccaaccacaccggagtgccgccgtcggcggttccatgcatgccggaccaggcatcggcgttgctccgactgaaacgatccttctccatcaccaacaagtccgtgatcgccctccggtcatggaacgccggcgaggattgctgccggtgggaaggcgtccgctgcggcggcggcggcaccgccgccgccggcggccgcgtgacatggcttgatttgggtgaccgtggcttgaagagtggccacctcgatcaggtgattttcaagctgaattccctggagtatctcaacctggccggaaatgacttcaacctgtccgaaatcccattcactggcttcgagcggttgagtatgctcacccatctgaacctctcctcgtccaacttcgcaggccaagtgcctgtgcatagcattggtcagctcacaaatttgatctcccttgacctctcctttcgtttcaaagttactgaactattcgatatgggttacttatataccggtgcatactctcacgaatggcagctcgtcctgccgaacttgacagccttggttgcaaatcttagcaatttggaggagcttcgtcttggctttcttgacctatcacaccaagaagctgactggtgcaatgctttaggcatgtatactcaaaatcttcgtgttctcagcctgcccttttgctggttatctagccccatttgcgggtcgctctccaacttgcgctcactgtcagttattgacatgcagttcagtggtttgacgggtcggtttccagatttctttgccaacttatcctccttgagtgttctccagcttagctttaatcaccttgaaggatgggtccctcctttaatctttcagaagaagaagctagtggctattgatcttcacagaaatgttggattatctggtactctgcctgattttcccgtggatagtagtttggagattttgcttgttggtcacaccaacttctctggtacgataccaagtttcattagcaacctcaaatctttgaagaagctaggccttgatgcaagtggtttttctggagagttaccctcaataatcggtacgcttagacatttgaattcattgcagatctctgggttagaggtagtagagtcgtttcccaaatggatcacaaacttaacttccttggaggtccttgagttttccaattgtggcttacacggaacgataccttcttctattgcagacctgacaaaattgacaaagttagcactatatgcctgcaatctttttggggaaatacctcgacatatattcaatttaacacaactggataccatctttcttcattcaaatagttttactggcacagtcgaacttgcctcattcttgacactaccaaacctatttgacttaaacctctcacacaacaaattaactgtaataaatggagaaagcaattcttcactcacatccttccccaacatagggtacttgggtttgtcatcttgtaacatgactagatttccgaacattttgaaacatctaaacaagaatgaagtgaatggcattgatctttcacataaccatatccaaggggccataccccattgggcatgggagaactggaaagatgctcaatttttctttttgaacttgtcacacaatgaattcactagggttggccacaccatctttccttttggtgtagaaatgttggatctcagttttaacaagtttgaggggccaataccacttccccaaaactctggaacggtgcttgattactcaaacaaccgtttctcgtccataccaccaaatatttctactcaacttagagatactgcctatttcaaggcatcaagaaacaacatctccggagacattccaacatccttttgtagtaataaactacagtttcttgatctctctttcaatttttttagtggatcaattcctccttgcctgatcgaggttgccggtgcattacaagtactaaatctgaaacaaaatcaacttcatggagaactaccacattatttcaacgaaagttgcacattggaggcactagactttagtgacaataggattgaaggaaatttgcctagatctattgcttcttgccgaaaattggaggtccttgatatccaaaacaatcatatcgctgactattttccttgttggatgagtgcatttcctagactccaagtccttgtcttgaaatctaacaagttctttggacaagtggcaccttctgttggcgaagacagcagttgtgaatttcctagtttatgtatcctggatctagcctccaacaaattttcaggcacattgagtgaagaatggtttacaagattgaagtccatgatgattgactcagttaatggtacatcagtgatggaatataaaggtgataaaaaacgagtctaccaagttaccactgtgctcacatacaaaggatctaccatgaggatagataaaatactaaggacttttgtattcattgatgtctcgaataatgcattccatggaagcgtccctaaagctattggagagttagttctgctaaacacgctcaacatgtcacacaactcattaacagggccggttccaactcaacttagccatctaaaccagatggaggctttggacctgtcctcaaacgagctttcaggagtgattctacaggagctagcatcgttgcatttcctcacaacactgaacctgtcctacaacaggctggtgggaagaataccagagtcaactcaattctcaacattcctgaacaactcgtttctagggaatgatggtttgtgtggccctccattgtcaaaaggatgtgacaacatgacgctgaatgttacactttctgacaggaaatctatagacattgtgttgttcctcttttctggattgggatttggccttggatttgcaattgcaattgtaatagcatggggagttcccattagaaaatggtcgctactagggcagagagtcccctga

SEQ ID NO: 25226 - DNA, 718 bp, Oryza sativa
  Clone ID: PAT_MRT4530_30133C.1
atggccagccgtgaagacgatagcgccagctggcatcatacgaggtggccggtcggtgaagatgtaggcatccaacaacggcgtcataataggccagcggtgcaggcggagataccagtcgtcgacagcgaaggcagctggcggcgaagacaccagtcggcggcggcgaaggcaagccggtcggtgaagacgaagacgcccaacaacggcggcataataggccagccgtgtaggcggagacaccagtcggcggcggcgaaggcaagccggtcgatgaagacgaagacgcccaacaacggcggcagaataggccagccgtgtgaagacacgagtcatcggcggcaaagacaagccggtggtgaagacgtagacgctcaacaacgacggcataatacgctagccgtgcaggcggagacaccagtcgtcggcggggaaggcaagccggtggttgagatgaagacgcccatcaacggcggcataataagccagccgtgcaggcggagacaccagtcgtcgacggcaaaggcaagccggcaagccggtggtggagacgtagacgcccaacaacggcggcataataggccagccgtgcaggcggagacaccagtcgtcggcggcgaaggcaagccggtggtgaagacgtatatgcctaacaatggtggtgtgaccaaccaaccgtataggcagagacaccagtcggcggcagatgaagcagccg

SEQ ID NO: 25227 - DNA, 369 bp, Oryza sativa
  Clone ID: PAT_MRT4530_30134C.1
atggccagccgtgaagacgatagcgccagctggcatcatacgaggtggccggtcggtgaagatgtaggcatccaacaacggcgtcataataggccagcggtgcaggcggagataccagtcgtcgacagcgaaggcagctggcggcggagacaccagtcggcggcggcgaaggcaagccggtcgatgaagacgaagacgcccaacaacggcggcagaataggccagccgtgcggagacaccagtcgtcgacggcaaaggcaagccggtggtgaagacgtagacgcccaacaacgacggcataatacgccagccgtgcaggcggagacacttgtcgtcagcgacgaaggcaagccggtggtggagacgtag

SEQ ID NO: 25228 - DNA, 2080 bp, Oryza sativa
  Clone ID: PAT_MRT4530_30135C.1
tgacacacgggatctgcttctgtcgacccgtggaccgtctctgtgtacccggtccaccgtggtcccttaggttggcatgtggacattaaacttcggatgaccatgccttggtcatacgaaccccgaatcgacccgttcaagtctcctaatcttctgtcgttctggaggttctcgaagcgtggttcgcggtcgtcgccgaagactggttataaacaaaagtacacggatggaggtggacgaagtcgggggtcgatggacatctctaggacaaatgaaggctacacgagctgtggcccggtagtcgagatgtcatggcacagggctggtgttctgctgctaggggctcaatcctgcctgcctgtcccggtggttccggccgtaggcggggctgggtcggaattgatcagtcagaacatcaccaccggcttgccgtcatcgccgccgactggtgtcctcgcctttacggttgggtggtcaccccgccgttgctgggcatcgttgtcttcaccgaccggctgcttcatctgccgccgactggtgtctctgcctatacggttggttggtcacaccaccattgttaggcatatacgtcttcaccaccggcttgccttcgccgccgacgactggtgtctccgcctgcacggctggcctattatgccgccgttgttgggcgtctacgtctccaccaccggcttgccttcgtcgctgacgacaagtgtctccgcctgcacggctggcgtattatgccgtcgttgttgggcgtctacgtcttcaccaccggcttgcctttgccgtcgacgactggtgtctccgcctgcacggctggcttattatgccgccgttgatgggcgtcttcatctcaaccaccggcttgccttccccgccgacgactggtgtctccgcctgcacggctagcgtattatgccgtcgttgttgagcgtctacgtcttcaccaccggcttgtctttgccgccgatgactcgtgtcttcacctacacggctggcctattatgccgccgttgttgggcatctacgtcttcacgaccggcttgccttcgctgccgccgactggtgtctccgcctacacggctggcctattctgccgccgttgttgggcgtcttcgtcttcatcgaccggcttgccttcgccgccgccgactggtgtctccgcctacacggctggcctattatgccgccgttgttgggcgtcttcgtcttcaccgaccggcttgccttcgccgccgccgactggtgtcttcgcctacacggctggcctattatgccgtcgttattgggcgtctatgtcgtcaccgccagctgccttcgctgtcgacgactggtatctccgcctgcaccgctggcctattatgacgccgttgttggatgcctacatcttcaccgaccggccacctcgtatgatgccagctggcgctatcgtcttcacggctggccatgtcgccgccaccgctaataggcatcagcatcttcaacgcgtatgacgccagctggcgctatcatcttcacttccatggctgcatgattctgccagtgttgattggccttatcgtcttcaccgctggtcatctcgtctgctcctgactagtgccgtcgcctctacggctggtttatactgctaccactactgatagacgtcatcgtcttcattgctggccgccttgtcagacgccgactggcttattcgcctccacagctacgtgtcttcgtcaacattgactggagtcatcgtcattaccagtttgcctttgccgccgcccatggtgtcccgactctatgttcagttgtttctcaactaaccaaagagtcgggggctacataaatacaagactcaaaattcgacagatattatgtcaacatgaaggaatcaattaaccagccaatgagtcattatcttcatcttcgcttaagagcaagctttttacttcatcaactccaattatttcaccggcaattttggcttctccgtcatcgccacgatctacttcaaatttctcaaatatcaagtttgagatataatttacatgtccgggagttcagagttattaaccaatcagctcagttt

SEQ ID NO: 25229 - DNA, 1197 bp, Oryza sativa
  Clone ID: PAT_MRT4530_30136C.1
atgacattccccgatgagatcatagccaacatcctgacacggctaccgcccaaggagctcgtccgcgcgcgagtcgtgtgcaagcaatggcacgccttgacgtcggaacacctcttcatgcacacaaacctcctgcgcaccaacgccggtcaccccgtcatcgccggcttcttcctcaacgacgagatccacgagacgttcagctacaaccccctcctccgaggctattccagccccgacctctcgttcatcccgaccaccgccgacacggctaactccgagacctacgtcaccagctcctgccacgggcttctcctctgccgccgccgtcgacgcatcgacggcgagcttggcgtgtacagagcacggcactacgtctgcaacccggaaaccatggaattcttcgaggttgacgtcccggccggcgccggtggcgccggccaatatctgaacctcgcctacgacccgttgaagtcgcggcaccagtacaggatcgtcgcgcgcgggcacgacggcatccgcgtctactcctcccggacacgttcttggcgcacggcggtccggtacgacggccgctgccgccgcagcccgttcgcggggctccgccacccgcgtggcgtcttctggaacggctcgctggtgtgggcgatgctgtcgcctcgcctcctccgcttcgccatcgacagcggggagctgagcgagatgccgctgccgccgaggctgcggtccgagggctggttccacgccgggtgggtgtacgcctacgtcggcgagtccggcggccggctgcaggtgatcgggtacaccgacgaggagaggcgggccgcctgcttcgacgtgctggagatgcgcgacgacgaggagggggagtggacggtgctgtaccgcgtcgacctgacgcgggttaaggagctctacgaccccggcgacgacgacggcgcgcgcgtggcgagggtgacgctggagcacttctcgtggggaggcgcgccgctgcacgtcgtgcgggggcccggggaggcggggcggcacggcgtgctgttcttcagcgtgcccgggaagatcgcgtgctacgacgccgagagccgggcggtctcggtggtctggcaggacacggcgacgacgtcgtcgccgaaacacttactgtcttacacgtggttcaacttttatgcctacactccgagctttcttcgtttatag

SEQ ID NO: 25230 - DNA, 1337 bp, Oryza sativa
  Clone ID: PAT_MRT4530_30137C.1
ctttttcaattgtctttctatggtgctgcatttacttggtttatttcacttgcacccaattctatacaggattggtttcagttacaacaaaaaattcatgattacttctttagttttttttagaaacttctatagtggtaatatcaaattaaacttgatgcacataacatcggttaaacaaaagtataatgagtctgttttagaatacattagaaaatttagatacacaagaaaccaatgttatagtttaacactttctaataaggacttggtatatttgacttattccggtttactttagtatttaaagaaaatctagatggtcatagtttcttagatgtaagccaattacttcaaaaatctctggctcaagaaagccgagttagagaagccaaaatctcacaaaaagttcggtctaatcgtcccatgtgaatacagtcaatgaagtcaaatcttcggacgatgagacgaccgatatatatacgcagccgaatgggcttggtcctctaagtccaaaccattcgtttgctctactcttaaaccgattgggcacaataattagcaagaggaagtaaagttcaagtttgatgtggccaaatgcgataggatcttcgactacgtgttagagaacaagcaaatcaaattgtcataaggctatgtcagaccatcacttgacgaattaaagtggcgagcatattgcaagtggcacaacgcttattctcatgccaccaatgattgcagtgcattttgtagacaagttcaatcaatcattaacgaaagacgattagtatatagaaagatgcaagtagatgagtcatgttttcatatacacaacactgaatttcaagaggacaagatccccaatgacaaagagaaggccacttcaaaaacatcaatgcttggggggcaagatgacaagacagagattccaaaagatgataagtgatcaaggagatcaagttcacctaccaagcgagatgggagacgagcgagaacggaccccgaccgggcccgcggcggtggtccgtgccggcgggaaactcactcacctcgtcggcccaccaccgccgtttggggatccgtaaaaaagctgcttttcggttattcccaccgccacggcacgtacgcccccgggcagtttcggtgcttcctagcctaccgcctacgcgctacccactccctctggcttcgccgagaataatatcgctctcgcgcttatcatcaccaacaccatcgcggtcctcgatcctcgccgaacttgtcgtctctgtcgagtgaaatcaccttatcacccgaactaacttaggcagtagaaaaaatgagtaattgcacaggtc

SEQ ID NO: 25231 - DNA, 385 bp, Oryza sativa
  Clone ID: PAT_MRT4530_30138C.1
atggttacgggtaaggcatacctcctatccgacgacttatgggatatacggatacgggtccatagtctccgagttctacttagagactaaggtgactcacggtataaaaggcgcaccccctgaggggtcgagatcatcgaatcttaacaccaacaccacacaccatagtctacgaaccagaggatgcgaagcctactcgtcgggagatctcgtcgaaaccatctcgacaaggatctcgccgatcctcgtaccaacgtatcccaataccttattcatccggtctacgggtatcccccgtcgacatgtaccaaattccatcgatttataatccgattacgccgttgtgttcgttgcaattgaatctttacatcaagatctcacatga

SEQ ID NO: 25232 - DNA, 188 bp, Oryza sativa
  Clone ID: PAT_MRT4530_30139C.1
aaataattcacaacacctttttttattgatcagggtaaaaacctgcacaaaaatacacccttccgggacagaaattacctttttttcaaaacttgtacattaaaaaacgggggccacacaaattccaacatttattcgggacacgtccgttcatttactggaccgggtacacaaacccaaactttttt

SEQ ID NO: 25233 - DNA, 378 bp, Oryza sativa
  Clone ID: PAT_MRT4530_3013C.1
atggcggccgggtctcccgcgcccgttccccctcttccggccgccctctttcactcccaaccctatataaaccctccccgagctccccaccaccgtttccgccactcacccgcctctctccccaccggaatcgagctcgcgccgtcgctctctctttccaccgtcaccgccgagctcgggtccgccgccgtcgtcgacccggaccaccttccacctcggcgccggctccttcgggttcgccgcatcctcgccgacctcgtccacctcttcgtttcggtcgcgaccgccggagcaccgtcgaccccgtccacccgagccgcgccgccgccttcctccgctccggttgccgtttccgtcgtcgccgtcgacccggggtga

SEQ ID NO: 25234 - DNA, 169 bp, Oryza sativa
  unsure (1)..(169): unsure at all n locations
  Clone ID: PAT_MRT4530_30140C.1
agcagcaagcctaattaattcacgggaaaaccaattataaaagatggagccaaagatattgcaatcgttgttgtcagaaagatacaacagtgcacagcacggcatgtncnnacacgaccgattataactgaacttatgtgctgaaaaaaaaggcaatcaaagtgagact

SEQ ID NO: 25235 - DNA, 406 bp, Oryza sativa
  Clone ID: PAT_MRT4530_30141C.1
ttttgtgtttttttttttttctcgtttaaaaccaatttttcaacctacaacaaggctggaacaccaagacaaaagagaatacccactttttaaacgatgccacacacaccgtaataacttttaacaaatgctatcaaactcgcaaatagtgatgcaataacgccagcggatgggagaagcctaggtcccggatgaaccaccaaaggctttgccctttcctggaaaagggtaaacgcctcaaccaaattgagctggcgtggcgccatgtcccatggtagctgccagtccgatgcatgcaccagtgtgggcgatgtcatggggaccatccgaaggccccaactgaggccggtgcatatcctttggcctgcaccgaatggcaacagtccaaaacaatattctttgaatt

SEQ ID NO: 25236 - DNA, 717 bp, Oryza sativa
  unsure (1)..(717): unsure at all n locations
  Clone ID: PAT_MRT4530_30142C.1
ccggccgggatcacattctgactcgtcttttcccccatgtagtgcgatggaactcaaccccagtgcagcgcttgcggtgacagacgtcaagactgtgaatacacccaagctgagagcaacaggaagttaatcgcacccaccacccaagtcttggctgaatgcttacagtcatatttagacgccacaccaatgcatacataactgctttggaggcgagggttgcaagtctcgagaagcaacttgccatgcacgccaaacatcccgagtcgcccgactcgatggataattgtggtcccgtcgacgaagaagccgtaccacccaccacggacccatcgttcagccttgcacctgttgactcagcacctgacgagatggatgagctgacaattcccttggatgtttcaccctcggtgagatcggagagctgcgttattttggcgcctccagtaatttctccatcatttccaaccatgctatcaagatcccttcgtcactgcaggcgaggaatcggggtatcgaagcagcacgggcaatgcctggtttcttcgaacccacagatcaactccgcgacgagcttctncaccatcttttggaagtggcaaaactcgtggcagtacatcgtcccgagagaactattcgttcgtgattttgtacgttgatcattgcagggcggtactgcacgccacttcttctctcagncatcttggcattctgctc

SEQ ID NO: 25237 - DNA, 668 bp, Oryza sativa
  unsure (1)..(668): unsure at all n locations
  Clone ID: PAT_MRT4530_30143C.1
acatggtttcaaccccaagatcccgtgtttaatcccaacatgctcacaatttcttcttaaaaaaggaattggagggatgcctctccctccaaatctcgttttttttctttctcattacattaatcagacgcctgcttagttcataattaagtgtcccagatgccacttttaagtttttttctcaccattcatttagtcatggtagtggtatgtgtattcttttgtttttatactttaggtaaattggatatttttttcattctcagaattaaagttgattttccagcaatgcagattttgcagagttaaattcttcaacaaccagcctttgccagcctccagagtccacacaacactttgaggaagaagaagaggtagattacagatttgatcagttaggaggaacatacatccagtcagcccaatgatgcctccgaagttgcacaacaccaacataaggactacaggaggcaacaaaaacaaagcccaagcagggaggaaaccccccaancccttcccaaatttttccttttttgggcccnangnaagggcccaagnaaaggtttttgggggtgggttttttttttttcccaaagggggggggggnaacccaacccccccnatttttttngggggggtttaaaaantttttttgggttttccccccc

SEQ ID NO: 25238 - DNA, 328 bp, Oryza sativa
  Clone ID: PAT_MRT4530_30144C.1
cggacgcgtggggccggagctcttctagccgctcaaggccggccaggcactcaaggacatggggttctcgagcgccgactctcgcgtgtgccccttggtgaccatgggcctggaacctggacaggtcttgaccgtccgcaacatcggcaacatggtcccagcttactgcaagaacaagcacgctggcgtcgggtcagatatcgagtacgccgtctgcgcgcttaaggacgaactcatcggggtgattggccacaaccgctagcgtggaatgaacgccctcctctcactcaaggatggagcaccagactgctttcacttagtcgaggac

SEQ ID NO: 25239 - DNA, 321 bp, Oryza sativa
  Clone ID: PAT_MRT4530_30145C.1
atgacaactggaaatcttaacagcaacataaggatatgtttgacaaagacaccttgcattctgaaacacccatgcactggtgcatggatgctcagacaaagaacttccacaaaagccgcatcacactgccctactcgaggaaaaagagcatctaaggacagtgacttgatctctgctgtactggataaccaaaatcccctgaatcatggacaaaccaaggcgccattatccactataattgtggccagagggagtacctttgttgctcggagaaattttcctttcaagaagactcgaaagaagaatatgtacgctttatag

SEQ ID NO: 25240 - DNA, 564 bp, Oryza sativa
  Clone ID: PAT_MRT4530_30146C.1
atgggcgaaagccgtaatgattataacaaactgcagactccttgccttattttcgggatgagtgatacatctggcgagtgccgagttaccaaaactcgaagtatctatactgcggctgacagcgaattatttttagctgtcctgcctttcctttcggaaatgccagaacaggtagtttcaactgtggagcccttcctttctacaatcccggaacagaaaaggaagactcatagtcgcagccggccaatggctagaacaagtcagttcaagctgcttcgcactaccgttgctaacggattcaagttgtctgcagtcgacacaagcttgccgctgctgccgcaaatcaactcaagctcctcgttccatcatgaaagagtaaagccccaaaatgggtacacagctaaacatgagagcaagcagactattatacgtgtaactaagccttcaaaatgggggtgtgcatgtaacttagccgtcatagagcgggctgcatatggaccagaaaaagctctaggactttcggaggagaatggcttgttagcacgatggtttgaaggacttgtt

SEQ ID NO: 25241 - DNA, 384 bp, Oryza sativa
  Clone ID: PAT_MRT4530_30147C.1
atgtcaagcgaaggcttggcgagtgccttgtcgaacacagatggattgatcgaggccataggaaaattctccgaaaatggttttcagagttcccgaaaattgattttgctctctggtgattttcagaattctccaaaaatggttttcggaatttccgaaatggtggagatttctttgaagagtggagatcctccttggcatccaaagagcacatttcttctcctcatgccatctgtccatttggatgacggttggagcgccggaaccggtagaaaccatcattgggaagcggttactaccgaacgcaacctgggcctaggccagcagcttctgggttggaataaggtcaccgaggtccctcaaattaatagcgagattttttga

SEQ ID NO: 25242 - DNA, 550 bp, Oryza sativa
  Clone ID: PAT_MRT4530_30148C.1
acccaacatttttgacctcgggctatggtatcatacctaagccgttctcagggccgtccccataccgaacttggggcaccacatgtacagagatagcttgtgcgtcattctccaccaactactgattgatcgtgagcttacgacacccaaaactactggtagaggaccatgccagctacgtggcatattttatacccttttctctactaaaagggacagtccaaagacattgtcactgtattccttaaggatttccttcttcttgtcagttccgggggcctcgtccagctgatcccccaactttccaagcctcctagaatccctcactttacaggggtgctagcacctatgactcggactgtcacctggaatacccagtatctggggaataccttgggaagagatgactgcaccactggtggccgtgccgataaaagaactccttgggtaccaggacgttctaaatctcttaggccgtgcaggaggatgactcgaactccaccttgatctggttgatcgtacactcctcagctgagctccaatgcacgag

SEQ ID NO: 25243 - DNA, 269 bp, Oryza sativa
  Clone ID: PAT_MRT4530_30149C.1
gtacagtaccgagtattgctccgaggaaccgacgacaggacttttatccggctgaatccatagagaaacattgtttttcaactttaaacaggtagccgatcacaaaaacgcatcatgatatgacatttaatccgaaaaccgtgataagcctttacattaaagggattgtcagcgtctactgagccctcacacaagatgcaaccagaagtttacaataggcaacaagcatgaaccagcaatattcacgctttctgggaaaccaaacaaca

SEQ ID NO: 25244 - DNA, 348 bp, Oryza sativa
  Clone ID: PAT_MRT4530_3014C.1
atggccgccgagaggcacgacgcacacgagacaacgagaaccattcccggcgtcatatctcttcacggcgtcacgataacgaacatcaaggaggccgttcaagcgaagaccgagaccgtgataaccgccacaaccgccacgatcacgacgatcgcgaacggcggttgctgggcgatactggtcgaggacgtcgcaataatgacgacgatgatggagatcggcgccgagacaacagcgggagacgacgacatgattctcgagaacccggccgacgtccccgtaatcatacgccggaaccaagcgacccatcgtcatcgtcatcattgtcgcgtcccaaaacgactctaa

SEQ ID NO: 25245 - DNA, 225 bp, Oryza sativa
  Clone ID: PAT_MRT4530_30150C.1
cagggactggaccaacgtcgccaagaagggccaggtcgataataggaagaacaaattcgcagcagctcatagtggagtggagacactatgtgctgatgaatcccctaatgattttgagcaatgttcaaagaaagctcatgaccaatttctagccgaccttgcgagcattctaccgagtaacaccacaccgctcattgtcagtgatgctggctttaaagtgccatg

SEQ ID NO: 25246 - DNA, 405 bp, Oryza sativa
  Clone ID: PAT_MRT4530_30151C.1
atgaccggaacggcggtggcgcacggctggagcgacggcgacgacggcggctcaaggttgcacggcgctagggcgcttccgacggcgagagacgaaagcaagggtggcggcgggtcgaggagacaccgggggtccttttataggggcaaggaggcggcggcgaaggcccacggcgaccggcgacgagaaggaaagttagggctcggagagagagagaccgatccgactcgacctcgaaaccaacactttccaaacgattttagccggggattccagaagagaaaaggtagacgagatcccgaagatcatttcccctctattgatttcaccggaaacggaaagacgcggccgaatttggaaggagacggcggcgctagggtttcggacggcggcggccagaggtag

SEQ ID NO: 25247 - DNA, 318 bp, Oryza sativa
  Clone ID: PAT_MRT4530_30152C.1
atggaggatgtggagccgctggctcctgggcacctcctcgtcggcggtggtgttgagatggccgccggccgccaccacggctctcactgtcgcccgcgccagatccatcgtgccgttgccaaattcgtgcgcgtggggtggaccggcggccagatccacgcggaagggggcagtggaggaggaggtggagctgtcgcgcctccagcccgcctgccacggcacgcgccagccgctatgcctcgcgcccatagccacgcctcccgcccacccgctctcggccgcctcctcgtcagcgttggggccgtccgaggtcgctaa

SEQ ID NO: 25248 - DNA, 610 bp, Oryza sativa
  Clone ID: PAT_MRT4530_30153C.1
cggcacgaggggagcgacaacgtaatcacttccggagggggagacggcggatggatggggaaacccgcgccggcgccgcgtgggtgtccgatgccagccggccggccggccggcgcggtccagcgcactgcgggcgggggacggtcgacggcgagcagccgcgcgtggaggaggcggcggctgccgacgatacggtgcggacgagggcgacggcatgtcgggatgttcgtcgtcaggcccccgcaaccctaaggggaaagtgatgcaagaatgtgaaagccggattaaggggaagggaagaacagacgatcagtcatgaaatgtttgacccaagaaaagcagcgaagagtcatgtggctttatgggtccatggggggctacttgagttgacaatggcaaactaattaattcggcaccttatccgcacattttgagccacttataataatctaaattttatgcttctttggctgtatgcttggatttggcatctgtacacttccaagttccactgcttcataagttaaagttaaagtgaccttttctgggtgtactgttttaatttgtccagtaaagtggtcttttttagcaggatgcactgatgaggagc

SEQ ID NO: 25249 - DNA, 404 bp, Oryza sativa
  Clone ID: PAT_MRT4530_30154C.1
ggggggggcaattgctcgaatcagttatgttttgtacggctcagtgcattgtacaaactgtaagacggttttccaatcttattagtgctttcgacaatctctttcaccataagaaatgaaactttggctctctaagggaactcatcttgcaaacggacggagcacacatgggaaacatttgctgcttctttgtaagaactcgaacttctgttgttggagggattgagtgtcacactcttcgatgctgctccagaatacaagtgtggttttgcattttctatgtagaccgggataatcgcccttactgaaatgcaaaacattcactatctagggccccagaccaaaattggccacttagggtcctttattggataaagggctttctttttgtcaacaattttccc

SEQ ID NO: 25250 - DNA, 1178 bp, Oryza sativa
  Clone ID: PAT_MRT4530_30155C.1
ccagaatctatacggacgcgtgggcagcagcagcagccaaattcaccatcctccagcgatcgatcgatcacctgcagtactagttctctcaagcttcttggtcgccggccatgagctacgggagcagctcttctggggggcgaggcgggcggcgggtggagtacgggaggacgtacgtggtgaggcccaaggggaggcaccaggccaccattgtgtggctccatgccctcggcgacaatggcgcaagctggtcccagctactggattctcttcctctgcctaatatcaaatggatttgccctactgcaccaacacgccctgttgctgctttcggtggattcccttgcacagcatggtttgatgtggaggacacttccgtggatggccgtgatgatattgaagggcttgatgcttcagctgcacacgttgcaaacctactgtcatccgagccatctgatgtgaagcttgggataggtggtttcagcatgggtgctgccgctgccctccactctgctgcatgctatgctcatggaagattcacaaacggcgttgcctacccggtcaccctcagcgccgtcatcggtttgagcggttggcttccctgttcaaggactctgaagagcaagatggacagctctcagactgcactgagaagggctggtgccttaccaatcctgctcagccatggaagagctgatgaggttgtcacctacagaaatggtgagaaatcagccgatttcctgcgaggctcgggttttcagtatctgaattttaaaccctacaacggcctggggcattataccatccctgaagaaatggacgatgtctgcaagtggctcagttcaaggctgggacttgaccgatcccgcggctaattcgaaaatatgaacccggttcagtggctttggtagtgaggtataatagaataaggtattgacaatatacaggagaaggttgattaggatatgtgaattgtgacagtcatggctttggtagcatatgtaacactatgtgttttccaaacaactgcataccacgttacagttgtagttttctactgatgtactttgttcccgctaaagagggatgcgtataatgtagtattgtattgcttgtttgatactttcgttactaaggctaaaaaaaaaaaaaaaaaaaaaaaaaaaaaaaaaacacac

SEQ ID NO: 25251 - DNA, 1311 bp, Oryza sativa
  Clone ID: PAT_MRT4530_30156C.1
atggctgacagccatgaaactgacaagaacattgagatctggaaggtcaagaagttgattaaaggacttgatgctgcacgtggaaatgggacgagcatgatatcactgatcatgccacctcgtgatcaggtctctcgagtcaccaagatgttgggtgatgaatacggaactgcctcaaacatcaagagcagagtcaacaggcaatctgttttggctgctatcacatctgctcaacaaaggttgaagctgtacaaccgagttccccccaatggattagtgctttacactggaaccattgtcacagacgagggcaaagaaaagaaagtcaccgttgactttgagccgttcaggccaatcaatgcttcattgtacctttgtgacaacaagtttcacaccgaagcgttgaatgagctgttggaatctgatgacaagtttggcttcatcatcatggatggcaacgggacgctgttcggaacactcagtggcaactcaagagaagttcttcataagttttctgttgatctccccaagaaacatggacgaggagggcagtcagcacttcgctttgcccgcctacgcatggagaaacgccacaactatgtgcgcaagacagctgagcttgctacccaattcttcatcaaccctgccaccagccagccaaatgtttctgggctcattatagctggttctgctgactttaagactgaattgagtcaatctgacatgtttgatcagcgtctacaagccaagatactcaaggtggttgacgtttcttatggtggggagaatggctttaaccaggctattgagatatctgctgaagagctttcaaatgtcaagttcattcaagaaaagaagttgattgggaagtattttgaagagattagccaagacactgggaagtatgtttttagtgtggatgatacgatgtcagcacttgaaatgggtgcagttgagacactgattgtgtgggaaaatcttgatatcaaccgatatgttttgaaaaattctgtcactggagaaactacggtaaagcacctcaacaaggcacaggagacagatcagagcaacttccgagataaggcgacttctgcagaactggaggtaatagaaaagaccttgttgctcgagtggtttgcagaaaattaccggcaatttggttgcagcctagagtttgtcacgaacaagtcgcaggaaggttctcagtttgtcaggggctttggtgggataggggggattctccgctatcaggttgagatcaatgcttacgaagacttgtctgatgaggagtacgatgaagactacgaatag

SEQ ID NO: 25252 - DNA, 772 bp, Oryza sativa
  unsure (1)..(772): unsure at all n locations
  Clone ID: PAT_MRT4530_30157C.1
atttggtgctgggcggggacgacggcaaggagtgcacctacggcggcggctacctcaagcgccaggccgtcttctcctgcctcacctgcgtgccagcgggtgtcgctggagtctgcaccgcctgcagcctcgcctgccacgacggccatgaggtcgttgaactatggacaaagcgaaagtttcgttgtgattgtggcaactcaaagtttggaagtcatgtttgcaaactttgccctgagaaagatccagagaatccagtgaattcttataaccataacttcaaagggtcctattgcacatgtggcaggccttatcctgatccagaagctgaaaagcaagttgaaatgatacaatgctgtatttgtgaggattggttccacgaggatcatattggtcttaactccattgaagagataccacgagatgaggaaggggagccactctacgaggatttcatatgccccaaatgctcacctaagtgctatttcttgaaattatatccggatactatttgggcatctaataagcagagttctgcaccacaagctgagactaccaattcaactgttatgaatggaaattcaagccttggtgacatagagaaaagtgaaaatggtgctcttataaatcatttgaattgtgaaaagacctctgacaatgagaattgcccaaaagacagtgtagctccagattaggccagtctggatgacagttctgatggcanatgtaagctaggaatgaacatttggtcaaatacaccatcagctgattc

SEQ ID NO: 25253 - DNA, 540 bp, Oryza sativa
  Clone ID: PAT_MRT4530_30158C.1
atggtggacatgcggagccagctgctgcacaggacgctggtggaggagctcaacaagcgcctcttcttcaacaccgttggcgccgtccacgacatcggcttccccgaccctactgcttcttctatctctagctcttcccaccaccgccggagaagcaacaccaagatcgaccacaagcaccactacatctcgtcccccgccgccgcctcgtgggcctcatgggtggtggccggcgggggagcccgcgtgccgctccttcccctgccacccgcgcgccgcgcctctcccggccgcccgcgcgccgccccttcccccgccgccgcgtcgcccgtcgctgcgtcgccggtctccggctgcaggtcgccgggaccttcggtgtactttttccaactaattttcatccctgctgccgaccccatcctcagggccgagcgcaccatggccaccgacctcgaggccatcatggcttccgactggtcgttgaagcctccacaccgccgccttctcgtagcagccggtgccacagctagaaagaagtag

SEQ ID NO: 25254 - DNA, 1813 bp, Oryza sativa
  Clone ID: PAT_MRT4530_30159C.1
ctgcaggaattcggcacgagggtgtgtgtgtgtgtgaaccactctcggctctttggcttctgttgtttaaaggagcggcacaaagggttttttttttttgggtaatgtaaattaccacgtcacaaagttcttttgatttgatacaaaggagcaaacattttgttctgctgccctggagcatctaccagaagctcagttcggagcatttagcattactacctctgctaactacattagaagtcgagtacaagctaggtaacaggacacaatagccatgacatagcgaacgataaattcacgggggagtggccagaaaaactgctcgatcgaccggcagtgggatatattagtctcaaacagaaccccaagcagctgagtttcatgacaacctctgttttttcttcttagcaagattctcaaaaacagctcgtatatcttcagatgtgaccggttttgatgaatcaaaagtttccagaaaagactgaagctcattcttcatgtcattgatgccactcaaaatctcaatcttctgtacatggtcgagtgaattaagaaagtttgcttcaactccttcctgctgctccaacttcttttccctcttctgcttagcaaccttctcatactcctcaatagagtcttccttgtctataaggtacgcaacaccttgttgtgcatagaagtcggtgcaagtttcacatctacagataacctctctccagctttttgacataaaaaacggcatctttttctctgaatcagctgatggtgtatttgaacaaatgttcattcctagcttacatttgccatcagaactgtcatccagactggccttttctggagctacactgtcttttgggcaattctcattgtcagaggtcttttcacaattcaaatgatttataagagcaccattttcacttttctctatgtcaccaaggcttgaatttccattcataacagttgaattggtagtctcagcttgtggtgcagaactctgcttattagatgcccaaatagtatccggatataatttcaagaaatagcacttaggtgagcatttggggcatatgaaatcctcgtagagtggctccccttcctcatctcgtggtatctcttcaatggagttaagaccaatatgatcctcgtggaaccaatcctcacaaatacagcattgtatcatttcaacttgcttttcagcttctggatcaggataaggcctgccacatgtgcaataggaccctttgaagttatggttataagaattcactggattctctggatctttctcagggcaaagtttgcaaacatgacttccaaactttgagttgccacaatcacaacgaaactttcgctttgtccatagttcaacgacctttagcaaaaagaaccatccaagcatcagttgtgtgcgcatcacccagtcatatagatacttaatacagaagatggcaatagataatttggcaactgctaatgcaacgcctaaaataactcttgtagcgctcatccttctcacccatataaacattgacactaatcccagctcatggccgtcgtggcaggcgaggctgcaggcggtgcagactccagcgacacccgctggcacgcaggtgaggcaggagaagacggcctggcgcttgaggtagccgccgccgtaggtgcactccttgccgtcgtccccgcccagcaccaaatccgcctccagctcctcggcctcgatcccctcgatgtactccccgatggtgaccgtcggctccgcctcgtcctcgaaggcgcccgcaccgccctcgccgccgctcccctcgccggccat

SEQ ID NO: 25255 - DNA, 2184 bp, Oryza sativa
  Clone ID: PAT_MRT4530_3015C.1
gtattccgccgtaaactcaatccctttctctggagtcttggagcggcacggcggctgcgcacgcgacctcgcccaccacctgctcggcgaaacgcccggctcggccgcgacgtgtcccaccgcaccgcgcgcgcacgccgcgccgcgcccgagcccctcgccgcctccgcgcggcgcgccgcgcacctatttaaatgcggccccgatcccgcattctctcaactgcactagtccccaccaacggctcggtccagtagagtttatcccccacctatggccagcctcgtgctctccctgcgcatcgcgccgtccacgccgccgctggggctgggcggggggcgattccgcggccgacgaggggccgtcgcctgccgcgccgccacgttccagcagctcgacgccgtcgcggtgagggaggaggagtccaagttcaaggcgggggcggcggagggttgcaacatcctgccgctcaagcgatgcatcttctccgaccacctcacgccggtgctcgcgtaccgctgcctcgtcagggaggacgaccgcgaggcgcccagcttcctgtttgagtccgtcgagcagggatccgagggcaccaatgtggggaggtacagtgtggttggggcacagcctgcgatggagatcgtagccaaggccaaccatgtgactgtcatggatcataagatgaagtctaggagggagcaatttgcgcctgacccgatgaagataccaaggagcattatggaacagtggaacccacagattgttgaaggcctccctgatgcattttgtggaggatgggttggattcttctcttacgacacagtgcgttatgttgaaacaaagaagcttccattttctaacgcgccagaggatgataggaaccttcctgacatccatttaggcctctacaatgacatagttgtgtttgatcatgttgaaaagaaaacacatgttatacattgggtgagggtagattgccatgagtcagttgacgaagcgtatgaggacgggaagaatcagctggaagctttgttatcaagattacatagtgttaatgtgccaactcttactgctggttctgtaaaacttaacgttgggcaatttgggtcagcactacagaaatcatcaatgtcaagggaggactataagaaagctgttgttcaagcaaaagagcacattctagctggtgacatttttcaagtagtcttaagccagcgttttgagaggcggacatttgctgacccctttgaggtgtaccgtgcattgcgtattgtcaatcctagtccttatatggcctatctacaggctcgtggttgtattctggtagcatcaagtcctgaaattcttacccgggtggaaaagaggacaattgtcaacaggccacttgctggaacaattagaagaggaaaatcgaaagcagaagacaaagttttagaacaactgctgttgagtgatggaaagcagtgtgctgagcatattatgttagtagatcttggacggaatgatgttggaaaggtgtccaaaccaggttcagtaaaggtggagaaactgatgaacgttgaacgatattcacatgtcatgcacattagctcaacagttactggagagttgcgtgatgatctgacttgttgggatgctcttcgagcagcattgcccgttggaacagttagtggtgcaccaaaggtgagagcgatggagctgattgaccagatggaagggaagatgcgtgggccgtacagtggtggctttggaggggtttctttccgtggagacatggacatcgcacttgctctccgtaccatcgtcttccccacgggatctcgcttcgacaccatgtactcctacactgacaagaatgctcgtcaggagtgggtggctcaccttcaggctggagctgggatcgtcgctgacagcaagcctgacgatgagcatcaggagtgcttgaacaaggctgctggccttgctcgtgccatcgatcttgccgagtctacattcgtagatgagtagatcatccagcttaggttttcagataaaaaaagatcacccagtttaggacagctttgttttatgttctgttgctttctagtagagcagaaaccattccggcccttgtgctgtaggatttcgctgctttggattaaaccatcgtaataaattcaataaatgtatagcagatggaatgtc

SEQ ID NO: 25256 - DNA, 335 bp, Oryza sativa
  Clone ID: PAT_MRT4530_30160C.1
atacaaatattttttaaaacagaactaaatgaagctatattttattaaaatcagatcaaaaaagcatttaattcaataacaatatattaattcaatggtaaaaaaatgaaaatagaaataatactagtaaaacagtaatcagcaatgccaaaataaaaaaaacaggggatatattatatgttcagcaaaacgcatccataaaatcaacaaaaaactccataaaaaaacctctatacaaaattttgcaaaaaactacaaaaaacagaactcgcccaaagcaaataagccctgaatttgcttaaacaatgtcaactaaaaatttaaaattaggtcaa

SEQ ID NO: 25257 - DNA, 1545 bp, Oryza sativa
  Clone ID: PAT_MRT4530_30161C.1
atgcttcgcgccgccgcccgcgcgctcaccgtcagctccctcaacccaaaggtgctcgcgctggcggatcaccacctcggcggactcgtcgcccgccgcgcgcagctggtgacagtaacggttaatatccttatagtagagaggaaaaaaattttgcaagctgacacgagcatgcaacaagagctagacgctaatccagcttcacatcctttcagtgaggttcttgcattgtgtaatcatccccatctcctagaccggagtgaggccagcttcatgttcagctctgatgcgataacgagggcacgggagattgtaggcttcattcctggaaaaacaactggaggatacagtcactgtcaggcaaattcaattgtttcagaattcagagcaaatgctgacaaatatgggaatgagctttcatcaaacttgactatttttgacaggggtattgaagggttgcgtgatgcaattgctgctggaatagcttctcgcgatggtttaccgtcgtattcggaggacattttcctgacagatggagcagctgcaccggttcatatgatgatgcacttgttgatacgtggcaagaaggacggcatcctttgcccaattccatcacactctttgtacacagattctatggttcttcgtggcgcaactcttgtaccgtattaccttgatgaatccagaggttggagtgtgaacatttcagatctgaagaaacagttggatggtgcccgggcaaagggcattgatgtgaggggacttgtggtggtaaatccgggaaaccctactgggcaggttcttgtggaggaaaaccagtgtgaaatagtggagctctgcaagaatgaatgccttgttctcctagcagatgaggtttaccaagaaaacatttacacggatcagaagaaatttaactccttcaagaaggtagcacggtccataggctatggggaaggggatatatctttagtatcattccactcagtatctaatggatactacggagaatgcgggagaagagggggttacatggaggtcactggcttcagctcggaagtaaggggagaagtatacaaagttgcatccctaagcgcatgctccaacatatctggccagatccttatgagcctagtcatgaacccaccaaaggttggagatgagtcatacccctcttatcgtgcagaaagagacagcatactatcatctttgtcttgctgtgcagaggccatggtgtccacattcaacagcatggaagggatgacttgcaacaaggctgaaggtggaatatctgtgttccctagtgttcggctgccgccacgggcaattgaagctgctgaggcgatgaacacagagccggatgtgttctatgctctccgtcttctcgaaagcactgggattgttgttgtgcctggctcagtgtttggacaagtacctggaacatggcatttcagatgcacaattctgccacaggaagagaagacacggcagattatctcccgctttaatgtgttccatgaagcatttatggaagaattccgcagctaa

SEQ ID NO: 25258 - DNA, 746 bp, Oryza sativa
  unsure (1)..(746): unsure at all n locations
  Clone ID: PAT_MRT4530_30162C.1
taatctctcgtcatctctctctctctctctctactcgtactactactcatctctcatcgtactcgtacntcgtcgtcgtcatcntcgtcgtcgtcantcatcagtcgtcatcgtcatacttcaagttgcgtcagtcctcgactctctgtcacttcatcatcatcattctctgcagctccccattatcgtcgtatgttcctcttcattcttgctctcgctcctcacgtcgtgtcatntnatccgcatacgctcagcttatcagctcgtcttncccagagtaagtncatcatgtctcagctaggtctgtgcgtttgcgtccgtccctgggttccanctcgcacatctcgtcgatcctcatcatcatttagtcgtcgttatcgtcgtcatnntcctccgttcntatcatgtattcgtgtcgttgcactgttagcaattctgtcctttcgttgacccataacggttctcgcgcgctctctcanccgtcgtgttgcgaatcctcccattacttcgttgtcatcaccttatnagtatgacgggttataatacgccccgcttgtggccttaataatgggtnctaagctgtttcctgtgtgaaatcgttttctcgtctcacatttccacctacctaattacccgaaacttacttgttaaccctggggtgcctctgatgactaccccataatgctccccatgncttttccctggaaccgtttccctgtattatgccctcgaaggttgttggcttc

SEQ ID NO: 25259 - DNA, 246 bp, Oryza sativa
  Clone ID: PAT_MRT4530_30163C.1
ggttgatatagttaacaagcaatgggcacaccagggccgggtgaatttaataagtcgtcgcgtttaaacacaaccgggaaaaacttaaacgcactggtcgagctaacacagggcaggggggaggcctacacaagctccaacgcaaaatcaactgaccaagcgagagtgctgaatgataacaacagtgaccaacattgagaacaaaagcatcgccttagaggcgcaccacatcctcacacaagaaaa

SEQ ID NO: 25260 - DNA, 732 bp, Oryza sativa
  Clone ID: PAT_MRT4530_30164C.1
atgtcggaggggttcgacgggacggagagcggcggcggtggaggaggagtagggaaggagcaggaccgattcctgtcgatggccaacatcggccgtatcatgcgccgggccgtgccggagaccatcaccaacatctcaccggccgcgacctgtgcctcgttgccgagctccgccagtttcacgttctacgtcgggaggtacgtcacagtttatccctaccaagatccacatattagccttagaatagggataagttctggatgggttgtgaacttcatcaagacatcagtgaatcaacccaaaactccgagaaatggacagaggaaggtccaaggagtccaccaactgaaggccaggccaggagggctcggcccagattttatctgtaaccgtatcaaataccaacaagcccttgcaaaagttaccaaggataaggaatgcattgctcgacattacaacaaaaaagtggtgcccaagtctttttctgaaggtgaacttgtttggaaattgattttgccgatagagactcgagataacaaattcggcaagtggtcaccgaattgggaaggaccgttccaaatccacaaggttgtgtccaagggggcttatatgttgcaaggatttgatggagaagtttatggacgagcactaaatggcaagtacttgaaaaaatattaccaagtgtttgggttaatgcatgatcggctgggtatgggtgttgccgatacatga

SEQ ID NO: 25261 - DNA, 204 bp, Oryza sativa
  unsure (1)..(204): unsure at all n locations
  Clone ID: PAT_MRT4530_30165C.1
tggtccttccgtggtacggtgcgtacaacgcgtgtaaactgtgtgttaataccgcgcgtccactgtcgagtccaggncgtcgtagtgcctaagggagttaaggagtataagtttncgagaggtactgcagcttttacttaattaatcttgaacctcgatgnanacacagtgaaccagttaaattaaaaaaaaaaaaaaaaaaaa

SEQ ID NO: 25262 - DNA, 206 bp, Oryza sativa
  Clone ID: PAT_MRT4530_30166C.1
gttgttgccagggggtgtgattaactcgttagtggggtttttttgttccatgatgggatctaatatgatgtgttcctatgttggttgaagcactagcatctagactggcaagatgctttctcggccagagaagcagcctagtctgacgatcaatcttgtcgcagctatggtcgctgtgctaatggaggcgatgtacctgagaagaa

SEQ ID NO: 25263 - DNA, 390 bp, Oryza sativa
  Clone ID: PAT_MRT4530_30167C.1
atggcagtggatctgccctccccgtgtgtccaagctctgcccgcgcccgcgccaaagctccgcccacgcccgcgcccgagagccgtcgccgcttccgagcaccgccgcgcccgcactcgagagtcgccgccgcgcccacgcccgagctccgccagcgcccgctctcgagattcgccgcctgctcccgagcggctaccgcccgcgcccgagctcgccaccacgcactccgtggagggagagagggagttggaagaggaagagaaaggggccggagcgccggtcgtatgcggcggtgtgaaccgcggcgacggaagccggcgctggttggggaggcgacgagctggcggaggtggagaagggacgggaggagagacggagaacggcagatag

SEQ ID NO: 25264 - DNA, 1451 bp, Oryza sativa
  Clone ID: PAT_MRT4530_30168C.1
gtcaagaaaatgttatgtatgttactgaatcacctttggcatgtataatatagatttttccatcacaataatcatttagttataatgctatataaactttattttctaatatagaaagataggagatataaatgccacatacaaaagccaaacagcacaaacctattaattctgtccctttttcctcatgaatggccaattcctagtgtaagtaactcaagttattctcagcaagtaagggtgagaagcacagctgacctacttctatacactatctatagtcagatttgaagccttccgtcagtgcaacaacctttgaagataactttgactgtagtttggaaacagcttgtctaatatcctcaagactatatcgatttgagaaatgtgtcagtacaatggctttgtttctaaaccattgggagtgctccattatctcagagagatgcatgtggccatgctcccgagcatgatcaacatcaatttggtcatctaggaaggttgcctcagttataaggacttttgctctcagggcatctgcatttcgtgggtcaagaataaaatcagactttgtgtcacctgtaaaggcaacttctggatatagtatagtatctgtaatctcagcgcctgattgcttcattttcattatttgattacccttcaagtgagcatactgttttttcaactttctccgaacagagtagatgacataaccctggctgggtatagcatggtgagtctcaaatggtctggcaacaaggtcattacgtatttcaaatgtctcccccaaatcaagcgcaaccaattccactttaaggtcgacttgactcattctacgatggatttgaagtagatcctcaacatcatccttgatacatggtggtacaaatacaacgggtggcttcaaattatagaggccacgagttgctatgtacattgggagaccaccgatgtggtcgaggtgggcgtgggtgatgaagaggtagtcctggctcacggcgaagagcggcccgcggccgatgtcgaaggcgacgttgagggacggcacggtgacgcaggtctcgtgcccgccgacggagaccccctcgatggcgtacccctccacctccacgcccttacggtgcacctgcgcgcgcgcccggcggtactcctcctcgtccgccatcgcccggtcgagcaccgacagcagcccgccgcccgctccacgccccccgccgccgccctcgccggtgcccgtggcgacggctgccttcttcgcggcgagcgtttggaactgggagcgggaggctggggcggacgacgacgcggggacgaggaggcggtgggtgaggcggagcgaggggagggagaggagggaggtggccgccatttccggcggcggaggcggaggcggagacgaacggtggcgacggcgtcgtggggttttctgggtttgccgcggcccctcgccc

SEQ ID NO: 25265 - DNA, 487 bp, Oryza sativa
  Clone ID: PAT_MRT4530_30169C.1
cgaaccctctcgactgcgtgcggcggcggcggcggcggaggaggaggaggaggagccatgggtgggccacggcgtggctgaacatcctgccgcacgaagcggtggaacgtctacaacttcgacaaccgcgagaaggtccgccgcgacgaggccgaggcggcccgggaggagcagctccagcgcgaggccgaccgccgccgcgagtcgggcctccgcctcgccgcgctccgccgcaaccgctgactgcagtccgccgacgcggtgcccctctctccccggccgcccacctacgccgcggatccggccgacccgtcccccgccgccgacgacttcgactgaggccacatcaaccttttctccggcgtcccctgcgtctccggcggtgctgccgacttcttgagtctcgcctacgccgacggtggtaggggcgccgccagggagcgggagccttccgcgaaccctaaccctaagaagcggaagaggaagg

SEQ ID NO: 25266 - DNA, 306 bp, Oryza sativa
  Clone ID: PAT_MRT4530_3016C.1
atgcggccgcgccgctcctcggcggcgcggcggctcggccgttccgccatcccgacgacttccggcgacgccgctagccttcagcccctagcgttgcattccatccatgcatccaggcgtgcaggccttcgccggtcgccgccgccgccctcgccgtcgctcgctctgctgtccttctccacgcctccacacctccggtgggcctccgccgggcgccggcccagcgacgagggtggcgacctcgtggagaagatcaaaatagagaagagcgaagatgccctcttccctcacggaaggtacagctaa

SEQ ID NO: 25267 - DNA, 1115 bp, Oryza sativa
  Clone ID: PAT_MRT4530_30170C.1
ctagtctagcagtgcctgtagagcggccgctcgcgatctagaaccggacgcgtgggcggacgcgtgggtctctcccggtcggcgaaccctctcgacggcggcggcggaggaggagccatgggaggccacggcgggctgaacatcctgccgcagaagcggtggaacgtctacaactttgacaaccgcgagaaggtccgccgcgacgaggccgaggcggcccgggaagagcagctccagcgcgaggccgtccgccgccgcgactccgacctccgcctcgccgcgctccgccgcaaccgcggcctccagtccgccgacgcggcgcccctccctccccggccgcccacctacgccgcggagcagtgccccgcggatccggccgacccgtcccccgccgccgacgactcagacggcggccacatcaacctcttctccgcccgcggcggcggcggtggtgcaaccgacttcgccgtgctcgcctccgccgacggtgggaggggcgccgccagggagcgggagcctcccgcgaaccctaaccctaagaagcggaagaggaaggaggaggaggtgagggcggtggggcccgacgaggagaagtacaggctcgggtatggcctcgccgggaagggcgtggcggcgccgtggtacatgtccaagccgtcggcttcatcctccatggagaggaaggatcgcgaggcgggagaagggagtgtggggaagaagaatggtgggaagaagagcattgaggagcttagggaggagaggaggaagagggaggccaaggagaaggagcgagagcgagcgctgctcggcgttccatcgaggaaggagaagtattcggaacggggacgatcgtcgagatgggcacggtgatgtggggatgcacttaatatatttgtgcaggctcttcgaaagatgttgatttgaagaacaatgtgaggattcacttagacccttgttagttttgggcgtacaaattgtgaattaatttgttgcagtgcagtgtaataaaaaattacaatgaaattataatgctggttgttgatgactctcaagttttgttgtatcgagaaataagttgaatggattaatgatatgcaattaaattttgtttgatc

SEQ ID NO: 25268 - DNA, 367 bp, Oryza sativa
  Clone ID: PAT_MRT4530_30171C.1
cccacacatacaaccagggtatttcctacaccgatggtttcaatggggagcaaacattttgcttggcaatctacaccatataatcttatgcaacgatgctaaaaactgcgtatatcacacgagcagtcagattatcctacacaaatcacatgtacaacctactccaatttactctgataattaataacacacctgaacaaaatcctgatctatacaaccactacaaaataaacgttctatattatgatgacaaatccttcactgtcaatcggactcatacgtctacctgcctttatttccaacctcaaactatttagcacgctactataaataatctgatgccccacaccaataacatatcctaacc

SEQ ID NO: 25269 - DNA, 714 bp, Oryza sativa
  unsure (1)..(714): unsure at all n locations
  Clone ID: PAT_MRT4530_30172C.1
tgcatcagaaagaggcccgtaccgattatgattttgagtcccccaangatttgacttcgatatcagcaatctctgcaaaaaggaataggtatcagagggcgaagtctgtaatgcttgccgagatggaggcgcacggcccggacggttattataccaacgggggcgctcactgaattgatgggcaccggaaatggatatcttcacaggttgttgtatttctacttacagagcaaacactcattgacaattgctggcctgaagcaaggacagttgtgacttgtgactcgtgaacacaattcaccagcatcatcaacatgacgtccctgtaacttcagtcaagcatccatggcattattttgcagttacactcacagcttaattacaaatgtaaaatatgtgcatgttttatgtgtactataatacgatgaagtggtggtggggtggtagtagtagtttggtaatagtagtaggggtgccttattttttgcagaggctttgctgtctcgtattagctttagctttaggcgtgtgcactccatcagcaatgtaaatggaaccaggttgggtcaggacagattcaggcgttgaaatgcttggggggtaaaagctggtgtactcataggtgtattctttctgtataaaacctgacttcgttggcaaaaaaaaaaaaaaaaaaaaagaaaacattagctttggatcaaaaaaaaaaaaaaa

SEQ ID NO: 25270 - DNA, 738 bp, Oryza sativa
  unsure (1)..(738): unsure at all n locations
  Clone ID: PAT_MRT4530_30173C.1
tttttattatttaactatcaattaaatatcttaggagggggtgacactcaaaacataaaatgaatcctcccaccaagatggcccaacaagcagaggtgtccacacgtggagctttattaccaacatactactatatattagtatttttttttttttgacatgcgcaactagggattttccatagagcacctgcttagaatgcggccattgcctctctttacaattcttcaaattgaaaagtgatatatagatgttctacagcttctacacagtaaaaaattctgcggtgctgccaaacgacaaaattctgcagcaacttataagtaatactaactagaagctgatcttattatacaaacaagcagaagctgtcttccaacaggttctccaacaaactagtagcagcttctgcacagctatgcagaagaatggtcccaaaggacacatcatatacaagctccaatagtatcactggtaacctcacgcagcacctgtggtataaaaggcggtgtagggataaaaagttgcagatacatcagcttcaaacacctttttgaactgcagtgacttgagctggacagcaaagaaaccaactgcgtccatataaaaaacaaatcacctcctccccaaaactattcctgactggagcctctaaccaatgattacctcacggtcaaaggccttccacggaggatgcnccatcatggctgccaccctccntanccccgactacccatc

SEQ ID NO: 25271 - DNA, 543 bp, Oryza sativa
  Clone ID: PAT_MRT4530_30174C.1
cgagcccgccggcgagcgggcgaggtccgggcccgcccgcgggccaagggagatcccgtgcaagcacaggttccacgaccgctgcatcctgccccgtgtgcaggtaccagctgcccacggacgacgagcccaccagccggcaacgtcgtcgttcagccgagggcggcgacgagctcattggcaatgcacgcggcggcggcggcgatggtgatggcgacggaggaagcagtggcaggaggcgctggctctcgtggccttttggcgggttattctcgcacagatcgagcaggaggtcctcctcgtcgtgacggcaaaatgcagcaaacaatgtgattagttcagttgtctagttgagtagttgtatgtccctgcatcagtgcattcttgtatagttggatagctgcatttgttctttggtcgaaacttgaaactgtaatttttgggtggttaaggtgagcatctgtgataaacattttgaaacaccagtttaagcgagacattagttaagtatccattcggtactaaaaaaaaaaaaaaaaaaaa

SEQ ID NO: 25272 - DNA, 276 bp, Oryza sativa
  Clone ID: PAT_MRT4530_30175C.1
aaccatgcctactaagaggttagagcacaacaccatatctcttgcctcctcatcaaaacatcaaccaaaatacaaggtacacctacagaggaatcccccgatctatgcttatacacaactccccgcacgccagactaaaccctacaattacacaccgcaccctccaacattaccagcaccccctacacacactcacactatagcgtagagacaccatgggcatagaacctacctagctgaacataatgatacgctcacaacatcacacaacatacg

SEQ ID NO: 25273 - DNA, 949 bp, Oryza sativa
  Clone ID: PAT_MRT4530_30176C.1
atttttttcgaaaaatttgtcaaatggaaatatgatataattttagtgtaattatatttaaggaaaaagtacgaattaccaccccgaactatcgcggttgtccgaattacccccctgaaccacaaaaccggacattcttcacctccaactatgcaaaccggacgaattacccccctcgaaccaattcagagcggttttgtccaacgtggcgcacacgtggcaatccggtcagctcgcggggacggcgtgggggcggcgaggactgcgacggcggaggcagtggcgtcggcggaggcagcgagagtggggaggcgagcggcggggctgggcggcagaggaggcgagcggcggcgggagctcgcgctgctcgtggaggaggcaaggcggcggcggcggggtgcggcggaggaggcggcggcactagaggggagaaggggggggggccagagggttaggggggaagacggagggaagggggcagggaggggagagggagagggggcggagggaaagtacagggaggggcgggaataagggggcggaaagaaaagagaaggagggggaaaaacaaaaggcaggaggcggggggcgaagcggagggaacgtcgcagcggataggagagaaacgaggaacagagaaaacaaaggaaggggaggccctcggcggagaacgcgagggggggggacgggagctgccacacctctccccttacacatatttggacggcgagcgccgcgcctctcccctcccccatctttcgtcggccgatgcctcgcctcgccgccggtacaccccgccgccgctcgcctctattaaaaacgctgactggattgccacgtgtgcgccacgttggacaaaaccgctctaaattgattcgaggggggtaattcgtccggtttgcatagttgagggtgaagaatgtccggttttgtggttcagaggggtaat

SEQ ID NO: 25274 - DNA, 329 bp, Oryza sativa
  Clone ID: PAT_MRT4530_30177C.1
ggggtttgtctggccaccccgcgtaggtatgtgcgatacgagatgtgtcgtcacacgtgtgtgacccacactggtgtgacctggagtgtgtgtgatgccctgcgagcctgtgtctgtgtgtggcaatcgataaagaatttatgcaagctgggagcagccacagtggtgtgtgcacagtgaactgtatggtgtatgtagaagctgttggtgcctaagtgggttgtacaatgttggtgattagaccccttatttggaccacaatctggttggaacaagccctgcgcacaaattgaccccttcttttggtttaaaaaaaaaaaaaaaaaaaa

SEQ ID NO: 25275 - DNA, 411 bp, Oryza sativa
  Clone ID: PAT_MRT4530_30178C.1
atggaggaggagatggtggcggtggtgatgagctgcgagtgctgcgggctggaggaggagtgcacgggggagtacgtgggcggcgtgagggcgtacttcggggggaggtggctgtgcgggctgtgctcggaggcggtgaagtacgaggccgggaagagctcgccgcgggcgcccgtcgacgtggaggaggccgtgcgcgcgcacatggccttctgccgcatgctcaagcgcggcggccccgccgagcgcgtcgccgagggcatgtgccagatgctgcgcaccgcctcctggaagcagcggcggcgcgcctccggatcctcctcgtcgtcgtcgtcgccgtcgccgcgagccgcgcccgagcgccaccaccaccaccgcgcgccgtcgacgctctcggtccagctcatctga

SEQ ID NO: 25276 - DNA, 456 bp, Oryza sativa
  Clone ID: PAT_MRT4530_30179C.1
ccgaagccaaaaaagttcaaaccgatggccacggccctttataattaacaaaatggcggccgcaaaaaaccctgaccaaggactttatacagggacaaacttttttccacccttgcatagaacaaaaagcaatggatttttaaaacacaatcacattctccgttgtttgggggggccgggctaacaaaggaaaaaaccgagttatcaaaataaacattccctggaacctaaaggccggccccagttggtttaaagcagctaaaacccctgaactaccggtttaataagggccatgaaatttttgctcggggaaatcgaatcttaggaggggaaaagatatccataaacctcactttcaacggttatgaccccccgagaaaaattagcaggtactagggggtcatatgttggcagggggatgaatcgagggcaatactttttcttcaaaacgttttc

SEQ ID NO: 25277 - DNA, 204 bp, Oryza sativa
  Clone ID: PAT_MRT4530_3017C.1
atgattaacctgggccggcctctagattatgctaacattttgaacaagtggatgtactctgtgcctatcaaaacaagtaattcgatcaacattatccattttaacgagtgcaagcggcgctacccggaatccggatgcgcgcaggtagcttgcaacaccgaaaaggccacgtacatgcacgtgatgagctccgtttcccccata

SEQ ID NO: 25278 - DNA, 207 bp, Oryza sativa
  Clone ID: PAT_MRT4530_30180C.1
atggcgttgggtggagaggacgaaggtgtttttgagatctcggggtgggaggaggaagaagtggggggagagatctgggtttcggacgcggtgccaagagccaaggcatgcccaggggacctccgtggtcccttcgggtgcagtaggcacatcatagagtggctagaggacgacgggcgacgagctcctgaaaagccgtggccatga

SEQ ID NO: 25279 - DNA, 381 bp, Oryza sativa
  Clone ID: PAT_MRT4530_30181C.1
atgagccgggtgtgcgtcaccggagccgccggctacattgcgacatggctcgtcaagaagctcctcggcagaggctgcgtcgtccatgcaaccctgcgagatctcggggatgagaagaagacggcgctgctgaggaggatgcccggcgcggcggagcggctggtgctgttcgaggcggacatgtacgacgccgccaccttcgagcccgccatcgccggctgcgagttcgtcttcctcatcgccaccccgctgcagcacgaccccagcagcaccaagtatgcaggaactgacggcatgcgtcctagattcctaggacaacttgttactgttcatgcgagtaatcatgtaactagcatgaagtacttacatgaacagtcatga

SEQ ID NO: 25280 - DNA, 442 bp, Oryza sativa
  Clone ID: PAT_MRT4530_30182C.1
ggcgggacttgtcttgttggccaactcacggggaaaaaaaagaacaggaagcaaaggaaaggaaggaaaaaagctgtcccaaatggggaatcccaaaagccgaaaaaatatgggacaaaaaaaatccgccaaagaggggggaaacggaagggagaaaagggaagggggaaaaaacccttcatgggaaaccccaaatcctttcggtaaaagggccggggggccaaagaaaccctgggcccagagcactgccccatcggaaacccccaggagcacaccaggtggggctggaatggcaaccctgccctgagaggggccgcccaacccaagcaaaacaccaggggaaaccctcaagggggcaagctaaagagggggggggatcgacggagacccacaaaggaaacacccccccttcgagaacacgggacccaattaaaggggggga

SEQ ID NO: 25281 - DNA, 432 bp, Oryza sativa
  Clone ID: PAT_MRT4530_30183C.1
atgaggggcagcaggatgagcctggtcggggcagcgatgctggcgcagctctacgtggtcgcctcctttcaaggcgcctctggggctaccagcgatggccctccctccagcagtggggcgaggactcccacctccggtgggagccctggtggtagtggtacaaggagctcagcagcatctacaagctctgcaagagccggaagcacccctgcaggagtgcgggggagccccgcgggagctggtggtagccccggcggtggaagcggaagcacccctgtaggaggagggaggagctttgcgggaggtgggagtgccgacgacggcgacgatggaactgggatctcaagcagtgggggaaggatgttaagtagatcgtatgatgttgagcactttttcatttacttcatgcttgttgttttagctgcattttag

SEQ ID NO: 25282 - DNA, 159 bp, Oryza sativa
  unsure (1)..(159): unsure at all n locations
  Clone ID: PAT_MRT4530_30184C.1
acattcacacggattagagacaggttaatgtgagacgtttttttntccatccatgcacagtgctttatatgcaacaccatcttgaataatacgcaaacgaattacaactaacaaaattagactttgttgtatacacttgacaccttcctgggtattttt

SEQ ID NO: 25283 - DNA, 246 bp, Oryza sativa
  Clone ID: PAT_MRT4530_30185C.1
tcgtctgcaaaaaccaagggaaccgaacgggggggcattttaaaaactatttcgttcaatgccccaacggaggagcaatatgaggatgatatatggatataactcgcagatcgatggtgcggctgtgcggtgagctgcagcaagcattctcggcgacacgacgggcggcagaccagacgaccgctgggaacagcggaggctcaagctcaataacgggatggcgagcggcaagctgaagaggaagac

SEQ ID NO: 25284 - DNA, 328 bp, Oryza sativa
  unsure (1)..(328): unsure at all n locations
  Clone ID: PAT_MRT4530_30186C.1
ccacagtcggagtgggtgatctccgagataggcaagcagcctatctgtgtttatattgtactgagcgaagtccttggacggttggcgtcccaaatagctgttgtgcttcagggcaaggacaagccaacttatgcaccacatgtggaaaacagagacatgtgcgatgtgcttaatgcaaaagataactgaaattgtaactgtatttattgttgtacacatctttactattgtgcttctatgtcttaattctgttaagttttcacactagaaggtatgtcttctcgttggtgaggtgataaagctactttttcattttattcattggttn

SEQ ID NO: 25285 - DNA, 771 bp, Oryza sativa
  Clone ID: PAT_MRT4530_30187C.1
caccggaattcgcaccccctcgcgctccggtgagttcaaccgctatcgccgccttcggccatgaatgccgggcgtcgtggttcatctccctctctctaatctctctctcttccttccttagggcaccccgaaacccgtccgccggttgccgtcgtcctcccgtggcttgcagccgccgttcgccgtcgtcttcctccgcgccggccaccctcgtgccgccgccttcgcgtcgcctttgcgccgtcgcctccgccgcctgatgccgtcgccggcaacgcgttcgcgcgcgcacgccgtcgccatcaccgcggccggtaggccggccttgagccaagccgagccgggtcgtcgccgcccgtccgatcgaccccgagggcgatctaggccgtttggactagagattggactagggattgcttagccatgcttagttcaactagtgcacaattgggtagtactcagtcttgctctatttttcccaaccccagagtacgagtatgtgtcagatgcaggtttctctgaggagtaggcttcgtccgtgccgtcaaggatgcctgtggagtggtgttccccctgcagttctagtcaaggcttagctcctgttttctttctttctttccgctgcatctacaattgtattcgggaatttctgggcgtgacatctatccgcctcaacagcaagtccaatttgtcttctattgcctagagaaggtaggtggacggatgcggaggaactcggcgagtttagagtgttgtgggggtggtggtgga

SEQ ID NO: 25286 - DNA, 572 bp, Oryza sativa
  Clone ID: PAT_MRT4530_30188C.1
tcacgcccagaaattcccgaatagaattataaatgcagcggaaaaaagaaagacaacaggagctaagccttgactagaactgcagtgggaacaccactccacaggcatcctcgacggcacggacgaagcctactccggtcagcggctcgggagagggaggaaaggggcgccggcacgcgggacccaccggtcagcgactcaagggggagggcggttcaccgcggaccgggaccacgcgggtggtccaccgccggtccacaggaccgacggcccagatcgcccttggggtcgatcggacgggcggcggcgacccggctcggcttggctcaagctcggcctaccggccgcggcgaagacgacagcgcgcacgcgcgaacgcgttgccggcgacggcaaccggcggcggacgctacggcgcaaaggcgacgcgaaggcggcggcgcgagggtggccggcgcagaggaagactacggcgaacgtcgacggcaagccacggtaggacgacagcaaccggcggacgggtttcggggtgccctaaggaaggaagagagagagattatagagagggagat

SEQ ID NO: 25287 - DNA, 357 bp, Oryza sativa
  Clone ID: PAT_MRT4530_30189C.1
atgagctcgtcggtggttgtgagcgcgagcggcagcggcagcggcggcggaggaggaggaggaggtggcggcgccggaggtggaggaggaggtgggccgtgcggggcgtgcaagttcttgcggcggaagtgcgtgcaggggtgcatcttcgcgccctacttcgactcggaggccggggcggcgcacttcgcggcggtgcacaaggtgttcggcgccagcaacgtgtccaagctgctgcagcagatcccggcgcaccgccgcctcgacgccgtcgtcaccatctgctacgaggcccaggcccgcctccgcgaccccgtctacggctgcgtcgcccacatcttccacctccaacaccag

SEQ ID NO: 25288 - DNA, 291 bp, Oryza sativa
  Clone ID: PAT_MRT4530_3018C.1
atggctacggacgaagaggtggggcgcggcggcagcgacggcggcttcttacccacggtcgtcgtcgccgccgcttggcccgccgccacggagaccgtcgtcgtcctccgatctgcgtcgccgctcctcatcgtcatccgctccaagccatcacccgcctcctcaacccctccgtcgctggccgtcgcccttcgtgttgaggggagaggctgggaaaaaggcgaagggtccagaccaacacagtcaaggaacagcggaagggacatgcagcacgatggtggagatgactag

SEQ ID NO: 25289 - DNA, 381 bp, Oryza sativa
  Clone ID: PAT_MRT4530_30190C.1
atggagaggggttgcaacggcaatggcggcggcggcggcggcgtgaaggtgaccttcatcgagacgcagttcgtcacctccgacgccgcgggcttcaagtcgctcgtgcagcgcctcaccggcaacgacgcagccgtgccggcggcgccgccacagaggccgcggccgtgccgtgcagacgggtggaggggagccggcggcgcgagcgcgacggtggtgaagcgggaagccgtgccgccgccggtggcgccgtgggtggatgagatgatgatgctgtacgagacgtgcgacctcgccgagatgttgcgcgtcgacgtcgtcggcgcgagcggcggaggacggtgccacggcggcggcggatacggtggttttccatgctga

SEQ ID NO: 25290 - DNA, 298 bp, Oryza sativa
  Clone ID: PAT_MRT4530_30191C.1
attagtatctgacttccggcttaaatgtcaggatctcacgtttagtgttcataactaccttcactttccatcaaaagaatcctgtttttgtctcactctacttgcttttttatatctggtcctgcaacagtgaatggccggcgtcgccacccccggcgcctggcgcacccacgactggcggaaggccgttgtctagccacgccaccttgctcggcaccctcctcgtcaaaggagttctttccccgacctcccgcgccatttgccttggagccgggcaggaggccctcgccctgcggga

SEQ ID NO: 25291 - DNA, 144 bp, Oryza sativa
  Clone ID: PAT_MRT4530_30192C.1
atggagatgcagatagactggcacatgaagccagaaggtggcacgaagcagcctgaggccgagagctccgtgtcctggggcacttgtcagatcgaactaagctctgatgctccattaggagggactaatcactgtgcagcatga

SEQ ID NO: 25292 - DNA, 495 bp, Oryza sativa
  Clone ID: PAT_MRT4530_30193C.1
atgaatttaatcttcgaggatacgaggttcagcggatccagtctccaggtgatgggtacgattccacaggatggcgagtggagcataattggaggtactggagaatttgttgctgcacagggtatcgtcgagcataatgtaatccaggaagccggtggagcttggacttatgaacttaaaatccatgcattctacactcccatgcaatcctcagggccgtcgtcgcggctgccgccgccgccggcggtgtcgtgcgagaggaggtggaaccacgcagggctcctctgcaccgctgcccctgtgcgcacgtcggaagtcttcagggtggcaccagaagctcctgcggcggggaagcgggtagacgccggcagagaaggggaactgaacaagagggggcgccggagagtattgccgccggcggaagggaacgtgatgcacaagcgccggcggcagaaggagtcgctctctccacctccgctcaattgcgatggatga

SEQ ID NO: 25293 - DNA, 124 bp, Oryza sativa
  Clone ID: PAT_MRT4530_30194C.1
atggagaatgccagaaaccccaaatcggctagccaccaccgactccaagttggcagtggtgctcttcgtctagagtcacaaaaatggaacgagaaggatgctcctcaaactcttctcccggcag

SEQ ID NO: 25294 - DNA, 248 bp, Oryza sativa
  unsure (1)..(248): unsure at all n locations
  Clone ID: PAT_MRT4530_30195C.1
cccacgcgtgcggtacgcactattagaagcactctggtattctcacatggcgactgctaccgaagaggatgcctctgccgctgctgacgacaaccaggcgcagccgctgtcgcacccagcgatggtcgacgaggcgaacgacgctntggacgcaccacaaccggacgaggcaccgtaggctgcggaggaccacgagaagaacgccgacggtcagaacgagtacgagaaggccaagaaggagaagaaac

SEQ ID NO: 25295 - DNA, 387 bp, Oryza sativa
  Clone ID: PAT_MRT4530_30196C.1
tattttttggaaaaggaaaaacttatggagcaacgcaacgagtgggaaatgcttccgagtactgatgtctatacttgagcacgatgaaccaatgacatgctatagcttacattaagtctgcaagaagaatgcagaacgatcgcataggtaatactagatcacgaaacacgcatggcaagcaaaggattcgatggcaagaataatagtgctatagactgggaggcaacaaaaggcgcctgctctaagaagcccagactaacacaaggagcccagatcgatgcctaagccaggagaagacagttggaagaaccatcttctttagagtcaaggcacaatacctgcccacaaacccaaaagatgcctcaagctacaacattggcatccatc

SEQ ID NO: 25296 - DNA, 240 bp, Oryza sativa
  unsure (1)..(240): unsure at all n locations
  Clone ID: PAT_MRT4530_30197C.1
cggacgcgtgggtggaaaaatgaggtcaaattttcttggcaccaaattcgttgtctacaatagacagcccccgtacaatggtgggagcctcatgtcatgtcancatggcagccggcgaatctcttctaggagggtttccccaaagttacccaccggtagctacccaattgctcatgtgaaatatgagttgaacgttcttggcactatggggccgatgcgtattctatgcaccatgcattc

SEQ ID NO: 25297 - DNA, 228 bp, Oryza sativa
  Clone ID: PAT_MRT4530_30198C.1
actaacaaggcgatatgtaccattacatgatgattaacatatgagcctgtggctccagggaattaaggtagagtagcaggggcagacggatgatctatgactccaatcctccatggatgggaatgggaccaggtggccttgcagaactttgagtacagatagaggcacgccaactacaggaacaccggcatgggacagtctcaggatatgaagatctggaggagtgaa

SEQ ID NO: 25298 - DNA, 2577 bp, Oryza sativa
  Clone ID: PAT_MRT4530_30199C.1
tcattcacaagcttcttcccaatcatccacttcgacttcaggctgcatcttactaaccggtggcgcagtacttggccctgcgctggatacagcatcggtgcgaggagcaggcttactctcctcgactggcctggagcttgtggccgcatcggactccagggcgttccagcggttcgatgtccccatgacttgggcgacagtgtcaccgccacgcctccatactgatcctggagcttgaccaagcacacctgtccagtctcctgaggatggatcaggctcagaggcagtggccttcttccatggattggcactgctcttggtagccgccactccatctttctgccctgcaacccagacattgcctggctgagcgctgctgcttggcaaaaacacagcagcaccctggtaagcagaaccataatccagccgcctcagagctgtcgctgctctagctggatcattgaagacagccacagcattcttgtcattcagccaaaccaattcacactccccgccaaaccttaaaaccagagcgctaacatcagcatcccggggcaggtccagcattgcaacaacaagccttgggtccatgtccaccaagggatcaaagaaaggatgggaagcagcaacaaatacacctggcttggaacccaggatgcgagcaggcgcctttgacttcggtgtgggatggatagtaatgaaacgtttgggttcccaaccagcagcctgaacagaaagcttccacctgtcggcaatgaccctgatagcatctctcttatcctttgtcatgtgacagaagacatggaccttgaggttgcctgaagaattgcctcttgtcttcccaagtacaaggaacttgcacctctcctctatggccatcacccattttggctcacggcggaaaaggtcagaaagcaaatccgatgcatttgagttctcaccaaaatgcaatgcatccaaattgggtggagtgatgtcaaatgcttcagcaaggaccctcttcctctccatcttggcacagtcctcatcacaagagagcttcctctgcccaagtggtaccctcctcccatcagattccaccggctggagtggcattggcagcttctgtatgatggatacttcaaacatattatcgccattggcggttcccccagcactgtccacatgaagctctaccaccagtacttgagctagcatctccatttgcaggtggtggatcacaaggggaaggatggcaagacctgttgcaagcgtgcattccacattgccggttctttccacaaggttggttgcataaggcttgttgcaacggaattcttcctccaagaccttgtagcactccaccatctggcctgatgaaccacagcggcacctctgttccacacgaaccacacaaggtgggcagtctccctcatggcatgtgaccttgcacctatgcacaccacaaggcagcttcttgtcgcacaccttgtcacaggttgggatcgggtccaagcagcttgctctcttctccagcagccttgtcttcccacaatggcatgctgtgaccttccctggcataagttcgcactccccgcatggccctgggtggcaaatgtcttggcaggcatgatttccgcacgacagcatatggctgcaggcctcactgcatgagaacactccatccttctcagataaattccctttcagttccatctctccacacagcaatgtctctgtcttcttcccacagaaacaccgggcagaaatgagaacattacagtccccgcatggtccagtgtggcagaccttctcgcagcggtgcctccggcaggggagcagccgatcacaccgctgcccgcacgtcacaggcgttgtccggtccgcacaccgccgcacaatggtctgcttgccgcatgggcacagccggtccggcgcgaacgctttgcaaggcgggcagggccctgggtggcactgcaggacgcacacatgggggcacctggtggctgcagcgtcgtcggccttcacggcagggtcagccttctcgaggggcttggagcagggctcgccgcaggagtgcggcgtgaggaagagatcgttgggtggctcgcggcggcgcccgcagaagcaggtgtaggcgagctcgcgcgcggggacggcgtgcacggactggcacccggggcagcgccaggaggagtccgggtcggacgcgtcggcggcggacgccggggagcgcgcccacttgcggatgcaggggaggtggaagatggagaagcagctgccgcaggaccacaccggcgccgaccgccgcaccatgtcgtagcagatcatgcactccaccgcccccctcgccagcttgtcctggatctcctgcaccagctgcggcaccgccccatctccccccgccgccgccttcgtcgccgccacacgcgcaggcgcaggcgcggcggcacgggtcggagcgggcgccgcatgctgctgccgctgctgctgctgcggcggcggcgggggcggcgcagcggaaggcctctcctgcggcgggccgcggcgctggccgccacccccatgattcctccggcgcgggcgacgttgctgctg

SEQ ID NO: 25299 - DNA, 1338 bp, Oryza sativa
  Clone ID: PAT_MRT4530_3019C.1
atgggcgtccacgtcttcaccgaccggcttgccttcgccgccaccgactgctgtctccatctacatggctggcctattatgccgtcgttgttgggcgtctacgacttcaccgccggcctgcctccgtcgccgccgactggtgtcctcgtctatacggttggttggtcacaccaccgttcatgggcgttcacgtcttcaccgaccggcttgccttcgctgccgccgactggtgtctccgtctacacggctggcgtattatgccgccgttgttgggcgtctatgacttcatcgccggcctgcctctatcaccgccgactggtgtcctcgcctatacggttggttggtcacaccatcgtccatgggcgtccacgtcttctgcaaccggcttgccttcgttgccgccgattggtatctccacctatacggttggcctattatactgccgttgttgggcgtctacgacttcaccaccagcttgccttcgccgccgtcgactggtgtcctcgcctacacagttggttggtcacaccaccgttgatgggcatttatttacctacatcgctggttgcctcagccgcttacacggaatggatcagtcagaatcaccaccggcttgccgtcgtcgccgccgactggtgtcctcacctatacggttgggtggtcacaccgccattgttgggcgtcgttgtcttcactgaccggccgctgactggtgtcttcgcctatacggttgggctggcctattatgccgccgttgttgggcgtccacgccttcaccgaccggccgcctcgtccgtcgccgactggtgttttcgcctatacgattggttggtcacaccaccgttattaagcgtctacgtcttcaccactggcttgccttcgccgccgccgactggtgtcttcgcctgcacggctggcctattatgccgccgttgttgggtgtctacgtcttcaccaccggtttgccttcgccaccgccggctggtgtgctcgccttcacggttggttggtcacaccactgttgttgggtgtctatgtcttcaccattggcttgcctttgtcgccaccgactggcgtctctgcctgcacgcctggcctatcatgccaccgttgttggacgtttacatcttcaccgaccggccgcctcgtatgatgccaactggtgctatcgtcttcacggctggccacgtcgccgccaccgctaataggcgtgatcatcttcaacacaagctatctatttcttctgccgacgagtttcttcacttaaatggctgcatgattctgccagtgttgattggccttatcgtcttcaccgccggtcgtctcatctgctgctga

SEQ ID NO: 25300 - DNA, 1404 bp, Oryza sativa
  Clone ID: PAT_MRT4530_301C.1
atggagatgggatttgatgagaaatttgcacttctgaggagcattgcggaggagtgcatatgcgaggatgagctacgcgtattactgaagaagaagcctaatcccatctgctgtgtttggtttgagccaacctccatgatgggcatagagcagggtattatgaagacaatctatgtcaacaaaatggttagagctgcctgtacagttaaaatattgatagcagattggtttccgcagcggaaccctagattcacctgtaacctaaacaaaatacaggctattatccgctacaatctctggtggtggaaccctgtgggcatgcaccttgacaaagtagagatcatatggttttctgatgaattgaatcatcacgctgtcgactactggccatttgctatggatgtttccagaaaatacaccatgaaaagaatggcaagttattgtaagtatgtggaaccatatgggccaggaatacttcctgctgcccagataatttacccttgcatgctggtttctgctgtattatgccacaagatttgcattaacttttcagctcactgtatcccgtatgtgttgcaggcagacatatggctattcagcatggatctgcgagacattgtcatgctaactagagattattgtgaagatacaaataggggaaacataccaactattttcctgcactgtatcctgattcagaccgtctgcattttctggttgttcgttatatgtttttggtgtgtccgggtgtgcgagcacgcacagatgactgtgctacctaatttactagaaaaccccgaattccagaatagaagaaatcctggacggactatcttcatgctagatgatgaggatgatatagaagaaaaaataagttgtgctttctgcccttcgagagtagtagcatgcaacccatgtttggagtatataaaatctgttgtccttccttggtttgggaagtttgaggtcgttcagaaggaagggaatggtagcaacaagacatattcaagcatgaaggaacttattgctgattatgaaagtggcgatcttgactcttttgatgtcaagttggcactgggaaaagcaataaatgacatattagagcttgtcagcgagtttttccgtagcaacgaggaagctcaagctcaaattgttccccacaggttacaggatgaaattggggcagatatccagaagatccaattgcagaacgaggagatgtctggtcatgtggcatccacctgtcagggcatctctgacctcactttcccctcactttcgccgacgaccgaagtggtgacgagcggggcggccgacgagaaaggagcagcgcacgtgcgcgggcgccggccgatgggaggagaggagcggtgcgcgtacacgggcggcggccggagaggatag

SEQ ID NO: 25301 - DNA, 486 bp, Oryza sativa
  Clone ID: PAT_MRT4530_30200C.1
gtggttttaaggatatcagatgcaaccaaccttgtggaaagaaccggcaatgtggaatgcacgcttgcaacaggtcttgccatccttccccttgtgatccaccacctgcaaatggagatgctagctcaagtactggtggtagagcttcatgtggacaggtatgtggtgccccaaggagggaatgtaagcacacttgcacagctccatgccacccatcatcaccttgcccagatttgagatgtgaattccctatgaccattgcctgctcttgtggccgtatcactgcaactgtgccatgcagtgctgggggaaccgccaatggcgataatatgtttgaagtatccatcatacagaagctgccaatgccactccagccggtggaatctgatgggaggagggtaccacttgggcagaggaagctcttttgtgatgaggactgtgcccagatggagaggaagagggtccttgctgaagcatttgacatca

SEQ ID NO: 25302 - DNA, 534 bp, Oryza sativa
  Clone ID: PAT_MRT4530_30201C.1
ttaagtttttctgttcaggctgctggttgggaacccggacgttttattactatccatgcgacaccgaagtcaaaggcgcctgctcgcatcctgggttccaagccaggtgtatttgttgctgcttcccatcctttctttgatcccttggtggacatggacccaaggcttgttgttgcaatgctggacctgccccgggatgctgatgttagcgctctggttttaaggtttggcggggagtgtgaattggtttggctgaatgacaagaatgctgtggctgtcttcaatgatccagctagagcagcgacagctctgaggcggctggattatggttctgcttaccagggtgctgctgtgtttttgccaagcagcagcgctcagccaggcaatgtctgggttgcagggcagaaagatggagtggcggctaccaagagcagtgccaatccatggaagaaggccactgcctctgagcctgatccatccctaggagactggacaggtgtgcttggtcaagcttcaggatcagtatggaggccg

SEQ ID NO: 25303 - DNA, 312 bp, Oryza sativa
  Clone ID: PAT_MRT4530_30202C.1
ggggggggggggggaaacagagggaccccacccgctttggggggggccaactaatgcctggggggggccaaaacggaaaaggggggcctgctgggggtgaagcgggaccagctaaagcctttgccccgccgggggttttaacccgcccccctggtggccccccaaatttcgagatcggggcctttaagggaaaaaatttttcctatagggggtgggtttaaaccttgggttattgatgggcattgcggggttcccccgcggaaattctgtaaccgggtcagatattccaaaaaagcctaaaataacggaaaa

SEQ ID NO: 25304 - DNA, 262 bp, Oryza sativa
  Clone ID: PAT_MRT4530_30203C.1
ccgaagggccacggtaaccgccgggcgccagctgcccgctcgaatggtgaccgggggttgaagccccagcagtcgcagcatcttcgccgccggccagtactaggctagctggcttgcctcatagctagtaggatcacacccgttgctgtgttgcatgcaaccgagatagtgatcaaacaataatgaataatgaaatgttttgaaaaccaaatagctggtgataaagtactatatatgattttgtgaaaaaaaaaaaaaaaaa

SEQ ID NO: 25305 - DNA, 182 bp, Oryza sativa
  Clone ID: PAT_MRT4530_30204C.1
ggtgagccaccttgcatgggaagaactgctatgattccgtgggccatggccacgtcgatgtggatcgctgaatggcttaccgcatatcgaggggagcaagcacgaagccttaagaataataggggagaagagctcggtgccttcactcctagatatcaacacagacctacccaggcttctca

SEQ ID NO: 25306 - DNA, 171 bp, Oryza sativa
  Clone ID: PAT_MRT4530_30205C.1
gcacgaggattcttttaactatgctactgaataagttgcagaaacctatttcgtgctccactgttcttgatcttattgtgaccttgatgatgcagcacagtctgcaccccaccagcagggatctaaactagccttgcacttatcttcatatgcataggcattcttaaacat

SEQ ID NO: 25307 - DNA, 477 bp, Oryza sativa
  Clone ID: PAT_MRT4530_30206C.1
ccaaatccacaaattaacacaaaaatttcacattgcagcacaaattctacaagttccacatcacagatcaagcacaaaaattttacatcacaaagattaagaggtgagacatcaaagatcgagcacaaaaagtttacatcacgaagattaagaggcgaggatggatttgttgctcccgagggagggcgtggatggccggcggcggatccgctctcccggggctcgcctgcgcagctctactccccactgcccctcccacacgccggtgctgctgagcaccgcaactgccccctcccccgtgccactcccaaggaccggtggcggtggatctgccctcccaaggctcgccggagctagatccgcacctcaccgctgagaaccgccgccaccctcttccccgtgccactgccgcacctccttcccccgccgccgcctccttccccacacagcggtggggagtgaagggaggctagcggc

SEQ ID NO: 25308 - DNA, 729 bp, Oryza sativa
  Clone ID: PAT_MRT4530_30207C.1
atgacaaggtggccgggattcggcggcgcagcgcctctccaccgctcagatccggcggcggtgcccctctcccgccctccgccgcccggatccggcggcacgcccctcttccaccgtaccccacgcgacggcgacgacggcgacgatgacgaggtggctgggatccggcggcacgacgcctctccaccactcagattcggcggtggcgcccctctcccgccctccgttgcccggatccagtggcgctgtacctcttccgccatccgccacgcgacgacgacgatgaggtggctgggatctagcagcgcggcgcctctccgcctctccccgcagcgcgatggcgatggcgacgacgagacaagctgtggcggcggtgacggctacgtcggcgacagcggcgacgatgacgagctgcggcggcagctagggcggccgagcggcggccgggcggcggcgaaggtggcctcgtgcggcagatccgggaggggaggtggcaaggcggtggcggcggcctcgcacggagggccgtgcccggtggaggcaggcgacggccgacacggagaccagtgcagcgacaggcggtggaggccgatggataggacgggtggcagcgcacccacgccccgccctatgtcaggcggcgtgagggcaggggatgtcccccgtgtcagatgggagacggtgctgggacccacctcggagcaagcagccatattgcttccggtctaa

SEQ ID NO: 25309 - DNA, 413 bp, Oryza sativa
  Clone ID: PAT_MRT4530_30208C.1
cgagccggccgggcgtcggcgaccaccaccactcgagctctaaatggcagccgccactagatctcgccaccatcaccgacgacggcgacctcaccgccgccggggatgaagcgccgccacctcccgcccgtcctcgtcctcctcctcctctcaatcctctccctctccttccgccgccgcctcctcgtgctgcagggccccccgtcgtcgtcgtcgtcgtcccgccaccccgtcggtgaccccctcctccgccgcctcgcggccgacgatggcgccggatccagccagatcctcgccgagggcgccgcgctgttcgccaacgcgtcgatctcgacgttccccagcctcgggaaccaccaccggctgctctacctccggatgccgtacgccttctccctgcacggcccgacgcg

SEQ ID NO: 25310 - DNA, 660 bp, Oryza sativa
  Clone ID: PAT_MRT4530_30209C.1
atgacgttctcagcggtggcggcggcggtggccctagacgactgcggcctgagcgtcagtgcaaggttctcggcaaggaggaggcagatcaggcagaggtggaccccggcggcggccctaggggtagcagctgcctgggagtacgggcgaaagaggatatcctcggcggcggtggtccaaatcttcacatctgacgggttcagccttagtcagagattggtcaccgatgactttgagtcacctgtgataggtgaaggcccattagagtcacaaatagaactcatcaaaattactctcgtccccatctccaacccccttcgccccgagccgagccgctgcctccaccccaactccatagccttcaccttccccttcgcctccctagcgccgccatctccgccccaactcccgctcacccgccggcgccgcctcgtcctccacctgcgcacacccaccggtgaccatttgctcccgatagaggtcgcctctatcaggtgcaaatggtggtctggcacaagtgacaacttacctgtgatgggtctcggcccatggcctcatctattacggcctccagttaaagccgtcacatgtaaggccatccgtgacgagacactctaccccgtcacagatgaaaagatctggcgcagtgactttgcgtga

SEQ ID NO: 25311 - DNA, 1254 bp, Oryza sativa
  Clone ID: PAT_MRT4530_3020C.1
atgggcgtccatgtcttcaccgaccggctggccttcgccgccgccgactggtgtttccgcctgcacggctggcctattatgccgccgctgttgggcgtcaacgacttcaccgccggcctgcctccgtcgccgccgattggtgcctccgcctacacgactggcctattatgccgccgctgttgggagtctacgacttcaccgccggcctgcctccgtcgccgccgattggtgcctccgcctacacggctggcctattatgccgccgctgttgggcgtctacgacttcaccgccggcctgcctccgtcgccgccgactggtgtcctcgcctacacggctggcctattatgccgccgctgttgggcgtctacgacttcaccgccggcctgcctccgtcgccgccgagtggtgcctccgcctacacggctggcctattatgccgccgctgttgggcgtctacgacttcaccgccggcctgcctccgtcgccgccgagtggtgcctccgcctacacggctggcctattatgccgccgctgttgggcgtctacgacttcaccgccggcctgcctccgtcgccgccgagtggtgcctccgcctacacggctggcctattatgccgccgctgttgggcgtttacgacttcaccgccggcctgcctccgtcgccgccgagtggtgcctccgcctacacggctggcctattatgccgccgctgttgggcgtttacgacttcaccgccggcctgcctccgtcgccgccgagtggtgcctccgcctacacggctggcctattatgccgccgctgttgggcgtctacgtcttcaccgaccggccgcctcgtccgccgccgactggtgcttccgcctgcacggctggcctattatgccgccgttgttgggcgtctacgtcttcaccgaccggccgcctcgtccgccgccgactggtgcttccgcctgcacggctggcctattatgccgccgttgttgggcgtttacgtcgtcaccgaccggccacctcgaccgccgccgactggtgttcccgcctgcacggctggcctattatgctgccgttgttgggcgtctgcgtcttcaccgaccggccgccgcatccgccgccgagtggtgtcatcgcctgcacggctggcctgttataacgccaactgatgctatcttcttcacgactggctacatcgctgtcactactaataggcatcagtatcttcaacacaagctgcctacatttgccatggctgcatga

SEQ ID NO: 25312 - DNA, 1569 bp, Oryza sativa
  Clone ID: PAT_MRT4530_30210C.1
atgccccgccgcgacgccgtctcctggaacgcgctcctgaccgcgctgtggcgggcgggccgcgacctgcccgccgcgcgcagcctcttcgacgatatgccctcccgcaacgtcatctcctggaactccatcatcgccggatgcctcgcccacggcgacctcgcggccgcctccgcctacttcgcgcgcgccccgcgccgcaacgtcgcctcgtggaacgccatgctcgccggcctcgtccggctcggcagcatggaggacgcgcggtcgctgttcgaccaaatgcccgagaggaacgtggtgtcgtacaccaccatggtggatgggctcgcgaggtgcggggaggtcgctagcgcgcgagagctgtttgacgcaatgcctacaaggaacttggtttcgtgggctgcaatgataagtgggtatgtcgacaacaacatgttggaagaggcaagaaaattgttcgaggcaatgccagagaagaatgttgtggcatgcactgcgatgatcacagggtattgcaaggagggcgatttgcagaacgccagaaggctgtttgatgggattcgtgccaaggatgtcatatcttggaacgccattatttctggatatgttcataatggacttggagaagaagcaacgaaactgtacatcataatgcttagagaaggtatcaaaccagatcaggcaacacttattgcactactgacagcatgttcttctcttgctctgctcagacaaggaagatcaacacatgctgttgtcatcaaagctatgttagaatcaagcatttctatttgtaatgctttgatgacaatgtatagcaagtgtggcaatgttgacgagtctgagttagtcttcatgagtctcaaaagccaggatattgtttcttggaacacaataattgccgcatatgcacaacatggcagatatcagaaagttattgctctgttccatgagatggaactgtgtggactgataccgaatgatattaccttccttagcatgttatcagcgtgtggacatgctggcagagtggatgaaagcttgaaactgtttgatcttatgttttccaaatatgcaatatctccaagagcagaacactatgcttgtattgtggatatattgagccgagcaggacagttggagaaagcatgtagttacataaaggaaatgccttctgaggctgagaagaatgtttggggcactctactttgtgcttctcagacacatggtaatgttcagttgggtgaacttgctgctaagatgcttgtcctatcagactttgaaagttcaggggcttatgtgatgctttcaaacatatatgctgctgctggcatgtggggtgaagtcaatcgagtaaggagccaaatgaaggaaaaaggtgtgaagaagcaacctggacatagctggacagagattgctgataaagttcatatgtttgttggtggtgatgcatcccatcctgagatggacatgatcttatccgagctgagaaaaattagctttcatatgcagatggtcactgataaaactcagatgatggaagagctagttcaagaatgtggttag

SEQ ID NO: 25313 - DNA, 869 bp, Oryza sativa
  Clone ID: PAT_MRT4530_30211C.1
atggttcaaagtggtggaaaagtgaaaggggaaatggatgaaatgggttctcctcggcgaggcaaggctaatggtagatattgtgctaaatttattccaaatcaaaattatcccttccccatcaggattgtcatgctatctgctctctccaagcccaatccaactatcgacgcaggccaatatcaacaaggtccttacatgcaatactcccttattgattccttcctcgcttctgaacaaaaaggactcagaggtgatacattgagtgcggcaaatttggttctctatgtgtctattcattttctaagtaagctaacagtacaaccatataaagggggatctgtggtcggcctgaggatggaggataatatgatgtacccaatcaaggaccaagaaaccatgctgcatgtaacacaggggagtgcagaaatcctgttattttcactcaatctgggttacaggattgaaattcaagtatacaagattgcatataactgaaggattggagtgatcaatgtctagaattcaagcgtgcaagacctgctgagccgtgtcaccattgcgttgcatctgatctaagttggcgttcttggtttaaattgttgactggtgtcaatgctaatcttttaccaactttttacgcaggggcacttcttggatgctttgatcttatgttcatttagtgcctctcgatggctctacaagttagccatgttattgtaaagcacagtaactgcttgaatcagcccacaccacaagacaacgagatgctacatatatcaggtgcaaatgcagcaaagaatgcgggacaagcttgtggtatatgcatatgtagctgttgagctaatcatatttcactcaaaccagtt

SEQ ID NO: 25314 - DNA, 1789 bp, Oryza sativa
  Clone ID: PAT_MRT4530_30212C.1
cgggctgaggaattcggcacgaggcgctcctcgcgccgccgacatcgccggagaaaatgagtcaacaaggggagtaccacgccgagatgatggcggagttcctgcgggggagcggcggcgcggccgtgattgacggcgggctggcgacggagctggaggctaacggcgccgacctcaaggacgccctctggagcgcccggtgcctcttcacctgccccgacctcatccggaaggttcatttggactatcttgaagctggggcaagtgttctgataacaggatcatatcaggccacaattcagggcttcctttcaaagggattttctcaggaggaaagtgaatcattcctgaggaggagtgttgaactagcatgtgaagcacgggctatttacctggaaaaatgttctaacggttcggacgaagccaaagacgtaacaaaatacaggaagcgcccaatactaattgcggcatcagttggttcttatggagcatacctagcagatggctctgagtatagtggtgactacggtaatgagggcactttggagttcctcaaaaactttcatctgagaaggcttcaagtccttgctgaagctggtcctgatgttattgtttttgaaactattccaaacaaaattgagactcaggtgacaagtaaaccaatattaatatacccaaatagtggtgagagctatgatcctataagaaaggaatgggtgggtttcctcctccccttccgcctccgccccagcgccgccgtcgtccccctcctctccggcgaagagccgccgtcgccgccatcaccggagcgagccacggtagcaaccgcaaccaccacaaccatcaccatcctcgtgagccgtcaaggtcagtccccactccctcccgcctcgaccaacccatccattcccccattccccccctccctcttctctcctcccgacctagccacgaccatgatggccacgctcgcgaggagatcgatggtggccttgggccgtcgcgctctgtgctcgggcagcgacctggaggcggcggcgcgcgaagtcgtgtgctccggggcggggagcctcgacgaggtgggcggcgcgctggaccgcctgggcgtggccgtgtcgccggccatggtggcgagggtgatcgatgcgtgtagcgagaggatgggttcagggaggaggctgctgcggttcctgtcctggtgccggtccaaggacgccggtggaattggggacgaggcgttggatagcgcgatcgcggcgctcgcccggatgggggacctcaccgcgatgaggatcgccgtcgccgacgcggagaaggatggccggaggatgtccccggagacgttcaccgttgtcgtcgaggcactcgtgaaattggggaaggaggatgaggctgttcggttgtttagaggcttggagaggcagaggttgctgcctcggcgcgacgcgggtgatggaggggaaggcgtgtggtcgagcagccttgcaatggtgcaggcattgtgcatgaagggccatgctcgcgaggcgcagggcgtcgtgtggcaccacaagagcgagctctcggtagaacccatggttagcatcgttcagcgtagcatgctccacgggtggtgcgtccatgggaatgcgaaggaagctcggagagtccttgatgatatcaagtcttcgtgtaccccactgggtttgccatcattcaatgattatctgcactgcctgtgccataggaacctcaagtttaacccttctgcgcttgtcactgaggctatggacgtcttatcggagatgag

SEQ ID NO: 25315 - DNA, 822 bp, Oryza sativa
  Clone ID: PAT_MRT4530_30213C.1
atgctgctgctccactcctctccgcgcctcctcctccgccaccgcctcctcctccccccgtcccgcgacctcctccccgccgcctccgcctccgccctccgcctccgccgctccgtcgccgtccgcgccgagccggagctgtccacctcggcagccgagcctcccccgggcgacgacggcgagggagatggccccgtggagctccgcaccccgacgctcttctccatcgacgagaaccccaccccgctgcagaccgccaccagcgtcctcctcaccggcgccatctccgtcttcctcttccgctccatccgccgccgcgtccgccgcgccaaggagctcagggttcggtccggcggggtggagaagcccaacaacctgagcaaggaggccctggaggggctgaggctggtgagcgcgtcgccgatcgaggtcgacaagccgccgtcgcccgtgcaggcgctgctcggcgggatcgccgcgggggtcatcgcgctcatcctctacaagttcaccaccaccatcgaggccgcgctcaaccgccagaccatctccgacagcttctcggttcgtcaaataacaataacaataagaacaattataaatgggatatgctacctagcaacatttgtgtttggaatcaactcaattggattagtactctatggtctccagctcacttttgcttctatcatgggcgatgacaattccagcagcgctgcagagaaaatcagtgagcagtccaacacaatggcatcatctaatagctccacagattcaacaagtgacaacgaatcaactagcaatgataagagtaaagggtag

SEQ ID NO: 25316 - DNA, 657 bp, Oryza sativa
  Clone ID: PAT_MRT4530_30214C.1
ccactcgacgcgctgtgtagcggaagaaggcgctaagaagtcgaaggaactctcgcaaagtagcgcgcgtcgatacagaggaagtagtcgatcgcaccagctcgtcattatcctcctcgtgcgttctcctcgccgtactcccacgcccatcagcaccgcaaagcagtggcgcctatgagtcacgggacatgcgagtttgatgtatcccatttgatatcttcgtatccgagaatcaataaattctactccgcatttttggcaaaatctttcgtcttcgttttcagctccgcttgctcgagaatttccacaagcacaaattctgctttttatgggtccaaagattctttcgcaaaacaatccatctttttctttgactaatccacggtattccaagtttatatcctgaagctggccgatctcattcctcagctgatgctctctagctttggcggcttctttaacttctttaagggcccatttgaaatacaggattgtcaaaacatgggaatagaaaaaatgtaggaatagaatgtcatgttcattggattcctggtgcagcgatgtactggtgatgtggtgggaagggacgattgtgcgatggatggttgtgacggtagcagatgaaaactttcgagttattgttaatgggccaatcat

SEQ ID NO: 25317 - DNA, 286 bp, Oryza sativa
  Clone ID: PAT_MRT4530_30215C.1
cgggaattctcgggggggacgccacccgcgccggactggcttagcgcaacctgctaagcatgaggacacttgagagctgggaagacagctaggactcttggcggaggttgtggcgcataatgatgatactggtggcggtggatgagaaggatggtctgagcgagcctagcggcggcgaggcagacggtggagaacaaaccgagaactgattgatagtacggggggctgcaggcgcgtgggcgtgagcattaacgaccactagaagatcctgaccgatgagaggtgc

SEQ ID NO: 25318 - DNA, 157 bp, Oryza sativa
  Clone ID: PAT_MRT4530_30216C.1
gccaccgtcgaaacgaaaaatgggggactttcgcgcgcgcgcgcgaagccactacctcacgcccgacctagccaccgctaccctgtcgctgcccacagacagcagagcgggacccctgtgtctcctcggcaccatgccggcgcgcgtccggcgcgcg

SEQ ID NO: 25319 - DNA, 1831 bp, Oryza sativa
  Clone ID: PAT_MRT4530_30217C.1
gttagcaagcagccattgagcactcagaatccattcaatcaagaaaggcgtgctgtaccacaaaaatggtctgcactatataggaacaaacttcatgccccaggacaactaaggaaacaacagatttgcatcattgcggagctagcagaaacagctagcatgatttctgcacactcggagaactgaacactatcaattatgcaaatatggtacactacagaagacactcagattagctttcacaagagcctcttgtttataaaggaaaaaggaaaacctagaagcacttcatttcgtggtatgacgggcatcaaccaaactgcaacaaaacacccaacctacaaacactctgccctggcagctgatcggacacttcagttaccctacgtggcgtgctatgaccaagagacctctatcttgtaatttggagacaggttaacagagtacctaaacttgagaggaaacaagtgcatctgcgttttggaattcacactgtttgtgggcactagttgcaacccttatgcaactcaagccttgcagcacgtagccatgttatggttcagttactagctagcgggccaaaagcttgtatgatggcatgtcctcaatccgctgaatatcttcaagcaagagctccctttctagctgacgtcgtgtggacttcatgaccgtattgaagtccatgtaagtggcatgcatgtcaagccattgctgatccatcaacttgaaggttatgcagtagagaatgtcaaaagcctgatcattttcagaaagtagctttagaaaaactgctccgatgaacgaccttggtttaactgattgaagatcaagcatctggatgagcatgaatgttatatttacaccagccacagcaaatggatactcccaaattgcacggtcaccattctgcttccgaagaagttcctgaaaagattttgggaagttcttggagaagtacactaagttctccaaggagatgaagcctccacctctaaaatctgtagatggatctttcccttgccagcccatctctttccattgttctgatattagtccccgaagctcagctccaggaaaagaagcacgccagaggtccttcaatgcttcctgatgatcactgtttgaactatcatactgaacttctaaccggttctgtaacctctgtaggcactcttcctgaactggcgtcaaatcgaaggagaggcgcgcgtcgctgtccctcctctgggcgcacacgcaagacagccccttcccgatccacgccgtcgaccccgtcacgacctccgctgaagtccagtggtcgaccggaagtacaaaaccggctgtttcggaccttaacttcgtaactggataggtagcatcttgcaccatcgcgtccatctacctccccccacaagctccttgctcgagcaggacgcctctcctcccggaacccgcttccccctcccctcccctcctccctccctacttcgccgcgatccgcgcgactgcggggatccatggggacggatggacggcggcgctccacccacggcgagatcgcacgggcggatcccaaggacgcaggaaaggaaaggaaaaaagagagagaaagagatagcccccctcctgattaggcaagcgagggccgcgaggcgagcgaggcggctgcttcaacttcaagaacttcttcgcttcgctcgcgtccgtcagttggtttggctgcctctgccaccgcgcctcgcctcgcctcgtctcgcctttcggtttggtgcgaataaatgaacagcgcgagttgctgctgctgctgcttgcttcgctccgcttgccgcctccctccccccccccccct

SEQ ID NO: 25320 - DNA, 244 bp, Oryza sativa
  Clone ID: PAT_MRT4530_30218C.1
tttgttaatggcgacgagaacatggctcttgagaagctctgctctggctgaggccctataagccgatatgaactgtaaattggatccccattcgttataagacaacagtgcttgctaatgctcctgttctgccatttaagtgtggctttatgacactcttctaaaaaaaaaaaaaaaaaaaaaaaaaaaaaaaaaaaaaaaaaaaaaaaaaaaaaaggggatgctagtaaaaaaaaaaaaagat

SEQ ID NO: 25321 - DNA, 387 bp, Oryza sativa
  Clone ID: PAT_MRT4530_30219C.1
aactctgccaacatcaccaactgcattcaaattgataccaaaccggtaaggggtgagaataagagacaccctgagttattgtttcagaaggcatgaggagagaagctactgcagggaggagcacgataactgatttaccatatggaaaataccaacacacctaaatcgagcaacgtcaacccaggtaactatcgaacatgtggtattttcgatctaatggctgaagattaccgtacaaccgccatttctcgtcaaatcaaaatcgaatcgggcgttaattaaagaacacgagacatgctggcgctgatcgcttcacaaggcgacttggcgggaaacactactacagggagagtgaggagggagagggatacgcaaaggaatggttta

SEQ ID NO: 25322 - DNA, 434 bp, Oryza sativa
  unsure (1)..(434): unsure at all n locations
  Clone ID: PAT_MRT4530_3021C.1
gctgcgcaactgttggaaagggcgatcggtgcggccctcttcgttattacgccagctggcgaaagggtttttctgatgggaggatagtaggattccatggtagggagggatggtacattgatggcatcggggtccatgttcaggaaggtaacttggctgcaccgcgagttagtagtagatcaacgattgagatgaacccctctttgcgctacgacatgcttgcacaatcaaggagtgaaacatacaatgaggttccttatagcatggtgaaagaaccagttccaatggggccagggccatggggtggcgaaggaggccggccatgggatgatggtgtctacactggtgtgaagcaannnagggataacnccggaaagaacattgtggcacaaggcgccacaatagggcggaaccccgatagaggcccgcgtgct

SEQ ID NO: 25323 - DNA, 1077 bp, Oryza sativa
  Clone ID: PAT_MRT4530_30220C.1
gaagcacaaaacttaaggaggatagagagttaccatattttttgatgaaaaaattcgtagcagaaaatatgataactatcgccgtgtggaagaccaccgcgtggagccgaatcggacggcctcgccgcagccgccgccgccggtgaggacgcggacagacatgctcccggcggtgcccctccgcacgagccgcctctcctgctctgtcctgcgcagcaccacctcctcggcgcgctcgcgcagccgccgcgcctcgccgacgacggcctcgtccagccccgcccacttccagtccgccggcgacgacgtgctctcctccacctgcctcagcacgcagaccagctccaccgcgtcggccagggtgagggtggcgaggcgctcccccatttcgtggaccctcgcggctatgttgcgctccgccgcgacgcggtcttcttcggcgagccggatgagctcccagatgaggccgttgtgctgcggggcggaggaaggtggcggggcctggcggacggcgtcggcgacggacgcgtaggcggatagctcggcgatgacgtgcgggttgggaagggcgatgaggtagtcggcgtcggcggcgtcgtgggaggagtcggggaggaggaggagaagctcgaggaggcgcgcggagaacctgacccacgtggccgcggcgaaggatcggccgagcgggaaggcggcgagcgcgagggggttgcggccggaggcggggtgccggacgagggcggcgacgagctgatcgcggaggatgaaggcgccgcgggcgagcaggatccggaggaggacgaggcacttgagggccacgccggcgtccccgttgccggaagccgccgcgcggaggcggtcggtgagcgcggtggcgagcgccgacgcggataggcgcgagccgcggccgaaggcgaggagcgcgtccaggtggtgcgcggccggcggcgccgccggcgggtggtgcgccgtggcgcgcgccaccgcctggtgcgcgtccgcggcggacgccggcgaggaattggcccccggggaggagaggagggtggccgcgagccgccggagcttgaggcccat

SEQ ID NO: 25324 - DNA, 576 bp, Oryza sativa
  Clone ID: PAT_MRT4530_30221C.1
cgagggttaaaaacagcctcttcttcggttttggatctcgctcaactgccggcagatcccaggcggagctctttgcaacacccgagctgcgtcgccctcacttcgcgcgcatcatggagctgcccgagctgaaaggttacttgcgcaaaaagtcgcgccaggatcggtggcagcgccggtactttgaggcaacgacgcactatctcacgtactacaagaaccgcgagagtgagaagctgctggcgtgtatcgatctgtggcgcacgcaggcgatcgaactgacggcggcggacccggacaagctcgaattctcgatccagattggcgagcagtcgtatctgctcaaggcggacacccaggacgacgcactacgctggatcaagggtctccgcgcgcgccagagccgccccgatgatacgccgtccgagtcgtttagtctgcggagtgagcggtacgacgctgagagcgacgcctcaagcgacattggcagtcgccgcggcggtaactacgctggctccgacacgggctccacgggcagcacagcgagccgcaagtcgcgtgccaagccaagacgta

SEQ ID NO: 25325 - DNA, 912 bp, Oryza sativa
  Clone ID: PAT_MRT4530_30222C.1
atgtcgtcgcgacgacatggcatgaaagccgtggtggtggtggtggtgatcgcgcacgtcctgctatgccatgttgccggcggcggcgggggcgtcccggcggtgatcgtgttcggcgactccacggcggacacgggcaacaacaacttcatccagaccatggcgaggggcaactacccgccgtacgggcgggacttcgccggcggcgtggccaccggccggttctccaacggccggctcgccgccgacttcgtctccgaggcgctggggctgccgcccgccgtgccgccgtaccttgaccccagccacagcatccaccagctcgcgtcgggcgtcagcttcgcctccgccggaacgggcctagacaacatcactgcacaaatcctatcagcaatgaccctgagtcagcagatagaccacttcaggcagtacaaggagaagctgaggtgggccaaaggcgaggcagcggcacaccacatcataagccaggcgctctacattttgagcgtcggcaccagcgacttcctgcacaactacctcgtcttccccatcaggggcaaccgcttcaccctgccgcgctacgaggcctacctcgccggcgccgccgccggggcggtgcgcgccgtgcacgggctcggcggccgccgggtgaagctcgccgggctgccaccgctggggtgcctgccggtggagaggacgatcaacccggacaggcctggggattgcaacgagatgtacaacatggtggctctgagcttcaacgcaaggctcaagaggcttattgggaggctcaactgggagctgccaggggcacaagtagagtatgttgatcagtacagcatcctctctgccatcattgccaagccatgggaatatggtcagtacccagtaatgcacttcgcttcatattaa

SEQ ID NO: 25326 - DNA, 168 bp, Oryza sativa
  Clone ID: PAT_MRT4530_30223C.1
taaacattatgaaaaacaggttcaccttcaaaatccttcttactattgaaaatgaaaatcataacagtacttatcatgatttattactaccagtcttctttaataacccgtgcattgtgggctatactatcatgaatttccccaaccctgactatacattttcattaa

SEQ ID NO: 25327 - DNA, 339 bp, Oryza sativa
  Clone ID: PAT_MRT4530_30224C.1
attcttcacactcttgctctgtttgctgctaacaaatcaaaacccgatttgtttagtttttgggtttgttttcctttaacccccttacattacctttggggggacaaaaaaccctccccaccactgaaccccccggggggcattaaaaagaaaaaaaagggaaaaacctttgggggaagaaaacagtctaaaaacaacatcccccccttgaattcccaaattttttcagcagtgcatgccaaaacaggagggaggaaccgtaaaattggggggcccccaaaaacctaacgcaattgggcgggcgcaccaccgggaaggcccgggggatggcctccaatg

SEQ ID NO: 25328 - DNA, 441 bp, Oryza sativa
  Clone ID: PAT_MRT4530_30225C.1
atggggctacgagagggagggagggggaacctcgctgcccatctatgcccgtcggtgccctctgtgagttctcctcacgaccggccgatcttacaggaaggggaccagcaagtcaacaacgacagcagtaatgagaaggatgcggtgaaggggggccctcatccgctctgctcctcttaccgttcggcggcagcggtgggagagccgaccaactcctctacttcggtcaaggacagccgcccgagttccatcggcgcggccccaactccaccactgccgatgccagggtccagactccgctcccgccctgcttcgctgtcgtcggaggatggatgccgcttcaccgcctcgatctactccgccgaccacatcatcaggaggccaacactgaccatcgtccccttgtcgtgggatcccctgtcggccagccccggcctctag

SEQ ID NO: 25329 - DNA, 2039 bp, Oryza sativa
  Clone ID: PAT_MRT4530_30226C.1
cccgggctgcaggaattcggcacgagggcacaatataggcctccgttgccgacggaatgtacaccattgtgtgctttcgttgatgaccgtaaggcactctgttctgttgcttatagctgtgttgcgttgtgaatattatgatgaattcattactgcagtaaatcaccatgttgatgtgatcatcaagaagcctccagaaataggttgagtacttcagttagtactacttaccacacgacccagagctagcttgttctgtgtgtctgtgactaaacagcggccatgtaatgacaaaaatgtgagattaggtttccatcttcaaaaatgtacttatgtacaacaagaactcatcattcctataacatattctacacatatgacgataggccgaaactatttctggacttacacaatataagtcttcttgagtcctttcctgccacgccgcctcttcagattggatgcatcagtcatgcgattcatagcgttgagaatttcctcatcctcgttgttccacagtattctcgatttatcagggttttctaacagctgcttggccacgagaaaaccggcaatggtccatgtctgaaaaagccgagactgcttcccgatgaatcgtgcacgtttggtatcgtagtattcaggccatttatcattggcaatacgtcgctcagcaacctccacagcttttgctgcaatctctgaccggtccaccttgatacatgctactgtgagctgccacaatagtgttggccaggaacctccattatggtaagaccaagccgtatttttagggtcgctccctgtaatgaatttccactcctgatcctcaagagcaggatagcatatcttcattggcatatccgccactaaatcagaccatttggcttcaaccagatccaaaatagcatcacactggtgggatgttgccaaactacttactattgaccacaagttcccaagataaaacatccgattatccatatgagctggctgcatgtatccaatgaagtaaccccctttaggagggatccattcaaccagccagggaggaatctgatctggatatatgttaaacttgttgacagcgtcataagaatactcctctgttttgtatcgatatatctcatttagctttctcttgtcaagccaataatactctctgatatgaaaagagagtgcaataagcctgctatttagggcacgaatcaagtcagctgatccatcttctggggtaagcatctcacgtgcacacaagagagctgaatagaaaagtgcctgaatttccaatgggtgtccatggattcccattcgacgatctatcatgcatgagccatcagtaacaagcaaggtgggaaacatgtcgaagccatcagctaagcagagcttcaagatcatctttattccagtctggacatcaattctctcctgaaccgacagatcgcctgaacattttccgtatgctctcagcaatatgatccaccataaaccagaatcaactggtgccacacgtcctattgcagcctccccgaaatcaggatccaggacttcctcagttacatcatcgtccccgtcaagtggaacaacacgcaccttgaaacttgctggcatcaacccttgacctggactgtggcagtccatcgttttctcccagctctggagctggagggtgtgcaggatgaagttgcggacgatctcgtagtcccccttgagcaggaaggcgatgcccgagggcacgaagtcccggatgaacacctggtcgtagttgagcgggctggcgtcgttggggtcgcacgcggcgatcgtgcccacggggctgccgcagtagcgcaccaccgactcccggagcagcccccacgcctcgtcctccacgtcatgaggcccgcgcctctgcctcctctgcggcgccttcgccggcgcctccgcgggagcgggagctggagccggagcggcgccgttgacgctcctcccgcccgccgcctcgccgcctggcctcttcacggcgtggtcgtggcgcggacccggcagcgagctgggac

SEQ ID NO: 25330 - DNA, 168 bp, Oryza sativa
  Clone ID: PAT_MRT4530_30227C.1
atggggatagccgagcgtggggttgtggtgaccgggctctgggccgacgtggcccgtcctgcgcctcccatgagaaaaatcggctccagctccaactccacccctcctagagttagagctcagccaaacagtttcagctctatcaaaactgggagtggagttgggtag

SEQ ID NO: 25331 - DNA, 188 bp, Oryza sativa
  Clone ID: PAT_MRT4530_30228C.1
gtaaatttttgttgaaaactgcacaaacaccaggggaggggttaaatttaaaagcggtgtcggttcccagacgacctcaccagctagaggaattcactctcgttgaagcatccatcgatacttcacacaggcagacatgaaatacgagtctatatctgtaacccagcactgcttaaatcatcaccctc

SEQ ID NO: 25332 - DNA, 186 bp, Oryza sativa
  Clone ID: PAT_MRT4530_30229C.1
atggctgtcgtggttgcaaacgagagggtagaggtggagccacactacactaaaaaaaacacaaaagcagcaacgccagtggaagaccacagacaatcctctgagaggatggactcgaaaaccacggagaccgaggagagcaccgagttgaaaaccctaaaattccgctcctttcacagctactaa

SEQ ID NO: 25333 - DNA, 603 bp, Oryza sativa
  Clone ID: PAT_MRT4530_3022C.1
atggcggcggtggctgttccctccctcccagatctggccggagggagggcgggggagggcagtggcggcggcatcggttccctcccttccagatctggccggagggaggccgggggagggcggtggcggcactggcgaccacggaggttcgagcgcctcatcgatagccacctcccaccgtcgttatgcttgggaaatccgttgatgctattcgacaccgaggagaaggtcattgtagatttagggctggggctggggccgtcaacatggggagcaccaacaacagcatcggtgatgcctgtgggtgccacgcaccttcctggaagctatatcactggcacctcctcccttaccttgccgccgttggagctgttcgtcccgcacgatgcccctgaccccaactgctgcaggtatactcgccggagaagctgcaggatcgactcgccggagacgacgccgccgctgccgccgcccagcggccgagccgagctcgacgcgacgaggagcgccatgatcgccgccaagatcaccaacacgacaatccttggctgcctcatcatcaccatgtgtccagctcagaattcagaagagagtgaacagtga

SEQ ID NO: 25334 - DNA, 373 bp, Oryza sativa
  Clone ID: PAT_MRT4530_30230C.1
ttgtcgtggctcaaaattcttcgcctcccaggggaaaaagaacaaggaaaatacactcgaactttctgttcacccagcacaaattggtgtcatccttccctcgtccttgcttgcgtcaaacgattctgcgtcagtttaccgactcacgcgagttcgttcgtgttcgtctccgtttgttgtcgtgtttcgtggaggccaggagataatagttcttgtagttgtatccgatcagcatggagattgaagaagaagaaggctttcgcttctatcgccgaaaggttgctctctttttccttcgattcgagctgtcgaggttaaggccattggagaatagcaccaccagccgacctgaatccccccctctccatgctta

SEQ ID NO: 25335 - DNA, 1077 bp, Oryza sativa
  Clone ID: PAT_MRT4530_30231C.1
atgtcgcagaggagagttgcagggcccatgggagtgatgagcaagcagcagcaggaggccatggcagaggagatgatggagctgaggcgaggaccatggaccctcgaggaagacaacctcctcatgaactacattgcctgccatggcgaaggccgctggaatctcctcgcccgctgctccgggttgaagaggacgggcaagagctgcaggctaagatggctcaactacctcaagcctgacataaagcgcgggaatctgacgccggaggagcagctgctcattcttgagctccattccaggtggggaaacaggtggtcgaggatagcgcagcatctgccggggaggacggacaacgagatcaagaactactggaggacgagggtgcagaagcaggccaggcagctcaaggtcgacgccaacagcaccgtcttccgcgacgccgtccgctgctattggatgcctcgcctcctcgagaagatggccggagcagccaccgaccccactccgccgccgccaccgccactccaccaccacgccgccatggccaccgcctcctcctcgccgttcgacttcgacacccacctgcagcaagcagaagcagcaacggcgtgcgtcgtcccgaacaacgtgtaccaccaccacatcgacccgagcccgagcacgtcgacgtcggccggctcgacggcggccgcggcggcgttccagccgctgccctgcttctccgagctgagatgggaccagcagatgcagtcctccggcgagctcgacgacggcgccgccggcgtgttcgtcgactcggcgtcggcgctgggaagcctcagcctcgacgggctggaccttggtccggccgagtactactccgactcgacgctcctcgactacctcaactccagctgcaccggcagcgccatgatgacgatgatgaccgcctccggcaacgccggcagctacaactactgcggcggcgccatggacggcggcgacacgtggaggtccgacgagctaatggatgagttgttccatcatatcgatcaagatagaagtactagtgatcgatcaagcaaaaatcaaaagtag

SEQ ID NO: 25336 - DNA, 762 bp, Oryza sativa
  Clone ID: PAT_MRT4530_30232C.1
atgtggcacattgtgattgaatcttggatcgaggctggacttcccttcatcagttcatccattttgtggaaatttcagaattcagattctggaattttgaaggaactacgttgcttcgagaaattttcacgatcgctgaggctatgttggctcttggctctggtacgagtggacaagcccggaaaaatcttggataggaaccccgccgccctcaccgattgtgcactgttcgtggccgccatcaaggtaacagttggagatggacgaaaggcaaaattttgggaatccaactggataggagatcagccgttgaaatatctagccccaaaccttttcaagcactccaaaaggaagaacaaatcgactcttgaggcaataaccaataatgcttggatcgaagatatccgcggaagaaatcttgaaatagtacggcacctcttcatggagtgccccttcacgcagcaggtatggcgggacattggtcgcaagatcaggctgtcacgtttcctcaatatgaccatagacgatactctcctcaattggtggcgcgagcaaacagatgaggcagaaaagttgcaacagaaaaggctgcgttcagtattcttggccacgctttgggagatttggatagaaagaaacaattgcatttttagaggcactgagtctacgccgccggcacttgctagcaagatcatagatgagcttcatttgtgggaaatggcaggcgccaagggagtgcaatgtattatgttaagagagtag

SEQ ID NO: 25337 - DNA, 1138 bp, Oryza sativa
  Clone ID: PAT_MRT4530_30233C.1
tgactcaagcaaattacgcttttcttccgaagaacctcaactgtttacgaccatcttaacaaaccgatgtggcacattgtgattgaatcttggatcgaggctggacttcccttcatcagttcatccattttgtggaaatttcagaattcagattctggagtaatgatcgtgatccgtacgttgtgatgtgcatggaaacagattttgaaggaactacgttgcttcgagaaattttcacgatcgctgaggctatgttggctcttggctctggtacgagtggacaagcccggaaaaatcttggataggaaccccgccgccctcaccgattgtgcactgttcgtggccgccatcaaggtaacagttggagatggacgaaaggcaaaattttgggaatccaactggataggagatcagccgttgaaatatctagccccaaaccttttcaagcactccaaaaggaagaacaaatcgactcttgaggcaataaccaataatgcttggatcgaagatatccgcggaaggtgacaatacagttgcttcaggaatatatatgtgtatgggaagtgctccacaatgcaggagatgtgatccatgaaggggctgatgacacaatcctccggcggtggtcagccagcggcatgtatacggcgaaatcagcatatgccatgcagttcatgggcaaaacgattttcggaatcagccgagcttgtatggaagacttgggcaccgggtaaacacaaattcttcgtgtggttgctggcaaaaaatagaatatggacgacggattgattgcaatgcaggggctggccaaataattacttttgccaactctgtgttcagaaatcttgaaatagtacggcacctcttcatggagtgccccttcacgcagcaggtatggcgggacattggtcgcaagatcaggctgtcacgtttcctcaatatgaccatagacgatactctcctcaattggtggcgcgagcaaacagatgaggcagaaaagttgcaacagaaaaggctgcgttcagtattcttggccacgctttgggagatttggatagaaagaaacaattgcatttttagaggcactgagtctacgccgccggcacttgctagcaagatcatagatgagcttcatttg

SEQ ID NO: 25338 - DNA, 543 bp, Oryza sativa
  Clone ID: PAT_MRT4530_30234C.1
atggttaagcgaaactacctcggtaatcgtgtaacgataccggtgcaaatatttgtggagctatcaaaggtatggaaacatcaacctatgaaatataagtgcgactaccaggggcaatgtgatcaaaggggtttgccttgcacagggtgcggtggcttggaggaggtcttcttcctcctctcgcctgctcgactcggcccgggtgcagctcgacgacgcgccgtggcggcgggacgcggcgaggcgtctggcggccaagggcggtggcggcagactccggcgaggctccgccggcgacggcggcgctggaaggctcggctcggctcggcttcttcttcctgctctcgctttgctcggcttggggcggcaaggtaccgcggcggcggggcgtggctccgcggccggtggccaggggaggcggcggtgacctcgggcggtgctccggcggcgacggaggcgctaggaggcgcggcgcagcggcttgagcggcggcgggcgacgcggtgtcgatctggcagtctaggcgcggagctccgggcgtag

SEQ ID NO: 25339 - DNA, 291 bp, Oryza sativa
  Clone ID: PAT_MRT4530_30235C.1
atggggctcatcgccttggctctcgcgtccaccggcatcatcatcatctcctactccctccaccgccgcttcctcgccgacctcaagctctccatcgcgcgagcgcagcagcagcaggagcagcaggagcaggagaagccgcagcggccgcgggagaggacgaggagggtgcggttcgccgccgacgtggtggagccgtcgtctgacggcgacgagtaccgccgccggaagaagacgaagcttgcagagtttgcagtggcagtggcagctagatgtgatcactactactag

SEQ ID NO: 25340 - DNA, 437 bp, Oryza sativa
  Clone ID: PAT_MRT4530_30236C.1
cggcgacacatcagatcgagaggcccaaaccagtctgctacatagggctcgatacaggcgcaggtcgccgttactcacctaatcaggatataccacatcagcctcctgaaatgtttctcccaggcctagttgtacatatagagcggcaaacaggaggcctgttccatctttggaaacgctggagcttgcacggaagtgaaccaccatactaaagcttttttgcataatgggagaacttcactgatcttgatcgaactacttcgaggtttacggagcacctaccatggaggaggcactatgcaatgcacagagttctggatgcgcacacggtagcatgttgtcctgattcaccggtggatctgtatggattgaccaggagtctcaggatagagttgtccttaatttcgctgtaagcaaattctgagattgtttctaat

SEQ ID NO: 25341 - DNA, 444 bp, Oryza sativa
  Clone ID: PAT_MRT4530_30237C.1
atgacgctctctctcgtggcccgatcttctggtgaggggataactctcgctttgatcaagtgcgacgtttgcgacgtggctaccaaccagaacaagtccaggacgccgtgcaatcgctacaccacaaatgatgtcgcgctaggttcatttgaagtcagtgctgtctccggaggtcgaactggattccaaaacccattggactttaatatcttaaccgcctacccgccaccgctgggcgcggcattaccagccgccgtagcgcgcagcccccgccgccgccggccgcttgcctgccaccaccgggaggagaggggaggaagaaggggaggagggtcccggtcggtggcaccaaccgggactaaagatcctcggtcccctgacatgcctctgacagggaatgaaccaggattacagatcatctttggtaacaccaaccgggactaa

SEQ ID NO: 25342 - DNA, 530 bp, Oryza sativa
  Clone ID: PAT_MRT4530_30238C.1
ggggacaaggaccggagggacggccattattgggggattacacaagagcccccaaacgccctcccccaaaagacgaaaaaaaaggggctaatctaaaggggagatgaacaatggagtagtagggggagcatgccaccaaatcgaaagggaaggagaattttttgggggggaatttcttttttttctctttccttttttttttacttcccccagcacaaaggcaattcaccaaatcggccgatcaagggagcaaccggagcgacacggggagctggggaggacaaaaacaaggatgtcggggcgtaaaaaaaccgcttcagggcttccaaaagaaggggggctcggcgatcatgggggggacaatgtaagggtccatgttggaccccggccggggatcctcgaagaaacccttggcgttttggtccgtttcccggccgaagcggaccgaggggccggggttggcaactccccaactgaaggggttgatgtcggcggtctcgtgcctgccggggaaccggcgcttgttgccc

SEQ ID NO: 25343 - DNA, 1659 bp, Oryza sativa
  unsure (1)..(1659): unsure at all n locations
  Clone ID: PAT_MRT4530_30239C.1
aattttggggccccaaaaaaaaaactataacctcgcaagccaggggaagaaaacttggatcctttaaaagggccccccccntttatttttttttttttttttttttttttttttttttttttttttttttttttttttttttttttttttttttttttttttttgaactttttttttttttttttttttttttttttttttatgttttctgtgatccaatcattgcaaggacaaacaatgtaggtatcgatgacaaaatttgactgctatagatgagaagaggacacaaaatcgctcagcagttcactttgacattttgtgacttgctggctaactgattctccaccgtttgatatattcccacgaaaactcaaaattgccattttgataaaactggcgtttttttggtctaaagaagcccaagggcaagtaaaggaaactcatggatgaggagcaaacaaaattcccatgaaatggttcatatggccatgacttttgcacataaggcatgggcttacgcttccatcttgtcgaaagaatccagcagatgctcgatgtccggggttacaatcgcgcgcttgctgatctctcccaaggtgcagcagtgcttttctctggcgttaattgccgcaacctcctggacaaacatgcaatttgaacccggagagacatcaaagagtgaatctccgatcttcatcttcactttaccgctcctatatacaagtatcttccccatgaaaccttctggaaggtctttgagcttagagccaaggacttttggtggccttgttcctgcatgcatctccttagagcttgtgcttgtaggttcagcatccaccccatcgcctttatctgtctctgcgactgagtctggctgctttggtaatggaagagatgcaggcatctggaagaaaagcaactgtgctttgtctgaccgatgcattagtccaagttcttctgctgtggttaattcaccatcttgggctccggtggcagaagactctccaaactcctcttcattaagaatttcaggatctccagaatacggtctcctcagtgggagagtaacaggatagtcactgtgggtatagtcccatggttcaacatattcttttggtaattttgaagctgatccatctgctgaactttgcatgggaaatgatcttgcatacgacgagttcccctgtccaaatgcaacttgagtacgcatttcctttttctcagtcttaaattttctcacaaagggatctgtgctctgcgatgtcttaagcttcatcaacagctctttatctacggtttcatccttgctttcctcagccggctcccttgcgaggagggaggccatagctttcttaggacgaaccttgggtgcaaatttaagccctcccttgcgaggagggaggccatccgtttccttcttcactttgcccttgctatccatcatacaagaaaagaagcacaaatccgggacgcggcggaggcaaccctgctcggtcgcgggatggatgggggatcggcggcggcgggcggcggcggcggcggcggcgggcgaactcgcgaggagtcggagtcggagtcgcgcgcgagcggagggggggaaatatcgcggctcgacgcaaccgcccgcagcacccccctcgtgccgattcctcagcccgg

SEQ ID NO: 25344 - DNA, 3161 bp, Oryza sativa
  Clone ID: PAT_MRT4530_3023C.1
atgagacaacctgatcgtcagatcaatacacactcggcggattcaaatccccaaacaggagtctcgtgcgctacccccttttattattgccgaattcatgtttcgacagttggcgcgccaggtaggggttgcgtcgagtttcctatcaacgagcgcgatggaatcaatttcatgagtcgccgacttcgctttcgctttgggagttttcacttcctttccgtcgaccacttcttcaagctcctcttctctgacttgatccaaatcagtcagggggaaactcaatctgatttttatcattatttatcatattgatttttaatctcagattaatttcttgctattttttgttgttgttcgcatataactacgcggcactattgaggcgattgatgctggtcatggactcgaggcgtctcagctttccggtcgatcggccgcgagtccactccgccggcttgtcctcgccaccgccattgctgatcgcaacaacgacttcaccgccggcctgcctccgtcgccgccgactggtgtcatcgcctatacggttggtcggtcacaccaccgttcatgggcgtccatgtcttcaccgaccggctggccttcgccgccgccgactggtgtttccgcctgcacggctggcctattatgccgccgctgttgggcgtctacgacttcaccaccggcctgcctccgtcgccgccgactggtgtcctcgcctatacggtcggttggtcacaccaccgttgatgggcatcgtcatctacaccgccggcctgcctccgtcgccgccgactggtgtccccgcctatacggtcggttggtcacaccaccgttgatgggcatcgtcatctacaccgccggcctgcctccgtcgccgccgagtggtgcctccgcctacgacttcaccgccggcctgcctccgtcgccgccgagtggtgcctctgcctacacggctggcctattatgccgccgctgttgggcgtctacgacttcaccgccggcctacctccgtcgccgctgagtggtgcctccgcctacacggctggcctattatgccgccgctgttgggcgtctacgacttcaccgccggcctgcctccgtcgccgccgagtggtgcctccgcctacacagctggcctattatgccgccgctgttgggcgtctacgacttcaccaccggcctgcctccgtcgccgccgattggtgcctccgcctacacggctggcctattatgccgccgctgttgggcgtctacgacttcaccgccggcttgcctccgtcgccgccgagtggtgcctccgcctacacggctggcctattatgccgccgttgttggatgtctacatcgtcaccgttggctcaccttcgctgccgtcgactggtgtttccgcttacacggctgacctattatgccgccattagtgggcatcttcgctttcaccgtcgaccgccttcgtcgccgccgactggtgtcttcattgttattgatggacgactttgttcccacattggccacttccgccatcaccaaggggaatattacaaagctaacaattggtcttccattgagtagtgagtcgggggctacagatgttatatcatattttttataatatttatcttgattgcttgcgacataatctgagtacaaaagtacctatcgagttatggagttctatcttcctatgctttccgtttggtttgccaatggatggttgcctttgggccgattcctagcacccgggggctcgttggatggaccgagtaacgcaaggtgctaagtattattcggaataaatcaaaagcatagagatgagataaatttattttctgctcttaataattgcaaaagtacccgagtagtaaactccgatccgtgaaactttgttccattaatgacgaactcatgtcactcatatgcatgtttgggaagtgcttaggctgacatatgcataaaagggattcatggctttaagcttatctcttacgctctaggaatggatcagtcagaacatcaccaccggccgcctcgtccgccgccgactggtgttttcgcctgcacggttggcctattatgccgccgttgttgggcgtctacgtcttcaccgaccggcttgccttcgctgccgccgactggtgtttccgcctacacggctggccttttatgccgccgttgttgggcgtctacgtcttcaccgaccggcttgccttcgccgccgccgactggtgtttccgcctgcacggctggcctttatgccgctgttgttgggcgtccacgtcttcaccgaccggcttgccttcgccgccgccgactggtgtttccgccagcacggctggcctattatgccgccgttgttgggcgtctacgtcttcaccgaccggccgcctcgtccgccgccgactggtgttttcgcctgcacggctggcctattatgccgccgttgttgggcgtctacgtcttcaccgaccggcttgccttcgccgcctccgactggtgtttccgcctgcacggctggcctattatgctgccgttggtgggcgtctacgtcttcaccgaccggccaccgcatccgccgctgactggtgtcaccgcctgcacggctggcctgttataacgccaactgatgctatcttcttcacggctggctacatcgctgtcactactaataggcatcagtatcttcaacacaagctgcctacgtttgccatggctgccgactggtttcttcacttccatggctacatgattctaccagtgttgattagccttatcttcttcaccgccgctaccactactgatggacatcatcgttttctgccgccgactcgtgttatgccgccgtcgactggtgcttttatcttcacaactgcgcgtcttcactaccagtttgcttctgttgccgccgactcgtgttcacttcatcacggcgatgcaactttgtcatcatggtagagcgacttcatatttattatcttcggcaccggcaaactctattgctgctacttcgcaagttttgctacttcaccaaccacgacgtctttgtgaacctcaacatctcggcatgcaatgtcgtgttattttactacaacaagtggctctccaacattcatgatttctacttggacatcttcaacacatatcttcaatcaagcaatgactat

SEQ ID NO: 25345 - DNA, 509 bp, Oryza sativa
  Clone ID: PAT_MRT4530_30240C.1
caaaagccgaaatgccacttaattcggccgtatcggccctggcgtcgcagcgattacttgtaggtcaagtgtcggcgcatgcgttatgacactaaatgctcgcagtgaaagacctcggaaatgggaatacggccaattccactgctgcatggcgttgcagagagagaaacgaggcgacgtatatagttcgtagacttagttacatacgactacgatacgagcgcacatctagcaatgattgacgacacaagatcatgggctattgctagagagtatctagaacccttatttgcaccctcatatgcgaattagtcacaacacatggttgttctcgctgtgttgttacctctacgagtgtcatggtgtcattctatgctgcgtgttttatggaacaaggttaaaagttgacgagtagattaatgcaattagtgacgtattagtccatgtgatcttatgttatacactcaggcaataccgcccggagcttgcctttcaaaaaaaaaaaaaaa

SEQ ID NO: 25346 - DNA, 1370 bp, Oryza sativa
  Clone ID: PAT_MRT4530_30241C.1
atgaccaattcccctcacccaaaatccatccccatctccacagcttggccggaggtgccatgggtggaggtgcctttggcggagcttggtccggttggtgacaatggatatgggcaagccattgatccggttggagattgtgattttcttcccccatgcgctattttctcgatggatgatgggatagcgtttctgctgggaatgcttgaaggagcaggaggcttcattgggtcgtgggtggtgaaggagctcctgatccgtggctatgccgtgagaggaactgcaagagatccatctagtcaaaagaactcccatttgcaaaaacttgaaggagccaaagagaggctctgtctgaactatgcagatgtgatggactttgatagtctttctgttgcatttaatggatgtgaaggtgtattccatgttgcctcacctgtatccgttgatccgcgacttgtgcccgttgctgttgaaggaactaagaacgtgatcaacgctgcagcagacatgggcgtacgacgcgtggtgttcacatcaaccttcggtgctgtacacatggacccaaataggagccatgatacagtcgtggatgagagctgctggagtaaccttgagttctgcaaacaaaaagactggtactgttatgccaaaacggttgctgagatggtagcagcagagcaggcatcgaagagagggattcagctagtggtggtgcttcctgccatgacactaggccagatgttgcaatcaaccataaaccctagcatcagacatatcgccgatttcttgaacggaagcaggaaaacccaccggaatgctgtcgctgggtatgttgatgcgcgcgatgtggcccgtgcacatgcactggtgtatgaagaccccaaggcgcatgggcgttatctctgcattgctagtgtgcttcaccggtccgagcttattcagatgatcagagaactctttccacagtatccaatcacctgtaacaagtgtgaagacagcaagcagatggtccaacctttcaagttctctaatcaaaggctgagagacttgggcctcacattcacccccataaaagaaagtttgtacaacacactgatatgcctacgggagaaggggcacctaccgccttattcatctctttgaggacaggagaaattccgtccggttctatgcatccttcgtgtatcatcatggtattatataaatgtaatgagttagtcgtgcttgtttgctagctgttgtgttgaactgtatgtttcgcatgaatcatgtcttgcttctttgttagctgttggccctgttgtgttgaactgtattgtggatttttttaccatcctagcttgagaattgagatggcatctccatgtacc

SEQ ID NO: 25347 - DNA, 198 bp, Oryza sativa
  Clone ID: PAT_MRT4530_30242C.1
atggcgaccagggggcaggagggcacctgcggcactgcaagtgggatcgcccggcgcgggaggccacggggcgcaggcgtaagcacgctcgctgggatgcgatgcgacggggggcggaggaggacgtgttcactaatcccactaagcaatgacgccgagactacgagcgccaccggtgctgcggtgcagcacccgtag

SEQ ID NO: 25348 - DNA, 1746 bp, Oryza sativa
  Clone ID: PAT_MRT4530_30243C.1
atgccgccggccaccccctcggcgaccagatggcccaagaccctcaccgccgaccacctccaccgcctggtccgcgcggagcgtgacccgcgccgggccctggcgctcttcgacgcggccaccgccaggccctcgtccgcgtccccgcccgacgattccacggccgccgccgccgcgcccgtcctcccgtcgcgcgacaccgtctccctcctcacgtcccgcctcgcctccgccagcctcctcccgctcgcatcctccctcctctcccgctcgcgcgagctcttcccctcgcccggcgagctcgagcccccgttcctctccctcctccgcgcctactcccgcgcccaccagcccctcgccgcgctccacctcttccgctccgcgccctccgccctcggcctcccgcactccgcccgctcctacaccgcggtcctcgccgccctcgtcgctcactcccacctctccctggcccgctccctcctcgccgacatgcgcgccgccggctttgcccccaccaccgccacctacaatgtcctcgtcaaggcccactgctccgacgccgccgtccccatcgacgacgccgttcgcgtttttcggaacatccccaaacccgacgcgtgctcctacaatactgtgatcgatgggctctgccgccgcggccggctgccggaggcccgcgacctgttcgcggagatgattgcgaatggcactgcaccaacggtggttacttacaccactcttatccactggctcgcgcgggaggcttgctttgatgatgctctgaaactgttcgatgaaatggctaggagagggatcatgccgaatgtggtaacatacagttcactgatcgatggattgtgcaagggtgggcgtgccgcctcagcagtggagctgctggacaggatggttaaggagaggaagcttccaaatacaatcacatacagttctgttattgatgggctctgtaaggagggctgtctgggtcaggccatggagattttagaccggatgcgtctccaggggaggaagcctgatgctgggttgttcggaagggctttggaggcttcaaattacctcgatgagatgaattttgctggcatccgaccaaaccgcttgacttggagcctgcatggcaggataaatgatgcagtggtgacagcactgtgttctaagggtgaagttgtaagggcttttcaggtgtaccagagcatgcgtacccgtggaatttctaccaagccaacaactttccatctccttgtcgagtgcttatcgaaaaagaacaatttagagaaagctgctcatgttgtgcgtgacatgttatcagagagatgcatccctgagagggaaacatgggatacgattgtacgtgcatattggagtaagaaaaagttacgagcagttggcagtgttcaggagtataaccatgagaaaaagtcaacagccaaaatatcaagtattgagatacatgctactgggccttgtgctgccgttgccaaggttggagccaggaattggaagacagggacagtgtctgaaggaagaaatttgatgttcttatgtctgggcgattgttttctgcatgggctcatgttgctggcgagttcagttcttcgtggtagcttagctagaggtggtatcactcacatggatacatcaggttcagttaggtacatgtactctatcgtgcgatatatggaatgcatcagaagcaagtccagtgtcagtgtcacacgaagcaacatctaa

SEQ ID NO: 25349 - DNA, 456 bp, Oryza sativa
  Clone ID: PAT_MRT4530_30244C.1
atggaggcgagctatactagtggcggtggtcgctgtgcaatttcgagaaggtgcagagtcccattggtggctccttcaatcccagagctgaaatgtgcttgtgggcatgccgttgcggtgcagacatcgaacacaccaaggaatccaaggcggcggtggctgcagtgtcctggggagctatccaaggagtatattcgagttcaagttactcacggtatcgacgaaataggaggaatcgagcctctcagatccatcccctccatcggcaatttcgctgcgcacgatgatgtcgcaggggagcttgcgatcttcaggggaacttctacatcgtgggtcgtcgtcgccggcgccatatccctagcccccgtcgtcgtcgccggcgctgcaccgatcgccgtcggcaagctaaggtttgcagacaatggggaatggggaatggggaacagagatggttga

SEQ ID NO: 25350 - DNA, 338 bp, Oryza sativa
  Clone ID: PAT_MRT4530_30245C.1
gtccgattcccgttcgaccacgcgtccgaccccagttccgattgatctccggttcccagatcggccaggtttgtccccacccccccccccccccccaattcgcctgctgaatccttcttcccccgcccggtttcatcctgatcggtgcccgtttcatgctgttccgtgcgcggattacggttcttgtgctaggatctttggggggtgggctggtgttgctagatgggtttgttctttcgggggggtgatccggcgggggaggaaagagggaccgattcctctccctgagaaacccttaccatttctgatctgggggatggcccatgggagaggggggg

SEQ ID NO: 25351 - DNA, 213 bp, Oryza sativa
  Clone ID: PAT_MRT4530_30246C.1
ggtattttgggctttttgttaagatcgtccaatgtccttaacagaagaggatcagagtggatctttggttttgaaaaggagggtcaaataaggcagagtgataaaattagagtcaaattgatagttagaccttaaaatagggcttaaatgtgtaattaccccttttttttacttcttaaacgtaggagagtattggaccaaaaaaaaaaaaaa

SEQ ID NO: 25352 - DNA, 262 bp, Oryza sativa
  Clone ID: PAT_MRT4530_30247C.1
ctaaaggaacacacatatatttttattcttccaaccatccactattacatatctccaacatcatccactcttttattgctaatgatttatttgcaaaccatccttaataatccacgcctattatcgacattatttgccaatacactcacagatatttcttgatatcctcttttaggcataactaacagtacacacaccattctcatctttccctgccgtgctttaccctactagcttcttctcttgagatacgaaatgcaat

SEQ ID NO: 25353 - DNA, 146 bp, Oryza sativa
  Clone ID: PAT_MRT4530_30248C.1
agacgtacgcgcgccggatattccaggagagacagacacagacgaacgcatatcgtagaccagagacagagagagaccatctgctagcttagctgcgatggcctcgtccaccgtgtgcggtcttgcaggggctacactagggcggc

SEQ ID NO: 25354 - DNA, 209 bp, Oryza sativa
  Clone ID: PAT_MRT4530_30249C.1
tttcccctaggagggttattcaatgttcaggaaaaaaaggtttagtgctactaatgggtaatttgcatttaaagggcatttcacagagggggttgcacgtgtatatgatcccggggaaaatttcacctgtctctgagccctttatataagaaaattttcacatgtatgcataactttgtgtccttcatacacctcacttgttcatgaaa

SEQ ID NO: 25355 - DNA, 452 bp, Oryza sativa
  Clone ID: PAT_MRT4530_3024C.1
agaagcatggacacagcacaatccttttattatcaatctaccatacgtagcaaggggttctcactagcacaaattgagtgaaataatccaggctagtctgacatgtacagcaacaacattacagggcaaattatgatttaccattcaccaaaatacacagtaaatctgaatatctccgtgcaagacgagcatcagggcggcaggaaacttgaagaaagcagcaacccaaccactgactactgactgagcctagcattgtccatacatcagtgtattcgaagatagttggctcgaattataggctcactgatccaacagttccaacaaaccacccaaagaaggaactttggagaaaggttgtttcctactccctccctccatgacagagaagttgccattatttgccttgaagcattcgttggctggccgtatcacaaaccgggtagtcatga

SEQ ID NO: 25356 - DNA, 138 bp, Oryza sativa
  Clone ID: PAT_MRT4530_30250C.1
gacagtattgcgcatacgccgaaacaaaggttttcgattcttcttatcccaggttgcatttacacatgagataaaacaaaacttggtcggaacatggggttgggggaggccacacggagggaaccatttggagggggg

SEQ ID NO: 25357 - DNA, 285 bp, Oryza sativa
  unsure (1)..(285): unsure at all n locations
  Clone ID: PAT_MRT4530_30251C.1
aattcacaccgatcgatcgagcaacagtagtaggaaccatggcccgtgcacagttggtgttggtcgccgttgtggcagctctgtcctcgccgcccgacgccgccgtggcatcacctgcggcaggtcaactccgcgttggncctgctcacctacgtcgcgggcgcgncccgtcgcggctgctgagggcgtgaggagctaaggcgagcagagaccgtacagcgaccggtgaactgctaanacgggccggcataaggggtaacgcgcaacggcagatccttagtcgcg

SEQ ID NO: 25358 - DNA, 409 bp, Oryza sativa
  Clone ID: PAT_MRT4530_30252C.1
ggccgcgggttttttttttttttttttctttttttttttttttttttttttttttttttttttttttttttttcttttttttcccaggaaactcgttcaacagcggccttgtgcaccaaacatttgcggaaagcacaaccaagccaccctgagagatcataaatttccgggaagtagacacacttggagttttttagaagggttagccaggcacatagtttttgaacacatgaaactatttttaaacagttagattccaagcacaatatttcattgacggggcattacaagattataatgggtggcacaggagtggacattacacattgctttgataatacagctttatgcccagcacttgcttcccgaacattgcacatacaccttttgaataggcacaggcggggca

SEQ ID NO: 25359 - DNA, 1152 bp, Oryza sativa
  Clone ID: PAT_MRT4530_30253C.1
atgaggagtagtgacatagagaagcaagatgaagtcatgctacctggcttcaggtttcatccaacggatgaagagctcgtcagattctaccttagaaggaaaatccagcagaagtctcttcccattgagctcatcaggcagctggacatctacaagtatgatccatgggatctcccaaagttagcaagtactggagagaaggaatggtatttctactgcccaagggataggaagtaccggaacagcacaaggccaaacagggtgactggagcaggtttctggaaggccactggaaccgataggccaatctactcctccgatggatcaaagtgcataggcttgaagaagtcccttgtcttctacaagggcagagcagctaaaggcgtcaaaactgactggatgatgcacgagttccggctgccatcgctcactgacccttcattgccacagaagaagccactcgagaagatcattccaccaaatgattcctgggcaatctgcaggattttcaagaaaaccaattccacggcacaaagagcgctctcacactcatgggtatctcctcccttgtccagcacaaatgaagcctacactgcccctgtctcgcagaccacacagagaagtcagcatacctcagataacacatcatcagtaatgaccgatgccatctcctccaccatccagttcaccggaagtagctacttgccttcaacagttccttcatgccacaacccactcagcatgattgacagcaacagcaggccagatgcatctgtacctctaccctcaccggttgcagagcatcagaccatgggtatcctctcagcaatcccacttgatattacagctgggattgacattgcatccatggttttcaatgcatcatccttcacactcccaaacatggatagaatgactgcaaacatagagtttggccaaccacagaagtgcaacagcagcagcagcatgaccaacagatgtgtggtcgacatgcctgatgttgctaacaatatcaacagcggtccacggtccatcaacttcaacctgcaaggaacactttctgatgactggagaatgaccttgccatgggaatcactcccttgcacgacagaagtctcaacaaatttccagtcaaccaagtgctatacttag

SEQ ID NO: 25360 - DNA, 639 bp, Oryza sativa
  Clone ID: PAT_MRT4530_30254C.1
ggtttgcattgccattacaagccagcacagtggatacagatagccaggtgctctctattggagaagaaaaaaaatggagccctgaacaccctgattggaactcactattgcatgaaagaatgatgagatttcttgtcttatagtttttaaagattttttttctaaagtcagtcttagttacattcatttgttatattccagtttcagacttattggcactaggttctgtgagatcttttttttttttacatcgtttgagtatcatagggtgattcagtaccaccttgacccctgtttttatcagagctctaaacttctaacaccacttctaacttttgagctagtcttctaaccttgctgttttctgaacaaagatgtatactcaagattggtcatagatggagatattctgtgaacagaactaacataatagcaccaaattagtcagacatactctttacaaaattactttggagtttgttgtccactccttgaactagtacaatattgtcctactgaatgccttcctgcctttcaacttgaaagttccctattttatctgttagttcttttataaaatgtaactgcacattgtcagaaggatttgcatcttatttcactttgcgccagttttaagta

SEQ ID NO: 25361 - DNA, 189 bp, Oryza sativa
  unsure (1)..(189): unsure at all n locations
  Clone ID: PAT_MRT4530_30255C.1
gcgcccgttcgcggcggcgggagaggaactcggcggcttccgcgccaccgcccgtcggggtttgacttcgagttcgacccgccagccgtcgtctacgacgtcgtcgcgtgagctaggaggaatcgatcgatcgaccttagcttctgctcggagaggattttttttttctccgggancatttttgacact

SEQ ID NO: 25362 - DNA, 459 bp, Oryza sativa
  Clone ID: PAT_MRT4530_30256C.1
tttttatccgatactacaaagaagctgttcttcctagagttgatcgaagaaaggcttataaggatatcaccttttgcaaaccgactgtcctttgatgctccatcagctgttcaacggttgagatgtctggctaattttgaagccttaaagttttctaagccgatcacaactttatctgacattttagtatctcgaatgagagaaaaaagtgccgaaaacaatgggaaatatgtagcggtgcatctccgttttgaagaggatatggttgcattctcttgttgtgtcttcgacgggggtgaaaaggagaagaaggaactggatgcagccagggagaggggttggagaggaaagtttactaggccaggacgtgtaataaggcctggagcaataaggatgaatgggaaatgtccacttacacctttggaggttgggttaatgcttcgcgggatgggtttcagc

SEQ ID NO: 25363 - DNA, 927 bp, Oryza sativa
  Clone ID: PAT_MRT4530_30257C.1
ggcttataaggatatcaccttttgcaaaccgactgtcctttgatgctccatcagctgttcaacggttgagatgtctggctaattttgaagccttaaagttttctaagccgatcacaactttatctgacattttagtatctcgaatgagagaaaaaagtgccgaaaacaatgggaaatatgtagcggtgcatctccgttttgaagaggttagtctttcttctgttaacaaatcgttctggactattcatgatacctttgggtgctgattctgtccaaaataataatggggtccgaatcccctgtttctcagacaagagaattgtcaaccaattgatttttcttttgcaggatatggttgcattctcttgttgtgtcttcgacgggggtgaaaaggagaagaaggaactggatgcagccagggagaggggttggagaggaaagtttactaggccaggacgtgtaataaggcctggagcaataaggatgaatgggaaatgtccacttacacctttggaggttgggttaatgcttcgcgggatgggtttcagcaataacaccgcgatctatttggcttctgggaggatatataaatcagagaagaacatggcacctctccttgaaatgtttcctctcttgcagacaaaagaaacattggcatcagatgaagaacttgctccattcaagaatttctcttcaaggatggcagctatcgattacacagtatgtgttcatagtgaagttttcgtgactacccaaggtggaaattttcctcatttccttcttggtcataggagatacatttatggtggtcattcgaagacaattaagcctgataaaagaagattagccatactcttcgatagtccacgtatcggatggaagtcactgaaacgtcagttggtgaatatgagaacacacagcgatgcc

SEQ ID NO: 25364 - DNA, 1411 bp, Oryza sativa
  Clone ID: PAT_MRT4530_30258C.1
atggccagcagcagaagctctctggtggtcgcaatggcggtggtgatcctgcaccggtggtgctgcgccgctgctccggcggccgcggcggcgaaccggacacggacgccggcgctgttcgtgttcggggactccatcgtggacgccggcaacaacaacgccatcacgacgctgatccggtgcaactttgcgccctacggcaaggacttccccggccacaacgccaccggccggttcagcaacggcaaggtccccggcgacatcctcgcgacgcagatgggcatcaaacagtacttgccggcgtacctcggcgcggagctcagcgacttcgacctcctcaccggcgtcaccttcgcctccggcggctgcggcttcgacccgctcaccgccgagctcgtgtcggttctgaccatggacaaccagctggacctgttcaaggagtacaaggagaagctccggcgcgtcgccggcgacgcgcgcgccggcgagatcgtgtcggagagcctgtacatggtggtcaccggcaccgacgacctcgccaacacctacttcaccacgccgttccggcgagactacgacctcgactcctacatcgatttcgtcgtccggtgcgcctcgggcttcgtccggaagctgctcggcatgggcgcgcggcgcgtgaacgtcgccggcgcgccgccgatcgggtgcgtgccgtcgcagcggaccaacgccggcgggctcgaccgggactgcgttgcgctgtacaaccaggccgccgtcgtgtacaacgcccggctcgagaaggagatcgagcggctaaacgtcacggcggcgccgccgggcaccgtgctcaagtacatcgacctctacacgccgctgctcgacatgatccagcgccccgccgcctacggattcgaggtgacgaaccgaggttgctgcgggacgggggtgttcgaggtgacgctgacgtgcaacaggtacacggcggatgtgtgcagagacgtcgacaaattcctcttctgggacacctaccatctcacggagagaggctacaacatcctgctctcccagataataaccaaatacggcttctgaacttcttaattctgatatagcagaatcttcagagaagaaaacgaggaaactttgatttcgtagtatcatctttcatcagtgcttcagcagcagctacagcattccaaacttcagtgctgaaatatgtggtactaatactgaagatctgatgggcatgatcctggaaaggttcattccataagctgcagtgtggcagcttaggtttcagtttgccagttaagtatcttgctgtgatgctgaaccctacactgagaaatggtgaccagaattttcatgtcaaaaatatgtggaaaatacagtttcatctttcatgtaaaggacaaacattcagcct

SEQ ID NO: 25365 - DNA, 329 bp, Oryza sativa
  Clone ID: PAT_MRT4530_30259C.1
agctagggcttcacatgcacagtccacgcgtacctaggctcgtatccagtggaccgcccgccctttttttttttaaatcaacaagcaaaggtacagatgtgtacctaataaacgcgacctggatcactgcagacttttactggcgaattcgctcatatgcagtctgaacgaatcctccaaatcgtaaaattacatgaacacatctgctactgtcgagtacactcacacatgcaccaagagtctagtactgatgaattccctgcaacaatggcctacagaaagaacatggcttcttctccttccttcctacggcgacatgggacacgagc

SEQ ID NO: 25366 - DNA, 2811 bp, Oryza sativa
  Clone ID: PAT_MRT4530_3025C.1
atgccgccgctgttgggcgtctacgacttcaccgccggcctgcctccgtcgccgccgactggtgtcctcgcctatacggttggttggtcacaccaccgttcatgggcgtccacgacttcaccgccggcctgcctccgtcgccgccgactggtgcctccgcctacacggctggcctattatgccgccgctgttgggcgtctacgacttcaccaccggcctgcctccgtcgccgccgactggtgtcccagcctatacggtcggttggtcacaccaccgttgatgggcatcgtcatctacactgccggcctgcctccgtcgccgccgactggtgtcatcgcctatacggttggtcggtcacaccaccgttcatgggcgtccatgtcttcaccgaccggctggccttcgccgccgccgactggtgtttccgcctgcacggctggcctattatgccgccgctgttgggcgtctacgacttcaccaccggcctgcctccgtcgccgccgactggtgtcctcgcctatacggtcggttggtcacaccaccgttgatgggcatcgtcatctacaccgccggcctgcctccgtcgccgccgactggtgtccccgcctatacggtcggttggtcacaccaccgttgatgggcatcgtcatcttcaccgccggcctgcctccgtcgccgccgattggtgcctctgcctacacggctggcctattatgccgccgctgttgggcgtctacgacttcaccgccggcctgcctccgtcgccgccgagtggtgcctccgcctacacggctggcctattatgccgccgctgttgggcgtctacgacttcaccgccggcttgcctccgtcgccgccgagtggtgcctccgcctacacggctggcctattatgccgccgctgttgggcgtctacgacttcaccaccggcctgcctccgtcgccgccgactggtgtccccgcctatacggtcggttggatccagatccagatatgcataaaagggattcatggctttaagcttatctcttacgctctaggaatggatcagtcagaacatcaccaaccggccgcctcgtctgccgccgactggtgcttccgcctgcacggctggcctttaatgccgccgttgttgggcgtctacgtcttcaccgaccggcttgtcttcgccgccgccgactggtgtttccgcctgcacggctggcctttaatgctgccgttgttgggcgtctacgtcttcaccgaccggccgcctcgtccgccgccgactggtgcttccgcctgcacggctggcctttatgccgccgttgttgggcgtctacgtcttcaccgaccggccgcctcgaccgccgccgactggtgtttccgcctgcacggctggcctattatgctgccgttgttgggcgtctacgtcttcaccgaccggccgccgcatccgccgctgactggtgtcaccgcctgcacggctggcctattatgccgtcgttgttgggcgtctacgactccaccaccggcctgcctccaccgccgccgactggtgtttccgcctgcacggctggcctttatgccgccgttgttgggcgtctacgtcttcaccgaccggcttgccttcgccgctgccgactggtgtttccgcctgcacggctggcctttatgccgccgttgttgggcgtctacgtcttcaccgaccggcttgccttcaccgctgccgactggtgtttccgcctgcacggctggcctttatgccgccgttgttgggcgtctacgtcttcaccgaccggcttgccttcgccgctgccgactggtgtttccgcctgcacggctggcctttatgccgccgttgttgggcgtctacgtcttcaccgaccggcttgccttcgccgccgccgactggtgtttccgcctgcacggctggcctttatgccgccgttgttgggcgtctacgtcttcaccgaccggccgcctcgtccgccgccgactggtgcttccgcctgcacggctggcctattatgctgccgttgttgggcgtctacgtcttcaccgaccggcttgccttcgccgccaccgactggtgtctccgtctgcacggctggcctattatgccgccgttgttgggcgtctacgtcttcaccgaccggcttgccttcgccgctgccgactggtgtttccgcctgcacggctggcctttatgccgccgttgttgggcgtctacgtcttcaccgaccggcttgccttcgccgccgccgactggtgtttccgcctgcacggctggcctttatgccgccgttgttgggcgtctacgtcttcaccgaccggccgcctcgtccgccgccgactggtgcttccgcctgcacggctggcctattatgctgccgttgttgggcgtctacgtcttcaccgaccggcttgccttcgccgccaccgactggtgtctccgtctgcacggctggcctattatgccgtcgttgttgggcgtctacgactccaccaccggcttgcctccaccgccgccgattggtgtttccgcctgcacggctggccattatgccgtcgttgttgggcgtctacgactccaccaccggcctgcctccaccgtcgccgactggtgtttccgcctgcacgctggcctattatgccaccgttgatgggcgtctgcgtcttcaccgaccggcttgccttcgctgccgccgactggtgtttccgcctgcacggctggcctattatgccgccgttgttgggcgtctacgtcttcaccgaccggccgcctcgtccaccgccgactggtgtttccgcctgcatagctggcctgtta

SEQ ID NO: 25367 - DNA, 159 bp, Oryza sativa
  Clone ID: PAT_MRT4530_30260C.1
cccacgcgtccgctaaggatgctgatgaagatgatgatgacctggatctttttggtgagggaaccgaggaagacatgaaagcagcttatgatctttcagctttcaaggccttttctaagtatatagtttgcgtaaaattattttttctgtcttatgcct

SEQ ID NO: 25368 - DNA, 360 bp, Oryza sativa
  Clone ID: PAT_MRT4530_30261C.1
atggtgcccacctcctgcacattgcacagtggggcgctagcaggtgggacaattccggtggtagagatggagatggctcaacaggaggcgtcggaggagatggggagagccaccgctcctcgtccccgctccgtgtcatgggtggcactgcaggccatggccgcagcggcaacggtgaggtgggcagtggccgcggccggaagggagcaagatgggaaagagagaggtgtgagccgggcgccacgaaaagattgcctaggaggagccgcggttgggcaaccccgatgcatggtggcgaaccggcctcgagcggagccgcagcgacctgccatgaggcggagcgatggcgcctcctgttag

SEQ ID NO: 25369 - DNA, 436 bp, Oryza sativa
  Clone ID: PAT_MRT4530_30262C.1
gttgggtaaaaacactagcccctgtatatgtagcacctgagggaggcaaccccaagtgattactggaactgcctggtgcgcactgggcaacccccaagaattgcaagtttggttgctgcctggacgcactgtgtgcatgctggtgttgatgcacaatactactatgagttggtgggatttggagagaagagagccaagacttagatggtttatcagtaatcaccctatacgcacgtgggtcggaagaagactgctcttagtgacctgaatgagcatatgaaatgtgtgggtctaaagacatcgtatgatggtatggaacctcatgaagttgcgttcgttcgttcgtttggttggttggtttgctaccctgctatctaataataatacaataatcacccgaagaacccctcttggttctcaaaaaaaaaaaaaaaaa

SEQ ID NO: 25370 - DNA, 423 bp, Oryza sativa
  unsure (1)..(423): unsure at all n locations
  Clone ID: PAT_MRT4530_30263C.1
tttgttttttttatttttttggttttttttttttttttttttttttttttttttttttttttttttttttttttttttttggggggaaaaaaaggggggttaaaaaacagcctaaaaaattttgaaacgaaaaaaggaaccccgataaaaaaattccacgggaaaatgggggacccttgaccaaaggggacaccattttttggttgaacaaaacaccccttgcacagggattaacgggnngacaaaattgaaaggggcccccaaaaaaaacttgatactggaggaaaaacacgcattttaattccgaccaaaaagggggaaaggggaatggtctttaattattggagccgggggaaccgcaaaaggaggggcctcaccaaatccaccccgaaaaccggcaagatccccgggggccctgaaaaa

SEQ ID NO: 25371 - DNA, 765 bp, Oryza sativa
  Clone ID: PAT_MRT4530_30264C.1
atggcggaagctgcgacgctggagggcaagccgcgccgacgctggagagcgaggacgatggtgacgcgttgccgccgtcgtccatccgcggatccccttgggtgtgccgtcgattggctcaagcgggacgcgaacctacagatgcacatgcgtagacacagtgacaagtacaagagcgtgcccatgctgacaaagccgccggcggcggtgaatataacaaaaggcagccggcatggaaattgggacaggtgcagggagccgatgcagaaccctccaccgcgccgtctcgtcggtctcggtggccttctgcttggccttctcggtcttctcgccgaggaagccgctagtctggtccttgctctcggcggccttgtccctcgccgcctacgccgtgccggaggtcttgtccttcgccgcatgtgccgtcacaccgccgccgacttcctccggagagcccacctaaggcagctcactgcgttcctccgccggcggcggcgtggggggaggccctcctgctcccgcgtcgtcgccgccgccgcctcgtcgcccgtcgccgaccgccggagtcccgtctcccgcctcccccaccggtctcctccccacacccgtcggttgccctgctcggtgagagaaaggaagaggagagaggtggagaggggaggggaagaagaggctgaaatgtgggacccatgtggcccccacgctgagtcagctgccacgtcggataaaaccagagtaaaaactgccaagggatctagtttataa

SEQ ID NO: 25372 - DNA, 2055 bp, Oryza sativa
  Clone ID: PAT_MRT4530_30265C.1
gcacgaggcttatctcctatggttgcttccactgtcaccaaagggggactcgccatctaccttgttcctcagttcatgcgaatttcatgcggtcctgggctgtgactgggagtagattgagggttgatctcgtttgcggagtaacaaatttgcaagcctacaactgctagggagaatttgactaaaaatggggtcgtgttgcagcagagctacgtctccagattctggtcgaggaggagcaaacggttatggctattctcaccagacaaaacctgctcagacaactcctagctataaccatcctcagccgccgccgccagctgaggtgaggtacacaccatcagcaatgaaccctccggtagtcccacctgtggttgccccaccgaagcccaccccagacacaattcttggaaagccgtatgacgatgtgcgctcggtttactcccttggaaaggaactcggaaggggacagtttggggtgacatacctgtgcacggagatcgctagtggtaagcagtatgcttgcaaatccatctctaagcgcaagcttgtgagcaaggccgacaaggaggacattcgccgggagattcagatcatgcagcacctatctggacaacaaaacattgtcgagttccggggagcatatgaggacaagagcaatgtccatgttgtcatggagctctgcgctggtggggagctgtttgatcggatcattgccaaggggcactactcagagcgtgcggctgctaccatctgcagggcagtggtgaatgttgtcaacatttgccattttatgggagtgatgcatcgtgatttaaaaccggagaacttcttacttgcaaccaaagaagagaatgcaatgctcaaagccactgattttggtctctcagttttcattgaagaaggaaaaatgtatagagacattgttggaagtgcttattatgttgctcctgaagtccttcggcggaattatggtaaagagattgatgtatggagtgcaggcgttattttgtacattcttctcagtggtgttcctccattttgggctgaaactgaaaagggaatatttgatgctattcttcaaggggagattgactttgagagtcaaccatggccatcaatatccgagagtgctaaagaccttgttagaaagatgttgacacaagatccaaagaaaagaattacttcggcccaagttctccaacatccctggctcagagatggagaagcatctgacaaacctattgacagcgctgttctttctaggatgaagcaattcagagcaatgaacaagctgaaaaagatggctctgaaggttattgcttcaaaccttaatgaggaggagatcaagggcctgaagcaaatgttcacaaacatggacacagacaacagcgggaccatcacatatgaagaactcaaagcaggattagccaaacttggatcaaagctttcagaagctgaagtaaagcagttgatggaagctgctgatgtagacggcaatggatccatcgactatgttgaatttatcactgccacaatgcatagacacaagctcgaaagagatgagcatttgtttaaggcattccagtattttgacaaagacaacagtggcttcatcacaagagatgaactggaatccgctttaatcgagcatgaaatgggcgatacaagtaccataaaggatattatatcagaagtcgacacggataatgatgggaggattaactacgaggaattttgcgctatgatgagaggaggggggatgcagcagcctatgaggctcaaatagtctgtttccttgtagaaaatgatgtacaattacattagtaaactgttttcgccttcttttttttgttccatggatggtagtcgacggataaaaggtttaccctggacgcagcttttgcattgttgagatgattgtgtatattttcttgccttgcccgtgtatggtgtagtgatttgaatgtcctcccttttgtaagttgtttctgcaagtacacacaataaaagagcatttttgcacctcaaaaaaaaaaaaaaaattgcggccgc

SEQ ID NO: 25373 - DNA, 312 bp, Oryza sativa
  Clone ID: PAT_MRT4530_30266C.1
atgcgcggcgtggagcaggcgaagacggggaagggcccggcgacggtgaagacgctggcctgcacgctctcggtgatcctcatgtccagcgtcgccagcatcctcaagatccagaacaggggcctcaagctcggcaccgtcagccccatggaccaggtgctatggcggactcacctcctcgaggcctccctcatcggtcccttgtgtggtcaactgaatatcagtctcatcacttctgtttccatgcttttttgctctattaatctgataaaccacattgtggcaaacgcgaaggaagtattcaagaactag

SEQ ID NO: 25374 - DNA, 347 bp, Oryza sativa
  unsure (1)..(347): unsure at all n locations
  Clone ID: PAT_MRT4530_30267C.1
cagatcttcatgagcggcgccgacgacnccaccatggaggccctggagcggactacaccgacctcaactacggcatgccncncatggccatcaacctccccggttcgctactaccgcggctcagggtcgccggaactcgtgtccgtgctgcagggtgtctcgacggccggagggcgccgccgccaagggttcaaacgtccggggccatggacatatggaccgctcatcgagncgagncnacnggcgcaccgcgtggactccacttttntcctttagtaaggtatttcgcnttggcgtatcatggcatactgttctgtgtnattgtatccgtcacatttcacacacat

SEQ ID NO: 25375 - DNA, 767 bp, Oryza sativa
  Clone ID: PAT_MRT4530_30268C.1
cggacgcgtgggcggacgcgtgggcggacgcgtgggcggccgcgcgtccgaaggcctcctcgatcgatcgatcgatcgaattgatcgattaatctcctcctccaccaaccaataatataatccagttgtctctgttggccgctcgttgcgaccacgccactacagtcggggcaaccatgggtgcttgtgcaaccaagcccaagacgctcgagggaaaggctcccgaggaggccactcccattgaggcagcacccaaggttgcccttgagaccacaatgatctccaataaggaggttgtggctgatcaagcacctgagaaggtagtggaggaggccaccgcgatggcagagttaccaccaaatgatgatgccattgtcatgcaagacaaggaggaggaagttgaagaaaagatcgtcgaggaggagaagccttcagccccagctgcagaggtgaacaataccgaggtggtcgaggagaccatagaggtaaagaacaccgaggtggacaaggggaccacagaggtgaagaactccgaggaggagaagccaattcagagctgataaacgaccatgtaaattcgctccatgattatatatgctcatccttatgcgtgtaatccattagggttggcatatatatctagttccatgtgacatggatgaaccatgtaatctttgatgtcacccctttttcctccacgggatcttaatgaaaaacaatgaacatatgtcgaccatctaaaaaaaaaaaaaaaaaaaaaaaaaaaa

SEQ ID NO: 25376 - DNA, 300 bp, Oryza sativa
  Clone ID: PAT_MRT4530_30269C.1
atgatggttgtggaaggggaattgtccgaagtgccctctaaccgccattgggatgcaatcctggacgtccacacgaaaacctggatccagcggcgccaggattggttcggccaaacaaccaggtttggccgaacctggggctggcccaatccagcccaattttggctggtggcctcctctattgctccactccgcagacttgtgaatttcggcccaattcatcgtgtcaattttgagttcttggcccattcatacataagtttgattgtcgacatcgtccgattgatttatcgtttgtgt

SEQ ID NO: 25377 - DNA, 503 bp, Oryza sativa
  unsure (1)..(503): unsure at all n locations
  Clone ID: PAT_MRT4530_3026C.1
ggggcggaaccctatgaaaaacgcacagcacgcgggcctctatcggggttccgccctattgtggcgccttgtgccacaatgttctttccggngttatccctctattggtgtgaaaacccgtattaccggcttgaaggtttccggattgnaaagcggncatgtagacaccatcatcccatggccggcctccttcgccaccccatggccctggccccattggaactggttctttcaccatgctataaggaacctggaaaacggttacaaccaagttaccttcctgaacatggaccccgatgccatcaatgtaccatccctccctaccatggaatcctactatcctcccatcagaaaaactggtggagaaatacgtgccacactcatccccatatgtgagtcgtattacaattcactggccgtcgttttacaacgtcgtgactgggaaaaccctggcgttacccaacttaatcggcttgcagcacatncccctttcgccagctggc

SEQ ID NO: 25378 - DNA, 506 bp, Oryza sativa
  Clone ID: PAT_MRT4530_30270C.1
tccgggctgctgtatggtttggttgtggaattggtggagcggataacacatttgccaacaggaaacaagctatggaccaatgattacgccaatgctgttgaatgacagactgcactgatgaggggaaatgctggtacacgcactgcaaggtgacccggtgccaggaatgtgccccgggtgcagacccacgcgtgccgaagcgcgcaggcggtggtgtactgctgctggtacgccccaaaggccaagagcatgcatggagatgaagctcgcagtggatcgggtgcaactaaaactggagatgttatctgatggtgttggctgagatgaattgtccatggacatgggttgctatggagtgtcaaatgaaactgaggcaaatgtcccacaattccggtctcttgtgtgcaacatggccattacctgttagcaggccacctccttttcaacagcccattaactgtaagccaatctctttcggtgccttccaaaaaaaaaaaaaaaaaaaa

SEQ ID NO: 25379 - DNA, 882 bp, Oryza sativa
  Clone ID: PAT_MRT4530_30271C.1
agacaaacgacagatcctacaatgctcaaaaccaaaaccactacatcagttcaacatctcgaaacaagaaattgtaaattgaaaaaacaaaacaaaataagccacggcaaattgtccaaatttcacgcgtcgacgaggatgcacaaggaaggaactaagagtactagaggtttacttgttcaaatcgttaaacgattggttggaattagtgggaggtcatcgggaagcgtcgacggtgaaggcctaaaccgtcggcttgtacccctggccgcgccgaggctgaccagcacggacttgaggaaactcctttcccagcgacatggctccggcgccctcaaaggacaccgcttctgacgtcgacaaggacggtcgctgctccatgcatggctccggcgacgacgggagggtgtcattaatggcgctgctagagtaggcggagcggtggcgacggcggccggggacgccagcctgaggcgcatgatgaacgccgtcttggtgacgcccacgccgatcgtcgccgcgagcaccgagttgcggctagctatgccggctgccttgaagatgctcgggccatacaacaccacggcctcgatgccggtgaggtgctggaagaagtggatccccagggcagcgatgacgatgcgctgcaccggcggcgtcgggtgcaggaacgccgagggagccgacgctgacgccggcgacgcagcggccggcgaggagtgcagcgaagttgggggtgaggcccatgaggacggagcccgcgaggagatacaggcggcgagatgcaggagggaagagagggaggaggaagaagggataagagataatgacatgtgggacttacaagtcagtgggtcccataattttttttttggtgaatga

SEQ ID NO: 25380 - DNA, 279 bp, Oryza sativa
  unsure (1)..(279): unsure at all n locations
  Clone ID: PAT_MRT4530_30272C.1
atgacgaaccccggagtgaagcggggaggaccatcggcgcaccacacggagtcgacgcgcgcgagcaccgcgccgcggccccgccccggggtggtggtgctgttgntgctccgcctccgcctcccgctgcttcccccgccgccgcggagacgacgacgacgacgacgcgggcgaggtgggccaccggtgggtaccatcccacgtgtcgtgacaggagtggcctgccgccgcgccatccgcgccgcctgccactgcacgccgctgctctggcgccgctga

SEQ ID NO: 25381 - DNA, 294 bp, Oryza sativa
  Clone ID: PAT_MRT4530_30273C.1
cgcattccacaacagtcgacgggcaataataggtcttaacttccatgtttaacccgaacagaaaataaagttttaaaggactgacgtaatgcacaaagcgagcatatgttaacggtcaatgcaacaactgaaatgaccggggaccaatcttaacgagtactaaagaagctacatttcttagcatgcacatatggaaggcaccacttgaacgaggctcatttcttcttggcggcagtcttgatcaccttggaaccggtagagtccttcttttactcgtcttgatgacgccaacag

SEQ ID NO: 25382 - DNA, 450 bp, Oryza sativa
  Clone ID: PAT_MRT4530_30274C.1
cgttaacccttgtactgcgccgccgcctgctgcactgacctccccgccgtcgtcgcgagccccgcggcttccggctgccgtcgccgcgagccccgtggcttccggctgccgcctcccccagcagtaacctccccgagcgccgaggcttgcggtgctcgcggcgccgccgtcgccccgagcgacagccccccgcgcgcctggtctgctcgcggtcacttagtcgtggaggagcgcgatgcgagggcaaacaggccgtggatactcgcgtcgccgccgtcgacgccgtggccggccccgcgcgcggcaaggagcggtgcatcgctgctgccgggcctatcggcggttggtagagcgctggtggtgggctatcggtgctgccaaatcgccgccgtcgacgccgtcgccggccccgcgcggcaaggagcggtgcatcactgctagcggatctat

SEQ ID NO: 25383 - DNA, 335 bp, Oryza sativa
  unsure (1)..(335): unsure at all n locations
  Clone ID: PAT_MRT4530_30275C.1
aacagttaaaatcgctatatatatatttatatatctccgagatcacgaagaagaacaagagattacaaacacaagaacactgaatgattcgatgaaagaaaaaaagcctgcatgcatggcatgcaactgcaacaaatagagattaacaaaaaataattaaaaacacacgaacaaaattaatcaggaagatcaacacgaagccggactaagaatcatcagtttgatgcgggncgnngngaangaccaaccacccggnngntggngggnttagacggggacgcgctgcacatgctgaagctgttctgcctgtttgagcgcacgcccacgccggtgcc

SEQ ID NO: 25384 - DNA, 353 bp, Oryza sativa
  Clone ID: PAT_MRT4530_30276C.1
aggtttggaaggataacgattgaagcaatggcattcaagttgccagtgttggtaaaactccctccctccctctcttgaagtgctcctagttataccccattgatccacaaacacaaatagtttttgactcactagtctcgatgcaagagttgagtacaattcttttttttatcaaagtatattagaaacaaaaatatatcataattttactggggaatgcaaatccaatgacactaatttcacatgatccatttctataacctcacagttcagtggtcatgaatgattaactgcatagatctcaaggtaacacgtacgtatttatcgatggagggagtataattttctacttc

SEQ ID NO: 25385 - DNA, 361 bp, Oryza sativa
  Clone ID: PAT_MRT4530_30277C.1
gcacgagggagaaaataacacgattgctcctaatctatattaccaattttgtttaaaattattctatgattactcatcctataagaaaaggcttcttttagccttccattgagaaagaacactgctacacatacttaaaatagaatattacaaaacttttataaataattaatgatcttaaccattgatttaactagataagagtcataaaaaatctagaagaactctcaacactctcaacatgacacgtattagtaagagtttagtaagaaattttaggttttgtttgtcacaactctagatttcaaatccaccttggattttagtttgtatgttaaattatagtggtttaaaattttat

SEQ ID NO: 25386 - DNA, 178 bp, Oryza sativa
  unsure (1)..(178): unsure at all n locations
  Clone ID: PAT_MRT4530_30278C.1
caaacgtaagtaccggtgtggtggtggtcaagcaagcccaacgagncaagtacgagtataataccggggtgtgtgtagagtgcgtgtggtaacgtgtgtgngaaaaggtgaagtgtgtgtgtgtcaaaaggaaaacgngaaatgagtaagtacttggagggttagcgtagagtgtcgt

SEQ ID NO: 25387 - DNA, 372 bp, Oryza sativa
  Clone ID: PAT_MRT4530_30279C.1
atagcaaactatctcatattcatttttataactttatggtatttaaattgttcatctatatgctcgaataattattacaaatcatctcactattcaaccattccggtgaaaaagctagtactactatgcattatttcattgcatctatatgtgctcttctatttacatttcatgacaagtcatatactactacaaagcatttcattcttcccaattctgcatgaacaaaataccatgcaattaattaataactaatcacccaaattaacacttgacaccaaccaacccaaccaatctagcatcatcaccatcatcatctttgcaattcaatttgcaaagaagaaaaatgaagttaatgtggtgaaggcaatg

SEQ ID NO: 25388 - DNA, 536 bp, Oryza sativa
  Clone ID: PAT_MRT4530_3027C.1
tagtggatcccccgggctgcaggccccccctccttttttttttttttttttttttcacaaacacatccaattcacactcctaattaaattcctcattgatcaatcacatatttaattacataattaaagcacgtacttgtaacaataactgactatagctgtttgccttaattctctatggaccttcatgcaaaaccaaaggccatacacacacacaaacacatccaattaactaactaactattccaattaacctcctaaacaaaacgagattaacacacgtactacgagtactaaacagagactaattacccaacatgaactgcataaagtacagaaattaaatcaagcacctgtactactactagtaccagccaactttacttaaattttcatcaaattttaaatagcttttgttgtacagtagtagtactaggagccattttaattacttttgccgttggagagattctatcatatcatatcaccgcccggtaacttcacctgatgacgtggcatccgatgcatggttgact

SEQ ID NO: 25389 - DNA, 1728 bp, Oryza sativa
  Clone ID: PAT_MRT4530_30280C.1
atgcagcccaactcgaaagcaaaaactcgtcgaaacaatgaaagtaaaaagggtggcgatgcgccgaagtgtattgaactgacgtcccttgattacatggggtcgggtcatatttatacccgaactgtgaagggcttcaaccaacccgtcgacgatcgtagggccaactttctcgaggctggttgcatcggcttgacttcatcggatccggtacttagccgatatgtggcagctgataccattaagccaatttatgtgacaaccgatgctgttcgtaaccaatgtgtactctgctttctcaaacggactctttccaaattggcttcgtttccaatttcgaatccaacccatggtactaccaaatttagtcgtcaacaccactgtagttattgcagcagcgcagctgcagagctgcagcagccaagcctaccgaacaggcccattatcgtggtacaagttgcaaaaacaaccgaaattttatcagtgacacagcagcttcgacctcactgcgatgctactccaacgccaaaaagagcaaacagaaatgatacccatgaagaacatcagcccaaactaccaaagaatcacttcctgcacgaagctagcatcaacaatcctataaggaaaatgcagtgtgtcatcgttgccaagcttcgtcgcacccctacaacaaagcagctccgactctacccaacagaaaccaaaaaggatgataaacacccgccggctttggagacattgcagaagtccaccgactatcgatgtacacggaaggttcttgatgctaggagaggtcaacgcaaaacgacgccttcaagaaggagaacggcacctaatggcgtcgtcgtcgtcatgccggcccatggcctggcaaggctttcgccagcgattcccaatcaaagctccacacaaccatcgtgtacaccaaccatcccaggaccgagcagggacgccgccgccgaaactggatctgggagctccagatccagcaccgccgccgtcatcttcgctcccgcgaccaagctctaccaccgcctacgtatctgccttggcaaacgccggatccatctccgggaacaccggatccattgctcccttgtcgtctccggccgtcgtggcggcgctccgtcctcccgcgccgaggaggagtttcgccgggccgccttacccccgccgcggccttcccggctggctgcctggctttccggcggcggcgaggtggctagagtttcgcccccgagccgtccgtgcgagagcgacgcggtggtccctattgaagcgagaaagaaattagaaacaaaaagatcaaaacagcaagaacattcagagttccagatacagctgctaacctcgaggagggggatgcacgcatctgatctgatgttgacgtctccgccggtggcccggcgaggtccaggattggggatgcacgcggtgccgctgtcaccgtctctgccctcgcgttgtcgtcaacgcctccgaagttttttcttaggagggtatagaagcacgtctcacataacttacgtgaaaaaaaaacggaaaaaggagtatggaaggaacctctgcagtgttggtggcctctcacttttcaccttttcaagtaagttaatttattcaatgcttaacctggatcgacaaaccgaacaaaaacaagaggaatatacgtcggtgcttattaacaaggagaagaagttactaaatttcgagaataaaccatgctgctac

SEQ ID NO: 25390 - DNA, 513 bp, Oryza sativa
  Clone ID: PAT_MRT4530_30281C.1
atggcggtggtggtggggggattgcacgcgtctccaccggcggattctgctgctgtggcggcggtggcgaaggatgcggaataccagaagggtgtgcagaagctagtggacctatggtccaagctgaacccggttgccagggagttcatcccctcgtcggcggcggtctcgtcactatctaggaaggcgctgtcggaggatgcgccggtgttcgattacaactcgattggaagctggaaccggggcggcaaggaatccggcgtagacgcctaccagcaacatcgggcgacagcggcggctgcgcccggacccggagacggcagcggtagctgcggctgcgtgtcacggcggctgcagccttgcccggaggcggcagctgggcctggaggctacgagcctgcgacggcggcggctacgcccggatgctccgagcctatgacggcggcggctgcacctagaggctgcgacggcggcggcccactcgtcctctcccccaagcgtcactcttcctga

SEQ ID NO: 25391 - DNA, 1655 bp, Oryza sativa
  Clone ID: PAT_MRT4530_30282C.1
ctagtggatccccgggctgcaggtctcgagttttttttttttttttttttttttggttgctcgtgccaaacaaaaactgtctttactcaacaaagtcaaagctacaaacacgaacgaaatcaacataaagttgggacaaagtcccccgtattcacacaaaagtaaaaatgcaggtcctgttttaaccacacaaatacagtaaaaaaaatggtcgtgtttgttttacctatgtaactacgctactgctctgattattacaaccatccaccgcgtctgtagcactcccattcacatcgctacagctactccccaaccccacagacccgttggcgatgctcccgccatctctgtggccgccggtgcggctgctgctgctgctgctgtagaagcacaccaccttgcacttcaccacgccggcgcaggcgacgtacacgtggaaccccggcgccaccatcatcttcacgcttgccggctccagcttcccggcgcgcccggcggccgcgtcctccatgaaccgcgagtcgaagcgcgcgccgcggtcgacgcgcaccacgggcagcggcgggtggacggaccgcgcgaggaggcgcaccccccacacgcccttggcggccaggaagaacgcctgcagcagcggctccggccaggcgcgggcgcgcgcccaaccgagggaggaaaccacctcgctcatcttggcgtcgcagaaccggctcaggccctcgctgtagtgcttggtaccgtggaggaggacctcctcccacgtcagcgccgcgatggagtggtacgccgcgaggttggcctcgcagcggcccgccgggtccgccgtgtgcacgtcgccctcggtgtcgagctcgaagtcggcgtggaacgcgcggttcaggaagctctcgaggttcgggccggggttcaccgggctgcggaggtgattggagagagcccgcgtgaggctccgcacggcggctcgcgctgtcgacaccgcccggaggaacgactcgacggggaaggcggcggccgtgggagtggggagcacgcgggcctcgaggcgcgcgagcttcatctccagctcggtgagggagtgcttcagccgcgtggtctcctccagcgcctcgtcccgcgtgcgcgtcgccgccgcgagccgccgcgagaggtcggccgcggccaggcgccactgctcgctctcccctccgtccccaccggacgccgacgtcggcgacggcgacgaccacggcgtggatcgtcgggtgagtgacacgaacagcgagcggatgaccgccccagggccaggcgacgccggcgcgtggagccgctgcttgaagcggcagtcagagcaggacaccgccgcgacgtacgccgcggggtccgctccgcctcctccttcgctcttcgctcgccgcggcgtcttcttggcacccccgctccccccgcggtggttgtggagtggcgtcgcgacgtgcgcgtacttttcgtccacctccgaggccgtcgtcctgccaccgccggcccgcctcgcgtcggatactgctgcggcggggaagggagaggaaggcgagggagaggagaccatggctggcgggcgatggatcgagctcgagctcggctcgctcgctctaccccctgcctgggcgcgctggccaactacaccaaggacaactaca

SEQ ID NO: 25392 - DNA, 1631 bp, Oryza sativa
  Clone ID: PAT_MRT4530_30283C.1
aacaggagggaggagacctggcggaagccgagtcgcaggaagccaccgaactgaccggcattcatgtcccgcgtccgcagtgtcccactcccgccactccttccacccccgtgagggcgtgaagttaacccaaaaaaaaatggacgtcgtcacacacgcgggcaggcaccaccgcaccagtacaccaccaccatcgccccgccccgcatcgcgccccacagcgccatcgcctcgcctgtcgccaccagcacacggcaggcacaggcaccaccgcccctctgaacccgagaaaacccctacttgactcgccacgctccccgccaggaccacggcctccgaggtggacgagaagtacgcccacgtcccgacccccctccacaccccccgcggggggacccggggtgcccaaaagacccccccgccacccaaaacccaaggacgaggccgatccgacccctccgcccaccgccccggcggggtcctcctccgaccgccccttccagcccccggctccccccccccggccgcccccggcccccgcgggccggccctcccccccccctttcccgctcccccccccccccaaccccaccccccgggcgctccccccccccccacaccccgccctcccccgggccccgaggggaacaacccccccctcgccccctcccccccccctaccctccccccgcgttctctccgacagccccgcccccccggcaccaccgccctcgcccaacccacccccccgccacccccccccccccgcccccacacgcacgccccggcccccacgaccccgcaccccccacccaccgcccccatcccgcccagaatcccaccggggccccccccccgccccccccctcccaccctgccccaccccccggcccccgcccccgccaccccccaacccccccgcgcccccccccgcactccccgcgccccccaccccccgcccccccccccccccgccaccaccttgcacttcaccacgccggcgcaggcgacgtacacgtggaaccccggcgccaccatcatcttcacgcttgccggctccagcttcccggcgcgcccggcggccgcgtcctccatgaaccgcgagtcgaagcgcgcgccgcggtcgacgcgcaccacgggcagcggcgggtggacggaccgcgcgaggaggcgcaccccccacacgcccttggcggccaggaagaacgcctgcagcagcggctccggccaggcgcgggcgcgcgcccaaccgagggaggaaaccacctcgctcatcttggcgtcgcagaaccggctcaggccctcgctgtagtgcttggtaccgtggaggaggacctcctcccacgtcagcgccgcgatggagtggtacgccgcgaggttggcctcgcagcggcccgccgggtccgccgtgtgcacctcctccagcgcctcgtcccgcgtgcgcgtcgccgccgcgagccgccgcgagaggtcggccgcggccaggcgccactgctcgctctcccctccgtccccaccggacgccgacagcaggacaccgccgcgacgtacgccgcggggtccgctccgcctcctccttcgctcttcgctcgccgcggcgtcttcttggcacccccgctccccccgcggtg

SEQ ID NO: 25393 - DNA, 649 bp, Oryza sativa
  Clone ID: PAT_MRT4530_30284C.1
cagcgagcggatgaccgcccccagggccaggcgacgccggcgcgtggagccgctgcttgaagcggcagtcagagcaggacaccgcccgcgcgtacgccgcggggtccgctcccgcctcctccttcgctcttcgctcgccgcggcgtcttcttggcacccccgctccccccgcggtggttgtggagtggcgtcgcgacgtgcgcgtacttctcgtccacctccgaggccgtcgtcctgccaccgccggcccgcctcgcgtcggatacctgattattacgccgcattgttgaagcgcaatccttgaaaaaacggagatgctaactagcgaggaagaggacgcttactgctgcggcggggaagggagaggaaggcgagggagaggagaccatggctggcgggcgatggatcgagctcgagctcggcgagctcgctctaccccctgcctgggcgcgctggccaactacaccaaggacaactccgtctggttgcgattagcggggagcgtggcgagtcaagtaggggttttctcgggttcagaggggcggtggtgcctgtgcctgccgtgtgctggtggcgacaggcgaggcgatggcgctgtggggcgcgatgcggggcggggcgatggtggtggtgtactggtgcggtggtg

SEQ ID NO: 25394 - DNA, 2198 bp, Oryza sativa
  Clone ID: PAT_MRT4530_30285C.1
tcaagatccaataccagcaacacccttggctttcgccgcagcttgttttgctgcggcggccgccgtcgccgccgccgctgcggccgccgacgcagctggagacgacggcgcagctggcgtcttccgtggagcttcaacagcatgctcctgctgctgctgtgtgctatttgcctgggccaagatcttctttatctgggctccggtgagagtctcgtgctcaagaagtgcttgggctagaacatggtgctccttgctgtgttttgtgaggatggtctttgcattgttgtaggcattctccagcaggctcttcacctcctgctcaatcagaagccttgtttctgtgctcatgctctttccatcatcctcataattgtaagagacaaagccaagctgcttgctcatgccatatttcgtaaccattgctcttgccattttggtcgcgttctggaaatcagacgatgcaccggatgttacctcgctatccccaaaaataagctcctccgccacccgtcctgccatggagacatccagccatgccagcatctgtttccgtgagaagcttgtctcatctttttctgggagttgggacaccatcccaagggtccttcccctgggcactatggtggctttgtggacagggcgagcaccttcagtgtggatggcaacaagggcgtgccctccctcatggtacgccgtcaatttccgggattcatcagaaataactgctgacttgcgctcactgcccatcatgatccggtccttggcatactcaaggtcattcattgtaacggcttttgccccatccatggcagccttaagagcagccacatttaccaagttagcaaggtctgcacctgagaatccaggtgttcccctggcaatgatcatcaaatccacatcatcactcttcaagaccttcaacatatgggactctaggatttgccgccggccttcaacatcaggattcggaacaacaatatgccggtcaaagcgcccaggtctcactagtgctttatctagggactgaggaaagttggtcgcagcaatgacaattattccctcattctgcttaaagccatccagttcgacaagcaactggttcaaggtcatcctcatgtactgttgatcctttggatttctgctcccaccgattgcatcaatttcatccatgaatatgatacagggagaacgttttttagctgcagcaaaaaggtccctgactcttctagctcctacacctacaaacatctcctcaaactcactaccgctgcatgagaagaaagggacaccagcttccccagcaacagccctcgctaacatggtcttcccagtgccaggagggccaaccagcaagacaccttttggcagttttccaccaagatgagtaaaacgcttgggatctcgaagatagtgaactatttcctcaagttcagctttggcttcatcaacaccctttacatcactgaattttgttttagaatccatgattggttgaacttcttgacttagaccaagacctttgcttattcctctatcctctataagagccccaatgcccgaaattacaaggaaagttagtgcaaggcttcgaaaggtacgccaaatctgatccttaaaatggcctgtttctgatgtcaccatgtgaatgggtgcgtttgcagtgccaagaattccatcttttgtcgcttgtccagcactctttaatgcagaagagctaccaactctttctccctctcctcctgaaacagccatacctctccgtagtgttttaagcaaggtgctatcatccagcctatcaaccttgacaagagctttaacatactctgaaagtgctaaacgattggagtgcaaccatggctggctttcaaatatttgtatgacacgttctgggtcacttttatatatttctttcagcagagaggcttcacttggaacgtcgaggttttgcaccctgcgtgctaagctaccaacaaagcttgactgatacctctcatttaagtttttaagtgtgccaccaccgttgacgtcacctctaagcagccacgaaggtctggaggttatcagttcattgtagattgtggatgctggtcgactcctcgcaagctgcgaaaggacgcgcctccacgccatcggccggaatcccgccgccgccgcctcgatgagaccccaaacccacaaggaaaactaagacccctgaa

SEQ ID NO: 25395 - DNA, 224 bp, Oryza sativa
  Clone ID: PAT_MRT4530_30286C.1
gcgagacaatgggagaggatcggctatcatgctttggcacatgacagcggatcggcagccctagctcctcagatgttggttaacagcatgaggatgccgacaaacggaggagtgtaaccctacataaatgaacttgaaaaggactgtaggcacacgaacattataagaatctgcatagtgacgaaagcaccagttcatggttccgtaggacagattacccatgc

SEQ ID NO: 25396 - DNA, 1365 bp, Oryza sativa
  Clone ID: PAT_MRT4530_30287C.1
atggctgatgatggtcgctgcccacctgatgtggtgtcgtataataccatcattgatggtctcttcaaagagggtgatgtggacaaagcttacatcacataccatgaaatgctggaccggagggtttctccagatgctgtgacttacaactctatcattgctgccttaagcaaggctcaagctatggacagggccatggaggtacttacagtgatggttatgcccaattgcttcacatataatagtattatgcatggatattgttcttcaggacagtcggaaaaggctattggtattttcagaaagatgtgcagtgatggtattgaaccagatgttgttacttataactcgttgatggactatctctgcaagaacggaaaatgcacagaagccagaaagatttttgattctatggtcaagaggggtctcaagcctgatattactacctatggtaccctgcttcatgggtatgcttccaaaggagctcttgttgagatgcatgatctcttagctttgatggtacaaaatggcatgcaacttgatcatcatgtcttcaacatattaatatgtgcatacactaaacaagaaaaagtagacgaggtcgtgcttgtattcagcaaaatgaggcagcaaggattgactccgaacgcagtgaactatagaacagtgatagatggactttgcaagttaggtagactagatgatgctatgcttaattttgagcagatgattgataaaggactgacacctaacgttgttgtttatacctccctaattcatgctctctgtacctatgacaaatgggagaaggccgaggagttaatttttgaaatattggatcaaggtatcaatcccaacattgtgttttttaatacaatattggacagtctttgcaaagaagggagggttatagaatctaaaaaactctttgacctgttgggacatattggtgtgaatcctgatgtcattacatacagtacactcatcgatggatattgcttagctggtaagatggatggagcaatgaagttactcactggcatggtctcagttgggttgaaacctgatagtgttacatatagcactttgattaatggttactgtaaaattaatagaatggaggacgcattagctcttttcaaggagatggaaagcaatggtgttaatcctgatattattacatataacataattctgcatggtttatttcgcaccagaagaactgctgctgcaaaagaactatatgccaggattaccgaaagtggaacgcagcttgaacttagcacatacaacataatcctcatggactttgcaaaaacaaactcactgatgatgcacttcggatgtttcagaacctatgtttga

SEQ ID NO: 25397 - DNA, 1575 bp, Oryza sativa
  Clone ID: PAT_MRT4530_30288C.1
aagcttatcgtgcacactccatgcaactcctgtcctgttgcatttgctaagaatccaccggctgcatctccagtacccccccctcaactatcacggtcgaccgaattacccccctccccgaactacaaaaccagatattcttcaccccctgtcgagcggccgcctcctcatccccccccaccgccgcgtcacccgccaccgccgccgtgcacgccatcctcgtcgtcctcctcctcatcccccttcctcagcgccgcccgccgccgccgcgtcctccccgcgctctgcctctccaccatggccgccgccgccaccgccaccacacctccctccgcccaccgcgttcgctgctctgtgcgccggcgctcccttcctccgtgcgtcgccccgacggcgctccctcccttcccgcagaacaccgcctccgccagatccgtcgcctggttgcctcgcctccgccggatccaccctactgccgtcacccctcctcgtcgtcgagccgccgccgctcctccgcctcgccgaaccaccgccgccgaccctcctcttcgtcgagccaccgccatccctcccatgccgccgccgccgccgtcctccgccttgtcgagccgccgccactcctcctccttgtcgagccgccgctaccatctttcccatttccgcctccctctccttcccttcttcctcctccctccccccctcctcccccggcatgcaaacagccgagagatcctccccctgggccagcccaaccccccccccccaacccaccgcccgacgagccttcgccaggctcgccgccttcaagatcgtgcacagcaacaccagcatgcccatcttccatgactccacctgcaacagcactccctttgcccccttctccttgctcttcgacacccccgcttcatgatcatgctttgccttgaccagcaaactctcagcctgagaagcctccattgcctccgccgcctctgtgccgaagccgtcgcccaccaccactgcctcccgccgatgtcctgcctgcgccaaccccgcgaggagccgccgcccaccgacctcgggaagccgccgcctctgcgtctctggccccgcaaggagccgccgcaccgccggccttggggaatccgccgtcgtaccagggagctctgccgccggagtcctcgacgccaactcctcatccgggagccgccgccgccgccgcaagctcctgcccgagctccgatgaacgccgccgagtaccacgccgccgcgcgccacctgcaatgacgcctccagctgcccctcatccgccgccacctcggcctgcttcgctgcctatggcatcttcccgattccggccagaaatcacccgctgctcccccaagaacctccaccggcttgatgaggcccccaccgccacctataccgccgccatcccccacagctgtcgtagctccgacgccaccgatggcagtcctccccgtcctcatccatccaccgcgcccatactgccgacaccgacggctcgcttgctcccgcgtcgcccgtcatcagccccggacctcctccgcacccgcgaccgtaggcgaggaggcc

SEQ ID NO: 25398 - DNA, 315 bp, Oryza sativa
  Clone ID: PAT_MRT4530_30289C.1
atggcggtggctcgacgaagaggagggtcggcggcggtggttcggcgaggcggaggagcggcggcggctcgacgacgaggaggggtgacggcagtagggtggatccggcggaggcgaggcaaccaggcgacggatctggcggaggcggtgttctgcgggaagggagggagcgccgtcggggcgacgcacggaggaagggagcgccggcgcacagagcagcgaacgcggtgggcggagggagccgccgtcgccggtggtcttcctcgtgccgagccgacgccaccaccggtggacttcctcatcaccaagccgtag

SEQ ID NO: 25399 - DNA, 2559 bp, Oryza sativa
  Clone ID: PAT_MRT4530_3028C.1
atgggcgtccacgtcttcaccgaccggctggccttcgccgcctccgactggtgttttcgcttgcacgactggtctattatgccgccgttgttgggcgtctacgacttcaccgccggcttgcctccgtcgccgccgactagtgtttttgcctatacggttggttggtcacaccaccgttcatgggcgtccacatcttcaccgaccggctggccttcggcgtcgccgactggtgttttcgcctgcacggctggcctattatgccgccgctgttgggcatctacgacttcatcgccggcttgcctttgccgccaccgactggagtctctgcctacacggctggcctattatgtcgccgttgggggcaacttcgctttcaccatcgccgactggtgtctccgcctacacggctggcctattatgccgccgttgttgggcgtctacgactccaccgccggcctgcctccgccaccactgactggatccagatccagatatgcacaaaagggatacatggctttaagcttatctcttacgctccaggaatggatcagtcagaacatcaccaccagcttgccgtcatcgtcgccgactggtgtcttcgcctatacggttgtttggtcacaccaccgttgttgggcgtctacgtcttcaccgactggccgccacgttcgccgccgactggtgtttccgcctgcatggttgacctattatgtcgccgttgttgggcgtctacgtcttcaccgaccggccgcctcgtccgccgccgactggtgtttccgcgtgcacggctggcctgttataccaccgttgttgggcgtctacgtcttcaccgaccggccgcctcgtctgccgccgactggtgtttccacctgcacgctggcctattatgccgccgctgttgggcgtctacgacttcaccgccggcttgcctccgttgccgccgagtggtgcctccgcctacacggctggcctattatgccgccgctgttgggcgtctacgacttcaccgccggcttgcctccgttgccgccgagtggtgcctccgcctacacggctggcctattatgccgccgctgttgggcatctacgacttcaccgccggcctgcctccgtcgccgccgagtggtgcctccgcctacacggctggcctattatgccgccgttgttgggcgtctacgacttcaccgccggcttgcctccgttgccgccgagtggtgcctccgcctacacggctggcctattatgccgccgctgttaggcgtctacgacttcaccgccggcctgcctccgtcgccgccgactggtgcctccgcctacacggctggcctattatgccgccgctattgggcgtctacgacttcaccgccggcccgcctccgtcgccgccgagtgcctattatgccgccgctgttgggcgtctacgacttcaccgccggcctgcctccgtcgccgccgactggtgtcttcgcctatacggttgtttggtcacaccaccgttgttgggcgtctacgtcttcaccgaccggccgcctcgttcgccgccgactggtgtttccgcctgcacggttggcctattatgtcgccgttgttgggcgtctacgtcttcaccgaccggccgcctcgtccgccgccgactggtgtttctgcgtgcacggctggcctgttataccaccgttgttgggcgtctacgtcttcaccgaccggccgcctcgtctgccgccgactggtgtttccacctgcacgctggcctattatgccgccgttgttgggcgtctacgtcttcaccgaccggccgcctcgtcagccgccgactggtgtttccgcctgcacggctggcctattatgccgccgttgttgggcgtctacgtcttcaccgaccggcttgccttcgctgccacggactggtgtttccgcctgcacggctggcctattatgccgccgttgttgggcgtctacgtcttcaccgaccggccgcctcgtcagccgccgactggtgtttccgcctgcacggttggcctattatgtcgccgttgttgggcgtctacgtcttcaccgaccggccgcctcgtccgccgccgactggtgtttccgcgtgcacggctggcctgttataccaccgttgttgggcgtctacgtcttcaccgaccggccgcctcgtctgccgccgactggtgtttccacctgcacgctggcctattatgccgccgttgttgggcgtctacgtcttcaccgaccggccgcctcgcccgccgccgactggtgtttccgcctgcacggctggcctattatgccgctgttgttgggcgtttacgtcttcaccgaccggccgcctcgcccgccgccgactggtgtttccgcctgcacggctggcctattatgccgccgttgttgggcgtctacgtcttcaccgaccggcttgccttcgctgccgccgactggtgtttccgcctgcacggctggcctattatgccgccgttgttgggcgtctacgtcttcaccgaccggccgcctcgtccaccaccgactggtgtttccgcctgcatagctggcctgttatga

SEQ ID NO: 25400 - DNA, 242 bp, Oryza sativa
  Clone ID: PAT_MRT4530_30290C.1
ttgtgatcaccaaggacacaccactagctacagcggagcgacctagtactcacagcatgtcataccgtcaaccactaggccagcctgttccatccgtcaggtactacgcacagaggcttagcagtagattgactactctaactagttaaccagtcaacgcgtggtcacggcgattgagatgaccaacaaggcttcaacacctccagatgaggtccaatgcatggagacatatgggagccgct

SEQ ID NO: 25401 - DNA, 1360 bp, Oryza sativa
  Clone ID: PAT_MRT4530_30291C.1
gcacgaggcctcgtgccggccgccgcagcctctctctctctctccgccgctccggctttctcctcctcttgctgctccgattgctccatggcgggcggcgacagcgcggcggtgtcggcggtggaggggaggctgtcggagctctccaccaacagcgacgagaaggggctccccaggaggggcaagtctttatcaggaaggacattaaacaccgcacagattcaactcgttgcaagccatccagaggtgtatgaaccatgtgatgattcctttgcacttgtcgatgcgcttctttctgacaaagcacaacttttgacgctaaagccaagattatgcatggagataggatgtggcagtggctatgttatcacatctctagcaatcatgctcaggcagttaggctcaggaacccagtacctcgctactgatatcaatcaacatgctgtggagacaactcaagcaacccttgaagcccatggcgtccatgcagacgtgattgctactgatattgtgtcaggtcttgagaaacgcctgcatggtttggttgacgttgttgttgtgaaccctccttatgtaccaacacctgaggaagaaatcgagtccaatggcatcgcttcatcttgggctggaggtataaacgggcgccaagtgattgatcggatccttcctgctgtgcgtgagctgctatctgaaagagggtggctgtatatgattgctcttgaagataacgatcctctggatatctgtcatttgatgaatgagaagggctatgcatcacgcgttctcttgaagagatgcactgaagaagaaagcctttatgttctaaagttttggcaggacgcttccactggcacaaacgcttctcatgccgctagatcaccacgctctgaatcctcatggctttctcagctgcctttcagatccctttggcataagaatgcatagtagctgttagccttgtcgatttatctccagttccaaaagatagcaacaagtactttgcaaccttcagatggcagaagtatctgtaaacatgtctgaaatgagatgctgctgttggtctctgactcccttcaaaagagtaaaagaatcagaaatcagactgacttggtggacttagctatgaatggtcctatgagcaattagcaataaagttccaacccttttattttgggtgttcttctattttggtgtgtatatgtgctagtctggattccttatcttactgcacttgtaatatgggtcctgttattatcgaatggattagtaaaccatatcagcgaaaagaatgtacgagcaagtttctggaactataactacatcaaagtagttactacaagaaaaaaaaaaaaaaaaaaaa

SEQ ID NO: 25402 - DNA, 556 bp, Oryza sativa
  Clone ID: PAT_MRT4530_30292C.1
atcacccccgggtttctctgggtacgcccccccccttttcgggaaattttgtttattggaccaccgcggcgcccaaaagacaagtaggggggtttcccttatacaaaacccggggtgttcgaatcgcccttctggagaaacatgttgcggggggcctttggtgttcttggccctccccggtcccgccctgggggtgaaggggcggagacgacaaactggcggtaatcgcggcgccccccgcgtccgcggccgggggggggggggcccaagcctggcgaacagtttccgaaacagtttcaggccgcaaagtttcggccgccgacaaggcgggggcgcgggcgcgaccaattgccgtgtctgcctcgcgcggttcaagccggagtcggtggtgaaccgcttcccctgcggccacttcttccaccgcgcttgcctcgagaagtggctggattacgaccacgccacctgcccgttttgccgccaccgcttcctccccgccaccaccgagtccccctcgccgtcgccggcgacggcgaccccccatttcgcccggatttag

SEQ ID NO: 25403 - DNA, 314 bp, Oryza sativa
  Clone ID: PAT_MRT4530_30293C.1
aaaagggtaacttaaaaattaggtaaaacgggtatgacccaacaaaggttcgggccgggggtccagcccaattaaaacgggctcgagggtccactaacagcacaaaaaaagttttcacgggggtaatgccaacccaggataacaggccaggagcaattccatcaatcaagggttcctggccccccctgggggggggcaccaggggggggggagactccttctgaatgttggagccggggagggtacggccatttttcaattgtttgccggagaaaaacaggccctgttggtttgggggaaaaccttccttggcc

SEQ ID NO: 25404 - DNA, 345 bp, Oryza sativa
  Clone ID: PAT_MRT4530_30294C.1
ttttggtgttttttttttttttttttttttttttttttttttttttttttttttggaaaattcaacattagggtgctggttatggcccatcatcagaacattaacaggggggcaccctactacattctttttccacttttttttttgggaattttcctagacaaactcttgaggaacattaaacttacaaggcaaccctgaaaaaagggggcatttgggtcaaactttttttagggccatttggggttatactatccaaaagggccccactaaattcccagaaaaacctttgggacaaacccaaactttgggtgaaccaccccacctaaaacaaccgggaggaag

SEQ ID NO: 25405 - DNA, 757 bp, Oryza sativa
  unsure (1)..(757): unsure at all n locations
  Clone ID: PAT_MRT4530_30295C.1
cagtgcgcggctggtgtgggcaaccggcgaggaggggccttcggtggacctgactggtgtgcggccgacgaacagctccaggacatcccgctctgtctgctgcctcgcagcattgctaggatttgtgctgatctgctccattctgtctcgtctgcaccatcgccgagatttggaggcccccgttagctctcggcagctcatctcttctctacccaggtcactgttggcatcagcctccatggcttcggcgcccccaactttgctgcttttcctccaccgtgctgtcctgttcggatctcggttaccggtatttgctcccgccggcctcgtccccttcgccgcacctccgggctctacctgggacgttggctgccttctcgctatcccttgtcgttgttggacctgaccgcagccgccatcgaccagggggaccacccccaccgcctgactcctccgggtgccacgactccgcctggataggtcggcctcatcctcctgccgcagctgctggattcccctgttgaggccgctggctctgctacgagggaaaggcattgacatatgggcccttctttttaatttttaaattattaaattttgcttcatatgtcacatcaatgccacgtcagaaaaagatcgagtcaatagacgccacgtgagttaaaaccgctgtccaaaccgncatgggacctatatttgcaccggttttgagggacttgaaatgaacttattcctatcaattatcatgagtatttaa

SEQ ID NO: 25406 - DNA, 652 bp, Oryza sativa
  Clone ID: PAT_MRT4530_30296C.1
agaaaaaatttttttttttttttttttttttttttttttttttattttttttggtttttaaattttttattttttttttgctctttaccttttccattccctgctttcttgaaattatttcaaccgaatttccttaataccttttttttttttttaaaaaacctaaccggggggggaaaaatcccccggggtggaaaaacgtaccccccaaaaaaacaaaaaaaaaacgatttctgcccccgcacgctggaaggccactaaatgttagaaaaaaaaaacaccccttccggggggaaattttttttgagaaaaaaacacccaaacaaaaaaagccccgggatcttttttttaacggcccccacaggggggggggaaaaaacactctcaaaaaaaatgtgggcggggggggggggccaagaccccaaaaaaaaaagggtggaaagccctctttcctcacaaaacagggggggaagagggccccaaaccccgttttttggggaacaaacccccaaatttttttggggaaaaaaaagggggggcgcacccctggggaaaacaaacaaattttttaagaaagaaaccctatattaaaaaaaaacccccccacccgggcgttttcgcggaaagaaaaaaaaaaaaaattttctccccc

SEQ ID NO: 25407 - DNA, 279 bp, Oryza sativa
  Clone ID: PAT_MRT4530_30297C.1
atgtaccgcgctatttcttctacaagtccagcgctgatccaccacgccaccattggcccactggagccgagcacgacgtactactacgtaccgaccgggtggacggcgtcgacactgtcccacatcgacggcgctagcgccggcgactacgacatgctcccgggtgacctgtcgtacgccgatcgtaatacgcgcggtcccaccgccgttgtcaccgacatcctcacccggctcaccgcttggttcatctgccagtgccatgctgtgtacaggtcgtag

SEQ ID NO: 25408 - DNA, 222 bp, Oryza sativa
  Clone ID: PAT_MRT4530_30298C.1
atgaagagaatggatctagcagtggcggtgctcaagaccactggattcgcctccacggcggcaaaagagagggatggtggtggtgaaggaggtgggtctggtagcggcggtgttcggggtcgccaggtcaacttccacggcgagtacagtggaacagtgaccactgggaagctatctccactgtcagcaatggaggcaggcggaggaatagttgctggatag

SEQ ID NO: 25409 - DNA, 472 bp, Oryza sativa
  Clone ID: PAT_MRT4530_30299C.1
aaatttgagatgatatggcttaataagaataaaaaagtggataatctagtgcacatttcgatcttgggggagaagaacatgaggatttcttgggtcaccgatgacctgaacgcaccgtccggtggtggagtacgggacatcgccgggaaagtacgtaaacggcgtcggcgacgggcgaccacccatgtaccgcgctatttcttctacaagtccagcgctgatccaccacgccaccattggcccactggagccgagcacgacgtactactacgtaccggtgcgatcgagaaggccgacgatgagttcagactcaggacgcctccggcgaggctgccccgtggagttcgatcgtcgtggttggcgacctagctagggcagaccgggtggacggcgtcgacactgtcccacatcgacggcgctagcgccggcgactacgacatgctcccgggtgacctgtcgtacgccgatgtta

SEQ ID NO: 25410 - DNA, 3902 bp, Oryza sativa
  Clone ID: PAT_MRT4530_3029C.1
tttcaagggagaagtatgtgagttttattatatatctattaatatagcgcagcagaagtctctccaactgttttcagtaaaaaaaaaaagtatccgagttttagatgcatggactcagcacaatctctttattatcaatctaccatacgtagcaagtggttctcactagcacaaattgagtgaaataatccaggctagtctgacatgtacagcaacaacattacagggcaaattatgatttaccattcaccaaaatacacagtaaatctgaatatctccgtgcaagacgagcatcagggcggcaggaaacttgaagaaagcagcaacccaaccactgactactgactgagcctagcattgtccatacatcagtgtattccaagatagttggctcgaattataggtcagaagaggtactttgatagcacgtacttgggagcaggcctcctgtctcccatccagtgctgcatatgcaccccaatggcgtccaggtgttgcccgctccggccatggaagcccacaaccttcccttccgtcttcgccgacgagaagtatgccccgaactcctctccgaatggcccgtacttccctcggttgctgatgaaggtgatcgacctcagaaccctgggcccttcctccctgttggtgttgtagtagccgtatacgcatgtcaggacctcgtgtgggtagtccagtttaatcctatgggttatgtggccactggttccatgccttgcagaccagacggattggtcacccctgtcgtactcgatctgtatcgagccgataaaggtgcctctcatcacatagacttgcttcacaccagtgtagacaccatcatcccatggccggcctccttcgccaccccatggccctggccccattggaactggttctttcaccatgctataaggaacctcattgtatgtttcactccttgattgtgcaagcatgtcgtagcgcaaagaggggttcatctcaatcgttgatctactactaactcgcggtgcagccaagttaccttcctgaacatggaccccgatgccatcaatgtaccatccctccctaccatggaatcctactatcctcccatcagaaaaactggtggagaaatacgtgccacactcatccccatatggtccgtatctccgcttgtttgtgtggaatgtgagtgatctgaccactgttggacccatgatcattgtcgtgccatagtagccggttatatgagtcaagacctccgagggaaaatcaaatactatcttgtctggtgaaacagctccactgaatccatgcttgtttccccacactgcttggccatttcgatcataaagtacctttatagaagtaattcccactgcacgagtcaaattgatctgccacacaccggtgtacatgccatcatcaaacatggtgccaccacttccaccccaaggaccataggtctcgtggctactcagagctgcacctcctctatctccgtaaccactaggaaaagataccatctgcagtgatggactagtttgtggcaccttattccagcggattccatcattgtaatctggggatggatttgtatactgctgattagggtaattgctagtataaacagcatagctgtcacccctatctctcactgcaaggaccatgtcatatcctgaagcaccctcaggaaagctataaccatttttgttatatgcacttgtaatacttctactctgaggcaagactggagaatttgatcgatctgaaacattcacttgcttcagataaaagcctattgagttgagatacgaccctgaccttccatgaaaaccaataattttaccactgcttactgggagtgagaaaggtgtcccatcttcagtaccgaaaggcccgtatatggaacgattgctttgaaatgtcaatgatcttatgataactggagttccacagactgacccgtaatagccacttacagacacaaggatttcgtcagggaaatctagcttcaccttatctgtttcagaacctccatcggtgctcccatgtgtctctgaccagactgaacttcctttcagatcatattcaatccttatggagtcaatagctgcaccatgggtgatgatgacctggcgtaccgttgagtatacaccatcatcccaagggtatcctcctgtgccaccccaagggccaaccactatggggctcttcccgtcgctgcttttgatactctgccaatttataggatgaccagaacaaacgacgcccggaaaccagccactatcgcaagctactggatccaattcacaattcacgcacatgaaaagaaaagaagtcttttcccaaccactgatattctccttttccggacctccctcactgatccaacagttccaacaaaccacccaaagaaggaactttggagaaaggttgtttcctactccctccctccatgacagagaagttgccattatttgccttgaagcatcgttggctggccgtatcacaaaccgggtagtcatgagggcagcaatagcgattatccttgcagcaaactgcgttatccagttcacaacaactccaggaaaggcatagccccaggacacgccaggagcagcagcaggtggatccttcagggcaataggtaagaaggctgcatttggttggacctggccctggtgaaggaggaggattcgggcttgatttcgtagggaatgacggcatctggtttatgccacagacaccattggagttaccagtgtttcgatgcatatacatatagcctttcataccccaactttcaccccaagaatttttcacaatccagtaatccttgccaccttcagaaccatatcccacaattaatatagcatgatcaagagatgtaggacatggaccatcgaagatacccttggagtacaactgaaatgctctagcgctaccgcatattcctacactaacaggttgctgagcaacagcctgaagtaacatatcttcattgttggcaggcacatctttgtagccatcaattgttaccactcgccttttgagcttgttcttgttacatgttccatctgtttcacgatatgggtaatccgcttccgtgtcaattccaccatttttaaccacaaacttataagcataatccatgagcccaccaccacaaccactattgtaggatctatcacagtctattagttcctgttcggaaaggctgatcagagaacctgtcttgatcttgtttattccctccatggcacctgtagctgagaagctccaacaagcaccgcagctgccttggtccttgaccttggtgacggcgccgctctgcctccagtccaccgcatcgggcacggccccgacgccaccgtcgacgcccaggtacggcgcgccgccgtcccggccagggccgccggcggcggcgaggcggccgaggcgcgcggcgcggaactcgtcgtgcgtgaggtccgcgaaggcgttgagcgccagggcgtacgacgcgggcgcgccgttgtgcgccgccacgaacgccgcgttgtccgcgaacgccgcgagccgcgccgcgcgctccccaggcgtcgcgtacgacctcccgtgctccgcgcaccacgcctcgaactgcgcctcgtactccgccacgccaccaccaccgctaccggcggccgccgcggacagcatcagcgtcatcagcatcagcatcagcggcgagaggcaggagacgaacgccatcgccgcaactcgccaccaccacctggtgaccggggactgggcagttcttgacttcttcttggcttcctcccaatcaagaagagaggtagtggaatttgaggagcagaaaccgatggaaccttgcagatcggagaagatacggagaagacgaaagatctcgtgctgatgatatcagcagcagcaagaca

SEQ ID NO: 25411 - DNA, 2202 bp, Oryza sativa
  Clone ID: PAT_MRT4530_302C.1
atgtctgtcgctcagtccaaggagcgtggtaaccccgcggcccgcggcgtcgaggaggacatcctcgtcccactcctcgcccgactagcaaccatcaggaccgtcctcgacaacgcgccggctccaagtcgccgtcgtctaccagtgcatgtgcgcgacgccgaagaggatgctagggtcgaggcccgcgcgctgctggagaaggtccaaggagagatgtcctacctccagcgcgtcttccgccgcattgacgaagccgaaaatagcatcctctacggcttcgaccctgtcgaggagcagatcgacgacgcgctccagcaagcgcaggttgggcttgacgtggagcaggtacacgaggctctcctcgccgtggacgccgacatcgaggtcatcaaggccagcatccgcgaggtctacaggttcccctgcgacggcgacgaacgccgtggtcccccaccgccgtcgaccgcgccggccacgggcgtggtgatgacgaggaggatgggggagatccgtcgcggcccgcagatgcggcacctcggcctcgccatcggcggcttcgaggcgcggctccgcggctgcgtgctcaccctcgccgcgttcccggagtgcgccgtgatcaagaagcgcctcctcatccactggtggctcggcgagggcttcgtccgctccgccgccgaggggaagagccgcttcgacgagctcatcgccaagggcctcatcgtcccgatcccgggccatctctgcgccaccgtccaccgctgcacggtgcggccatggatgcgcgacctcctcaccggcgtggccaaacgcaccgccttcctcgacctcgactccggcaacgacttcaccctcgcgcgccgcgcgtgcctgaacgccggcaggatgtcctcggggttcagcgccgaggcgagagccatctacaacatcgaccagaaatacctcgagctcgacgacgcctggttcgccgggaagaaggagctgcgcgcgctgcagctcggccagtggcgagagttcggccccctcgagcagattgccaaccccatggacagccacatcgagctcagcggcgtcgaacacctcgcggacatggagagctgcaagaatctcaggtacatcagcttcaggggaatctcaagaatcgagtccctgcccgattcgatcggcaggctgcgtgagctcaccgtgctggatctccgggcatgccataatctggaggaattggggcaagggatcacaaggctggatcgattggggtatctcgacttgtctgagtgccacctgctcgtcggaatgcctaaagggattggccggctcacacggctcgaggtcctcaagggatttgtggttgcaaatccaagcagaagagagccctgccatctcaatgagctcaccaagctgaacaagctcaggaagcttggcattgtgattggcacaatggctgttccgacagatgatgagttcatgaaattgggcgagttcagggcgctcgaatcgctcaagatcagatggggtgtgctggcttctgatagcaaagggaaaattgaagcatcgtcgcatcaaaaaccgatcgacaaaatgaagtttgcgcttcctccaaatctgaagaagctagatctccgatgcttcccgctgacggatttcgctcagtgggttacaccgaagggtgttaagaagctgtacattaggggaggaaaactgatgacacttggagatgaacagggctgggaggcagaggaggcatcggaggtgactatcatggcgagctcgccggacaaagggaaagagacagcagccgcagccgtggacgcgccgtcatcgtcctcgggatcctcgccggagaagaagaagaagaacagcagcaacaacaacaacaggggagaagcgacggcggcggcggtggccggagacgaggggaggaagaagatggtgaggatgtcgccgccgcagatcaacctgctcatgtcgttcgacccgccgccgctggagcacgtgaggggcctcaccaaggaggaggaggggatcgacgcgctggcggcggagtgggagagggggatccgcgcggtgacggaggctgtgaggacgcagtacgagcagggagggtacgtcgagtacgaggccggcgccgacctgcttgcgtgtcctggccgcattcaagcaaaaggtcagcaaaataaattcgactttgggaggctttcatag

SEQ ID NO: 25412 - DNA, 649 bp, Oryza sativa
  Clone ID: PAT_MRT4530_30300C.1
atgaacagaagttcttcccaacgtctcttacacttccgaagttcctccctctgttcctgtgctacagaatccttccctttttccgttcaccggcacgcataggtgtacggggacgagcaggtgcctccgaaactccgtccgcttgagaacctgcatgggtaggcaagcgatcatgtttttggggagcactttaagtgcgactgctcctgttcttcgcgactactgctgctgcagcatcgacgccttcgctaacatgtcaacagagattggagacaaggaggtgaacgacatcaacggaggcaatactgcctcaaaatccagtgatgtttgtttgttaatattcttcgtaatggcatcattgtgttactctgtaaatgttgatgcttattttaccttatgtatgctcatattgtatacaactagcactatcactgatcaactcatattgcaaatgctatgtttattgtcttaatattttggattaaaatatgctgaattatgaccaaatttccaacaatccaaaaatttcatgggcctttattggtagttggctttgctacatcactaaaaccacacgctttcgatggttcaaattataaaatatgaaaagcatgtgcactactgtagttgacggcgatgcaatgtttct

SEQ ID NO: 25413 - DNA, 483 bp, Oryza sativa
  Clone ID: PAT_MRT4530_30301C.1
cttctgttacgagaggaggaagaagaggcgggcagcgaggagggaggagatcggcggcgagcggctagaggggaggagaaggtaggttgcgatggcgtttctttttggtgtatctacgggaacaaggggcggtgcttcaacttctggctggactccagtgggtgcaatctttgtgattatccttgaaccgactgaggtcttttcctggaagctttctgcgaactcacctgttattctattgtgtttcagtgtaggtactgattttacaaggttgcgcctctttctgctttcttctttttattcgtattttcttcttttgttttttttttttaacctcatattgtttgccttttcttgtttctttttcttcttttatttttttcgattataatctcttttgttttttccccttatgttgtttattgttttctttttttcttattccttcttccttttttaatcaatttcattttttttcttttt

SEQ ID NO: 25414 - DNA, 553 bp, Oryza sativa
  Clone ID: PAT_MRT4530_30302C.1
gaaagatcgaaaaggaaggcaagcccgtcagaaccaaggcccccaagatccaaagattggtcactgatgccagactcagaagaaagagagtttacaaggctcacaagaaggccagatgggaaagaaccagacaagcccaagctgattaccaaaaggtcctcgaagaatacagaaagaagaaggccgctgaacacaaggaagaagttgcccacagaaaggaagctgctcacgccaaggctgcccccaaggaagaagctaaggcccccgctaagaccgccgccactaaggccgcccccactaaggctgctcccactaaggctgcccccaccaaggctgcccccaccaaggctgcccccgccactcaacaaaagaccacccaaaaagcccctgctgccactcaacaaaagggagccaccaagaccaccaagaaataaattaagtaatgtataaaagaaggatgtagtacttttatcgtctctgtagcggaagattgcttatgaaaatttgaacatttcttataaaccggaccgatatataaaaaaaaaaaaaaaaa

SEQ ID NO: 25415 - DNA, 216 bp, Oryza sativa
  Clone ID: PAT_MRT4530_30303C.1
atgaactctgtctactgcacctacggcggcacgctcacccgctgctgcttcggctccatcggcgccgccgtcaacatctcgcccggcgcccgccgccgggaaaagtggaggacttctgaggcacagatcatcacaaggcatgaaacaaacgaaggtgttgactgctggtggcagataaatcacttcgccctggaaacaacgctggaggcctgctag

SEQ ID NO: 25416 - DNA, 1677 bp, Oryza sativa
  Clone ID: PAT_MRT4530_30304C.1
atggcggcgaggaggagcagggtggcgttcgtgctggtggacgggatcggggacgtgagcatcccgtcgctccgggggcggacgccgctggaggcggcggcggcgccggggctggacgcggtggcggcggccggggtggcggggctcatggaccccgtcgagccggggctcgcctgcgggagcgacacggcgcacctctccctcctcgggtacgacccccgcgtgtactaccgcggccgcggcgcgttcgagtccatgggcgccggcctcgccatggcccccggcgacatcgccttcaagtcaaactttgctacgttggatgaaagcacggggatcattgtcagcagaagggcggatcgacactttgaggaggaaggcccgatactctgtgctgcattggatgggttgaagctcccatcgtttcctgaatatgaagtgagagtcagatatgctactgaacacaggtgtggtgtggttgtgaaaggaccgaggctgagtgggaacatttctggaactgatccattgaaggacaaccgcttgcatctaaaggctgaacctttggatgattcagaagaagctaaaaacacggcagctgtggtcaatgagctttctaaggagattacacgtatactggtgtcccatcctatcaatgcacagcgctctgccgaggggaagaacattgcaaatgttgtgttattgcgaggctgtggtatccggattgaggttcctgccttcgaaaccaagcatggacttgcaccatgcatggtggctcctacaaagatcatagctgggctggggctctcactgggcattgatatccttgaagcacctggagcaactggagactatcgaactctcttgacttccaaagctaaagctatagccaaggcactgtctgctcctctggatacgccacctcgtgtttttgtgcctggagaggatgaatataaatctggaaaggaaaatggatatgactttgggttcttgcacataaaggccatcgatgatgccggtcatgataaggctggcaagcttaaggtactaggcctagaggctgttgatcgggctatcgttcagcttgcaaggctcctgtgggaagctgaaaagtctgggaaataccagtatttcctttgtgtcaccggagaccactctactccagttgagtacggtgaccacagttttgaacccgttccttttgtgttgtgccgacttagagatttcgtaggagctatgggggaggacaatgttatcaacttccccctggacgatttcctgcttccttcagttaaatctggagaagatgtggcagaaaacatagatgtagctgatcgcaagtctgatcagcgcaaagctttcagtggcgattctgtctttgaattcaacgagattgccgctgcaaggggctgccttggacgtttccctggaagtgagatgatgggcatcatcaagaagttcatcaaagcgaagaacgattagtgccagttcaacatactgacgtttgtgtaatctgttgaccttgaggcttccatgtctgtaataattgcaaacaaggatgtattcagagaaccagctcagtctgagatgaataaggcttctcatggatcttgaatcttgcactgaaaagcataaataatctgacctgctgtgtacatttaccaaaaaaaaaaaaaaaaaaaa

SEQ ID NO: 25417 - DNA, 570 bp, Oryza sativa
  unsure (1)..(570): unsure at all n locations
  Clone ID: PAT_MRT4530_30305C.1
ttgtgcacatggaaatgagcctacattcaatggaagttgtaaacaggctcactacagcagtagatctaccaccaggattcattcatgactacatctcaaattgtattcgatcatgtcgttctttacaggataaatacatgcaaaacaggctagtaaggctagtatgtgttttcctacagagtctcattcgaaacaagataataaatgtgcaagatctcttcatcgaggtacaggcgttctgcattgcgttttcccgaataagagaagcggctggtttgttcaggcttttaaaatcgttagagtgaagaaggatgtatggtttaaacaaaaattttccatggtgtacatccatagtttttcatgttgtactttaccgctagatcttgatagctgtcgacttcatagaatatagctctgtcatgtactagttgtcatcattgaactttacccctcatctcaaaaagaaaaaaataacccaaaaaagatttttcaaaaaaaaaaaaaaaaaaaaaaagagtagttcgctggaactcgaattccgtagtgggaatgaaacggacgtttccnnaa

SEQ ID NO: 25418 - DNA, 612 bp, Oryza sativa
  Clone ID: PAT_MRT4530_30306C.1
tgttctccaagatctccaagttcgaggaggagctccgctctgccctgccccgcgagaatcttgcgaggaaatctcgctgccggattcgaagaatccgccggattccgtggagaatcaagaaacccccgcaaggtgttcgtccatggacacggagccgctgctgtcgccgctgtcaccgtctccgcacctgctccacccgcagccggagcacgcgaaggtgtccaccttctcgccgcccctctcgccctgcccttccccggggtgtgtgcatggcgcctgctacaaggagcggctcacctgagtgcgtcggcgggtgcagcttcgattgcaacaagtgcgaggccacctgctaattaatcaaaccgaatgatccatggatggcgaagaatcgatggccctctctactgaaactgatggatgtgtatggtatggggtgttgaattaatcgtcagttattagagttttgttaattagctacttactgaatggaatggaatgtaatgaaatatattttggtgagctgcgagagtctgtaagtattcaggtgtgtgtgtggtgttcttgatgataatgatgaataaaacgagaggaattcatcgattctttgaccgt

SEQ ID NO: 25419 - DNA, 331 bp, Oryza sativa
  Clone ID: PAT_MRT4530_30307C.1
gtagcctgctgctcttctctctcctcatttaacttcttaaaatatatttgcagctggcttatagcctgctattggttggtgttattaaccgggactaaagatttatttgtagtcacggttgataacaccgaccgggaaaaaagatcgacgcggagatcggagaggcctacgcgatcggatcgagcagcggtggggcgaggagatgctaggctggcgcgagggcggcggggtgcggagggcggcgcggcgcccggtgaggcggtggccgccggcggcggcctttgaggtggcagcctgcggcggcaaggcgcggatggccggccggccggcg

SEQ ID NO: 25420 - DNA, 516 bp, Oryza sativa
  Clone ID: PAT_MRT4530_30308C.1
gatgctgatggtagcgttccattttattggggagttgatcctgacagccgtcttgtggtttctgatgatgacgaaattgtgaataaggcttgtggaaaatcctctgcaccattccctaaaggtttcttcttcaccacatccggaggactgcagagctacgaacaccctatgaatgaggtgaaaccagtgccgaggctcgacagcaagggggagcggccgacggtggcccttgctggcaacgatgggcaaggagaagaggcggatcccaacggcgtggagcaccgagcaggcgaactggaggcgttcgaggtggacaaggtggccaacaaggtgcgaacgcacggagataagggcgtcaacaacggagagctggacataggtggagtggaggccgtcgaagagctggaggagttagtcgttagagggccagagggagtgggtgatggaggcggcgagggcgatgatgatggggagcggtggtccttggcaacacggttgtcggtgtgcatcgcctga

SEQ ID NO: 25421 - DNA, 495 bp, Oryza sativa
  Clone ID: PAT_MRT4530_30309C.1
atggcgatggcggttgcatggttaacacctcagtgttgcattggggctgggtctgctattttgattttttatactagattttctaccgggaaggatgggtctcactgcacagaatgggtgggaggggaggacaaaggaaactctgcttttccatccaatcggtactttgctggctggtccttgattggcataattatgaagttctatttgatatatgggttgggtcgtcttgctggcttgatcacactagaggcagaagacagcaatgctccccttgatgctcttaagagagttgggaaatctattgcaatgcatatcgttgcaacaaaaccattgtttttatcaaaagaactggtctccgcttcagctgttgaaaatgagaggggcatactccggactcaaagcgtcctgaatgatttgtcaaaggaagttggtgaaggagttcaaaggcctgatgagtacactgggtctgaagctacggctcgtgctgcatag

SEQ ID NO: 25422 - DNA, 1233 bp, Oryza sativa
  Clone ID: PAT_MRT4530_3030C.1
atggacaactttgttcccacattggtcacctctgccatcatctaggggaatattacaacatcaccaccggcttgctttcgcagccgccgactggtgtcaccgcctgcacggctggcctattatgccaccgttgttgggcgtcaacgtcttcaccgaccggccgcctcgtccacctccgactggtgtttccgcctgcacggctggcctattatgccaccgttgttgggcgtctacgccttcaccgaccggccgcctcgtccgccgccgactggtgtttccgcctgcacggctggcctattatgccgccgttgttgggcgtctacgtcttcaccgaccggccgcctcgtccgccgccgactggtgtttccgcttgcacggctggcctattatgccgccgttgttgggcgtctacgtcttcaccgaccggccgcctcgtccgccgctgactggtgtttccgccttgatagctggcttattatgctattactgatggacacctttgttttcaccgtctggtttttgccatcgccgactggtgtttctatcttcacgactatgcgtcttcgccaccggtttgcttccgctgcctccgactcgtgttcacttcatcacggcaatgcaactttttcatcatggtggagcgacttcatctttattatcttcggcaccggcaaactctattgctgctacttcgcaagttttgctacttcaccaaccacgacgtctttgtgaacctcgatatcttggcatgcgatgccgtgttattttactacaacaagtggctctccaatattcaggatttcttcttagacatcttcaacacatatcttcaatcaagcaatgactattcgacgacaagaagctacagttcttgactctatgttcagttgtttcccaactaatcaaagaacattctacttcaacaacttcaaatatttcggtttagacgagttggacaacagtatcaactctcctccaatatttcaccttcacggttgacctactacgcaaacgctgataagcgtctttgtcattattatcggctgctacaccgctattgactggatcgccgacatcgtcatcttcatcaacatcctgtcaagcctcttaagcatagcctacactgctgccgttgatgggcaacttcgtcatcatagccggctatctctgttgctgttaatcatcattaccgtcggatgcgtttgccgccgccgactattttcttcatcttca

SEQ ID NO: 25423 - DNA, 483 bp, Oryza sativa
  Clone ID: PAT_MRT4530_30310C.1
tcagcgtctaggacggtggccactcagcctcacgaaggacgggcggatgagtttctccgcagcggccgcgaagtaaaggccaacgacttcgttgaggctgtcgtcaagagttgaggtgatagtggcagcgtctcgactgtcgcacatggcgacgtccatgaaccgcgagatgagatcatccttgtcgcaacggatgaccgcagcaaggccatggcgcgccatggccttgctgcccaaggagatgcttcgtttggccttggccaggcgttgcaccggggtcttcatggcgaggcgtaccatcctcttcaccgcagccgatggaggggcgtcgatgatgccatatggggcaccatggtgcccgggcaccattgcagagggcgaggagctctcacgccattcgtcaggctcatgtcagccgcgacttcgtcaaaactactatatatataatacccatatggggcaccatggtgcccgggcaccatg

SEQ ID NO: 25424 - DNA, 1509 bp, Oryza sativa
  Clone ID: PAT_MRT4530_30311C.1
atggcgctgatggacggcggcgagcacgccggcgagaggaggaaggcgaaggagtacggggagaaagctcgcagagccatggagaaaggaggctcctctagtgaacagactttcttcatgatgtggactgagaatcccagaaacgcggaggcggctgcggcggcggcgggcgcggctgggcgacgtggcggagctggagagcgtgctggaggtggtcaagacggagtcctcgagcgcacgcgtggagctggagctcgaccgcgcaaggaggtgggcgacgacgatgccgccaacgccgcctcgcgccccaccgtgcccgtggcgcgcgtggagcaggagctcgaccgcgcgtggagttggagctgctcccggtgctgtagagtgcagagctcatgtttcttaaatgaaaccatcttttctggtggttatactgatacaggtgcaagtgttacttttgatctgctgttccttctggtgattggctcctatccattcgatgaggcccttattctcttcaatttcgtagtaaccgctgcacggggtcctgaagatctcattaacatattctggcgacctccgtcaagcaaaatcaaggggcataggcaacttttccatgtattgttggcgttcctcagaacgtgggatggtaaatatggcgtttgtttcactgtttgctcaatatttgcagaacaggcatcgacaatcttaactggttgtgttttttgggatggagggagtacgtgggggagcggggaccagatcaatggcagcagaaggaatagcggagcggcggcggttggaggcgagcttccactaggacacagcagaaccaagggtcgcggtcgtgcggctaggacgacagagccaaggaggacggtggtggctcagcctcatggaggctcacggcagcaggaggacgagggtagtagcagcggtggatggtggcgagctctcaccgggctgcagtcgaacaaggggcggcgatcagcgtctaggacggtggccactcagcctcacgaaggacgggcggatgagtttctccgcagcggccgcgaagtaaaggccaacgacttcgttgaggctgtcgtcaagagttgaggtgatagtggcagcgtctcgactgtcgcacatggcgacgtccatgaaccgcgagatgagatcatccttgtcgcaacggatgaccctagccgccgccacgagcgcgcgccttcgagcaaccgcagcaaggccatggcgcgccatggccttgctgcccaaggagatgcttcgtttggccttggccaggcgttgcaccggggtcttcatggcgaggcgtaccatcctcttcaccgcagccgatggaggggcgtcgatgatgcaggtctgaaacctgtaggtatcaaccatgataccacaggtaccagatctgaaacctgtaggtatcaaccatgataccattggcaccaggtctagtacctcgacggagtggacacctccgccgtcctcgccgacgcctccaagaccgttcat

SEQ ID NO: 25425 - DNA, 440 bp, Oryza sativa
  unsure (1)..(440): unsure at all n locations
  Clone ID: PAT_MRT4530_30312C.1
cgatggccatttgagtgcagtagcctctcgtcgaanncgagctcggtacccttgttgatgaaatgttagccgtcacagatttagtgatcttagatctcaaacaactcaatgatgaaattcatcaagacttaatcggtgtttcaaacaaacgaacgcttgatttcgcccgctatttacataaaatccataaacaaacatggattcgttatgtggtcgtaccaggttatactgacgacgactctgcccataagctcggacaatttattcagaatatggataacattgaaaaagttgaattattgccttatcaccgcttaggcgcacataaatggaaaacgttaggctataaatacgaattagaagacgtattacccccctctaaagaagatttagaacgtttgaaagcaattattgaaagttacggacatactgtcaaatac

SEQ ID NO: 25426 - DNA, 2355 bp, Oryza sativa
  Clone ID: PAT_MRT4530_30313C.1
atggccatcgatggcttcctcctcctctccaattcactcgccgcagccgccgccgccttctcttctgcgctctcggctacttgtactcccgagatgcggcgccgcctggcaagcgggccccaggatcggtgtccccacacgtcagcgataagtgagggtacaggatacagtacgagatgggaaaggggggttggtggtggtgatgccatgatgcacatgctggtggcccccgatggaggcggcggaggggagatgccgccgccgtacgggggagccgcggcggcgccgccgccgccgatggagcaggagctggagctccaccgcgacaacgccgacgacggcctcgacggccacgtgcggtgcttgaggtgtggtatatccggcaacgcgacgccccatatgcgccgcggccctgatggcccaagaactctctgtaatgcgtgcggcattgcgtacagaaaggggaaaatgagacgaatgatagaagctgaaccacctatagatgaagctgcacttgctaagctggttcctgaggtaggcatggaatttgagagtgaggacaaggcctatgaattctacaacaaatatgctggacatgttggttttagtgttcggaaaagtacatcacacaaatcttccggaaatattaccaaagtaaggacttttgtttgctcaagggaaggttacaacagggacaaaaaatcattggaagcaaagaagccaaggctggatacaagaattggttgtccagcgcggttgattattaaagtcacaccagagagtaaatacagagtcactgacttcaaagcggaccacaatcatcagctggcccctccttcgacaatgcatatgttaaggtcacagaggatattgacagaacttcagtctggggaagcagaattgtcagatgattctgtcatgacacctacaacaaaagcaaccggtgatcttgttgtgagacaaattggtttccttcgaagtatctctctcctcccagcagattataagaattatctccgttcaaagcgtatgaaggctatgcaactcggtgatggtggcgcaatattgaaatatttgcagacaatgcaaatggaaaatcctgctttcttttacaccatgcagattgatgaagacgacaagctaaccaacttcttttgggctgacccaaaatctagagaagacttcaactactttggtgatgtcctctgtctagacacaacttacaaaataaatggatatggcagaccattgtcattattcctcggagtgaatcatcacaaacaaacaattgtttttggtgcagctatgctttatgatgaatcatttgagtcatataggtggctgtttgagagttttaagattgctatgcatggaaaacaaccagcggtagctttagtagatcaatctattccacttgctagtgcaatggcagcagcatggccaaatactactcaaagaacttgtgcttggcatgtatatcagaactctcttaagcaccttaatcatgttttccaaggttcaaaaacatttgcaaaggattttagcagatgtgtatttggctatgaggaagaggaagaattcttgtttgcctggagaagcatgctagaaaagtatgatcttaggcataatgagtggctgtctaaattgtttgatgaaagggaaagatgggctttggcatatgagagacatatattttgtgctgacataataagtgcacttcaagctgaaagcttcagtagtgttctgaaaaagttcttgggccctcaactggatttactgtccttcttcaagcattatgaaagagccgtagatgagcaccgctatgctgagctccaagctgacttccaagctagtcaaagttatccaagaatacccccagccaagatgttaaagcaagctgcccatacatataccccagtggtgtttgagatctttcgtaaagagtttgagctgttcatggactctgttctgttcagttgtggggaagctggggcaacctctgagtacaaagtcgctccctctgaaaaacccaaggaacattttgttagatttgactcgagtgactgctcctgtatctgcacttgtaggaagtttgagtttatgggtattccatgttgccatatgttgaaggtgctcgattacagaaatatcaaagaattacctcagagatatctgttgaagcgatggagaaggactgccaagtctgcaaatgaagaaaaccaagggacactcctgtttctaatatgcatgagaattcatttcgcagaagctcatgatgcaggtgacttgaatctaaacattattccttctgcacggtgcctgctccacgatactggcgttgaagcagtgaggtga

SEQ ID NO: 25427 - DNA, 440 bp, Oryza sativa
  Clone ID: PAT_MRT4530_30314C.1
gttttgtgttttttttaaaaattttttttttttttttttttttttttttttttttttttttttttttttttttctttttttttttttttttttttttttttttttgttaaaactttctttttttttttattcaaattcccaccccccctgtgtttgaacggggcaccccccaaaaaccataactttatttttctctccgggcctactaaactgctccaattcaatccccaatcccccccccgggggaaatccccccgggagcagttttttaccttgggtaaaacccccattttgcccgcttttttaggcccaacaaagcttgggcttgagcttgcctttttatcgagtttaccttttcaaactgttgtggcccggtctttttccacattgcccccaccccccctaatggccctctttttttttctggggccctaccctcc

SEQ ID NO: 25428 - DNA, 285 bp, Oryza sativa
  Clone ID: PAT_MRT4530_30315C.1
cgaagtgatggtgatggtgatggtgattatgttagtgatggaggcccaatgggggggattgaatcacaggaatggttaatccaacggtgggatataattaattgtgcctaagctcttctttagctacctagagacactaaacttcattatctggtgttatttctcgaaccacttaagcgttactcttatgaacatctactcaattatatggctatcaataactttatttttctggtaaactttctcgttatggaggatctgtattaacttctgctagctttttct

SEQ ID NO: 25429 - DNA, 220 bp, Oryza sativa
  Clone ID: PAT_MRT4530_30316C.1
gcgccgcgaaccattgatggaccagctgtaggagctcgcgtgggccaagcggtggagctcgcaggcatacttgtagtgccgcacgacatctctgcatgagctcaccaggcttgtgataaagcacgtggagaacctggtgattgcgagagtcacaaatgacgatcggcgctttatgggtccttactcgattgggagcatctcattgatagtattagctatc

SEQ ID NO: 25430 - DNA, 494 bp, Oryza sativa
  Clone ID: PAT_MRT4530_30317C.1
tataactgcaaatatccacacagcagccagcaggtccttccttcctcccctacctcccctttgcgcttgacatcgccgggtggatcagcggcggaggctgccagcgatgtcgtgcctcaactcgctcttcaaccgctccaccttcggtaccaaatgcaaaacatgcttgaatttagtcattacgaggatcaagctgctgcgcaacaggagggagttgcagctaataaatatgcgcacagagatggttcagtatcttcagacaggccacgaatcgatagcaaggattcgggtggagcacattattcgagagcaaaatatattggctgcatatgagattgctgagcttttctgcgaatttgtgctggcaagggtccctattgttgaggtccaaaaggaatgccccttcgaactacgggaagcaatagctagtataatatctgcatcagggagatgttcagacttgcctgagctaatgcatctccgtactttgttca

SEQ ID NO: 25431 - DNA, 115 bp, Oryza sativa
  Clone ID: PAT_MRT4530_30318C.1
aagcacaacatatctcgttttttggggcatgcaaaaggggcatgtaacaaaggctctatgttcaggaatgttcttatggttggtccacatcacgctttttatttcataaccttca

SEQ ID NO: 25432 - DNA, 1407 bp, Oryza sativa
  Clone ID: PAT_MRT4530_30319C.1
atgtgcagagaagatctcaagcggaaaaattcagataagaatgagaatctgggatatacggactttggacgttttatcagttctcgctcttttataactggttcacagcctattgactttattcagacattccaatatggagatctagtgcactgtgaaactacttttgagaagatgggccgcacatcacaggtaaacatcatatgcggtcaatgcccaaataaagaatgcaaaggcaaacaaggatgcatctgtagtatatcttatgatgaactgatgtgcagggtgactgttgaacttgctatcccatgtcctaaaagtggtccaagagtatttaagggtttcactgtcggattccatccccggtcatcagagttggtttataatggattgactcaactgggatttgagcaatctcatcatgagttcagctttcagggtgagcagagtcatgtatccctgtatcttagtgcagtgttttcactctcaggacttgttggaaaaccttccttgaaggttaatccagttaaagggcttgatgtgacactgacaggatcagggaccaacggtgctatgcctactaccctgtcccctacaattctgaatgtgatctggagatgtgaaatcgcgcggagcagtccttatgaggtcaacattttgattccagtagaaggctatgatccaattgaatttacgctcaccaaagaatgtgttcatatacaagaaaaagagagtaatccaatgagaggctgggcaacatttgggattatttcttgcatcttcattgtgttgtcaagtctactttgttgtggaggtttcatctacaaaacacgtgtccaacatcagtctggtttatatgcgctgcctgggatgaccatcttgtctgccttcctagatgcggttggtggaccaagctacatgagagcagatgatcatggcggaaaccatgcaagccaagcatcatgggaacgcatgcctggtacctcacaagcagcagagcatggcaccaaagataggagatacggatcactttgaactgaacgatgctttagtttttgagggttgcttttttgtaagtttgaagtattctgtaatcagacaaactctgcacttcatctgcagttgagcttccgaagcattgcttatcatcttttcagcttagatggtgttatgaattgtggtggtggatcattcaccatgccaccatcgtcatcgccatccgatcgacgtgcatgctcattagcagatactagacctctgttcttagatagtgctccctccagtttttaatgctcaacattattgactttggacatatgtttaatgatttatcttattaaaaaacttatgtaattataatttattttgttatttgttttattattaaagaaaaaaaaaaaaaaaaaa

SEQ ID NO: 25433 - DNA, 2068 bp, Oryza sativa
  Clone ID: PAT_MRT4530_3031C.1
ctattgaggcgattaatgctggtcatggagtcgaggcgtctcagctttccggtcgatcggccgcgagtccactctgtcggcttgtcttcgccaccgccattgctgataacaacaacgacttcaccgccggcctgcctccgtcgccgccgagtggtgcctccgtctacacggctggcctattatgccgccgctgttgggcgtctacgacttcaccgccggcctgcctccgtcgccgccgactggtgtctccgcctacacggctggcctattatgccgccgctgttgggcgtctacgacttcaccgccggcctgcctctgccgccactgactggtgtttttgcctatacggttggcggactccgccgctgttaatgggcttcatcatctacaccactggcttggttccactagcgctgactggtgtttttgtcaccattgatggactgctttattcccacatcggctacttctgctgtcatcgagggaatacgacaaagctaagtcatcatttatttcattctttatatgatattttgtcttttcctttgcctcactacatcaacttcaccaccggctcgcctcgaccgccggcgattggtgtttccgcctgcacggctggcctttatgccgccgttgttgggcgtctacgtcttcaccgaccggccgcctcgtccggcgccgactgatgcttccgcctgcacggctggcctattatgccgccgttgttgggcgtctacgtcttcaccgaccggcttgccttcgccgccgccgactggtgttcccgcctgcacggctggcctttatgccgccgttgttgggcgtctacgtcttcaccgaccggcttgccttcgccgctgccgactggtgtttccgcctgcacggctggcctttatgccgccgttgttgggcgtctacgtcttcaccgaccggccgcctcgtccgccgccgactggtgcttccgcctgcacggctggcctattatgccgccgttgttgggcgtctacgtcttcaccgaccggcttgccttcgccgctgccgactggtgtttccgcctgcacggctggcctttatgccgccgttgttgggcgtctacgtcttcaccgaccggcttgccttcgccgctgccgactggtgtttccacctgcacggctggcctattatgctgccgttgttgggcgtctacgtcttcaccgaccggccgccgcatccgccgctgactggtgtcactgcctgcacggctggcctgttataacaccaactgatgctaccttcttcacggtgccctcacctctacgtctggtttatacagctaccactactgatggacatcatcgtcttccgttgccgactggttatgccgccgccgactagtgcttttatcttcacaactgcgcgtcttcgctaccagtttgcttctgttgccgccgacttgtgttcacttcatcacggcgatgcaactttgtcatcatggtggagcgacttcatctttattatcttcggcactggcaaattctattgctgctacttcgcaagttttactacttcaccaaccacgacgtctttgtgaacctcgacatctcggcatgcaatgccatgatattttactacaacaagtgactctccaatattcaggatttctacttggacaccttcaacacatatcttcaatcaagcaatgactactcgacgacaagaagctataattctcgactctatgttcagttgtttcccaactaaccaaagaacattctacttcaacaacttcaaatatttcggtttagacgagttgggcaacaacatcaactctcctccaattatttgtcttcacggttggcctactacgcaactgccgatagaggatctcatcgttatcatcggctgctacatcgctattgactggatcaccgacatcgtcatcttcatcaacatcttgtcaagcctcatcaacatagcctactctgctgccgttgatgggaaacttcatcatcatagtcagctatctctgttgccgctaatcatcattaccgtcggatgcgtttgtcgccgccgattattttcttcatcttca

SEQ ID NO: 25434 - DNA, 1949 bp, Oryza sativa
  Clone ID: PAT_MRT4530_30320C.1
cggacgcgggtcggaaactctcccaaaccccaagtccccaaccatggcgaccgccgccgaccaaaaccctaacgacgcggagcaccgggaggccgcggcgggagccaatgcggcggaggaggagtacgaggaggaggatgaggaggaggaggaggtggagctggacgggccggcagccgtggcggcggagcgggagaaggtgcaggccgtgttcaagcggctgtcgtcggaccccgtgggcatccgcgtccacgacgtgatcatcaagggcaacgtcaagacgaaggaggagctcatcgaggcggaggtcgccgagctcctccgcgccgcccccaccgtgcaggacctgctgcgcaacgccagcatcgccagcgcgcgcctgcgccagctcgacgtgttcgactccgtcaacatcacgctcgacgccggcccaccagagctgcccggcaccaccaacgtcgtcgtcgaggtcgtcgaggccgccaaccctatcacggggagtataggtaaacttctcagagccatggcaagatcttggtcacttgaaggctcggttaagttgaagaacctgtttggctatggtgacatctgggatgcttcaggtgcatacagttgggatcagacatctgaggttggcattggagtgtccctgccaagatttaaatcaatatcaacacccttgatggctcgggcgtcattgtcgtcccaagattggctgaaattttcttcttacaaggagcgcctgcttggcctttcatttggtttgatttcaaccatgcaacatgatttgtcttataatcttacatggcgtaccttaactgatccatcacaagtctcatcgaagtccataaggaggcaattagggcacaatcttctctctgcgttgaaatatacatacaagattgatcaaaggaattcacatctcaggccaacaaaaggatacgcgtttctctcaacttctcaagttggaggtctatgggatagcaaagggttgagatttttccgccaggagtttgatgttcgtggtgctgtacctttgggattctataatagtgctctcaatgttggccttggagtgggtgccattcttccactggggagaggatttatgaatctatcttcatctgtgcctgatagattttacctcggaggtcattcttctccagtttgcagcttgagtggactgtcatccttgttgggtttcagaacaagagggattggtccaacagaaccacggaggcttgtccctagtgaatctgaggatggatctgctgcctcaccagggcgggattacttgggtggtgatcttgctgtctctgcctttgctgacctttcgtttgatttgcctctgaagatatttagagatgctggaatacatggtcatgcatttctaactgctgggaaccttgcgaaactgtcggagggtgagtataagaagttctcactttctgaatttgggcgtacatttaggagctctgcaggtgttggcattattttgcctactaagcttttccgagtggaggtgaactactgttacattttgaagcaggctgagcatgactctgggagaacgggaatacagttcagcttttcgtcacccctgtagtgaccagaaataccttttagccaaagttagcttctcccgtagaatgctattgctgccccttatattctttcctgcttaatcaaacttcccaacaaacatatttgcatttcattgacttcacctgtgctatgacgctcttttatcggcacgaggagcctagagtatctaatactgttcggcattttgcacttctgagaagttttcccttctttttgcaccaagtgatgtcaagaacaacgtttgtacaactggaatacaaatgctgcaattggtggaggcaataaaatttttgggaaactgtttagaccaaaaaaaaaaaaaataaaaatatttacattaattt

SEQ ID NO: 25435 - DNA, 418 bp, Oryza sativa
  Clone ID: PAT_MRT4530_30321C.1
cctcaaccaaaacattcattcctcggagaaagacggatccatggaagttttattgccctaatcaagcacgcggagcacacacacacgggggcagaggaagtgctatgaacaagacactaatcaacatgcagagctaaaacaaacacggggatcaatgcatatcccgaaaaaaaaacacaggggaaagtccacatgttcttgttgaacacaacttctgcgcgaaccaccacgtcttgcggatttatgtttaccgtgtggtattcccttaggcgtccacgatctcgacggcgagcttggacgccaggatcaggtccgggtgcgccgtcgacggcgtctccttcttgatcgtgccggcgatggcgttcgggcggacgagcgccttcagtgacaggtgcgccgccttgtggccggagatcat

SEQ ID NO: 25436 - DNA, 135 bp, Oryza sativa
  Clone ID: PAT_MRT4530_30322C.1
ccacttccctatccaagcaagtaaaacctgagtgcttcagcttagctagtgacctgacctgatcctgatgtgctggctggtgcaatcatctacgactacatccctggcgcgccgccgggtgtgctgcctccgact

SEQ ID NO: 25437 - DNA, 536 bp, Oryza sativa
  Clone ID: PAT_MRT4530_30323C.1
accaaagaatattgacgaagcaggcacgcgtgcaggtgctggtatgcaatagaggggccgacctacgcgttcgtccacgcgttcggctatgtactgtaaaagttggttatgaatatagtttttgaatgctaaggacattctttatattaaaaaatttttaaaaaaaagggggaagaaacaaaaaaaaaaaaaaaaaaaaaaaaaaaaaaaatttaaaaaaaaaaaaaaaaaaaaaaaaaaaagggggcgggctttttaaaggatcaaagtttaccagggcgtggaggggaaaaaatattttttttatagggggccctaaataaatttgaggggccgatgtttaaaaactttttccatgggaaaaaccttggggtttccaaatttaatcgcttgtgagaaaatccccttttaaaaagttggcgtattgggaaaaaggccggaaccaaacgccttttaaaaaagtggcccaccctgacgggttaagggaacgcaacctgtaggggccaattaaataaagggggtggggagcttacgcg

SEQ ID NO: 25438 - DNA, 1852 bp, Oryza sativa
  Clone ID: PAT_MRT4530_30324C.1
atgaagatagctagcccacagacaaataatgtgtgcccttctgtcgagcaaaggaaatcagagaatatttcaccattgaaggagccatgtgtaaggaatgagttgtcatgtacaacaaattctgatagtaacggattgcaatataatggaggacttggaggccataaaggatctgcaccaggcttgccagtttcttctagcccatcattttcttccaacgttgcaacaaggcccattagtacttcaagtgtatccatgaaaattgtgcaaggcttggtggcatctaaaagttgtatacaagcttcctctcgaactggagacagtagatcattgcttggtgagcatcataacagatcaccggcaatgattcatgatggaaccaacatgaagtccagtttggaaagctcaaacaattcttgcaggttgattgcatctgactataatgcaactccgtgtcattcatccaaggatcaggtattagtaacaccagggactaatgcctcagtagtgactctgaaagatagcagccaggtccatagtgcgtcaagtcagcagtttgtcagaactggcccatggacacaaagtgcttctcatgaagcatcatcacctagtacctctgctttgaagccttctttagatccccctgccatgaaaaatctgtatgggggttttactcaaggcagtgcccatcctggacctccaagtttcagtaatcagcaaccaaatgatgggcgtcttcaaagaacatctgaatctctaccaggtgtggaagctagagctaggggacatccaactgtcacggcacagcctgcactagaaattcacagcaggaatggaggtgcacagaagggtcctcgcatagccaatgttgtgcatcgtttcaagtgctctgttgaacctctcgaaattggtgttgtgctatcagggaggctgtggtcttcaagccaagcaatcttcccgaaagggtttagaagcagagtgaaatacttcagcattgtggatccaatccaaatggcatactacatatcggaaatactggatgctgggatgcaggggcctctgtttatgcatctgtacatattattgctcatttcatttttgcagcctccaggatcagttgatggtcttgaaatgtttggtttattatcaccaccaatagttcaggcaatttgggcgcgggacagagatcacatctgtacagagtactggagatcaaggccccatgttctcattgaggatccaaacaatcggcatatgttatctcagggtccacctctccttgccctgaggggtctcatccaaagggctaaccgggatgaattgcaagtcctgcggagtttgatgacgaacagcaacaatttggatgatagctccaggcaacaggccgcgcacattatcgaagaggagattgcgaagcaattgtgctgagaagggtaaataccggctggctgttgtactttagatggcatgaatatttttttttccgacagggttaagcagatctaaaaccgaggcttgcttctccccttgcctttcatgcccattctttccattcttgagcccataccataagatttatgcttcaggtgactgttgtttcattgactgacttgtgtacatacagatgtgttgtgttcctaaatgctagccagctgcctcatctttcctgtaaaactcatgttgtgttcagctgtccagttaagtagggttgcttctagttcagagatctttggacagtcaaaatgtccatgccagatgtatctgctatgttattactttccagtctaacagtgattttgtgctgctgctagcaggcactcgagttttctaaaaaaaaaaaaaaaaagaaaaa

SEQ ID NO: 25439 - DNA, 412 bp, Oryza sativa
  Clone ID: PAT_MRT4530_30325C.1
ccatgaaaaatggcttacccccttccccatatttaactggggtccaaaatgggagatgggggagccaacttaaccatgcacctcaccaagtgtgtaccaaccaaaaaaacattgtttggcttcaaaacacatgacaataccattagggacgggtccaaaacacttgggctaggcccacccccgttaaaatcaagtaaaccctgttccgaaaagaaaaaacctccaaccttttttattaaaaccataacttgacgacgaataccctatcgggaccataaattgggttcaaggctggacgggtgggcacagaaccggttgaaacggttgcggattccctctggccaaggggaaacccagggtgccatttggtattcgaaggccggaagggtgcttgggggctccaattgggctc

SEQ ID NO: 25440 - DNA, 497 bp, Oryza sativa
  Clone ID: PAT_MRT4530_30326C.1
atggcactttattttgtatttttcgcaggagcgcccagcaacgattctctgcgacccgtgtactccaccggccaaaaagagggaaatcggcgaggtggagaagctgtccgctcccgctgctcgtcggcgttgtgccgtccactcccgtcgaccccggccagatccaacgctgagccgccggatccggttgtggcggcgccggaaccgcagccccacgctccggttgctcgccgccacaccgtgccagccgccgacgccggggacgcctcccgccactacgccagcgcgccagccgccaccaacgtagtctgccctgcttcggaccgcgtcgagcaccagcatctcctcggggagaaggagggatgcatcgcgtcgttgccacggacaccgagtccgcgcgagcaccaggctgtcaccacgaacaccgacgccctaccccccctcccgcacgctggcgagcccgatgtggctggtgaccgacctcctccggcgggctg

SEQ ID NO: 25441 - DNA, 180 bp, Oryza sativa
  Clone ID: PAT_MRT4530_30327C.1
ggggggatcatttctgtttccaaaaaagaaccctcttttattcctatatgcacccaagcattacaggatacgtattcacattacagtttacacttcgcattacaggttacactatttggtgggagcatgggaaaaattggaagggggttgctctctgggattgcattgaagatgattaaa

SEQ ID NO: 25442 - DNA, 222 bp, Oryza sativa
  Clone ID: PAT_MRT4530_30328C.1
ttacatatgctccaacagaaacagcagagagggaatgcagggtttacgcccgctcaggggtgctcccaaccacgcaccacagctaacatagccgtaacccataacctagagttaaacctcataatcttgcctcacacctccctacttagcctgttgattatgtactctactatcaagcactctaatcaaaacccatccatgtcccagaaaaggaagccgcag

SEQ ID NO: 25443 - DNA, 877 bp, Oryza sativa
  Clone ID: PAT_MRT4530_30329C.1
aaaaggggaattttttccaagccaataaaattggggacaccaagggttttacacgcccacacgttttaaaaaaaggccccgaaaatttaataaaggggccacaaaaaaaagaaaataacttgcaaacccccggaagtaaaatttggaccttaaaaaggggcccccccaaaaaaaaattttataaataatgtataaaatatagatatttttttaaaatttttaattatttttaattttttttaatatagaccagtttttttatatttttttttttttttcaaattttttagcatttttctaatggataacgcggaataatctcatttgcttgggatatgattgtacaattcacaacagtgtaactgcaggaaaagaaaaactttggaagaaacaaaacttgtatttcctaaaatgataacttctccatcaaaattccactgatttcttgatgaactgtcgattaacgtgggcgaatacagccgtgttgatctagttcacattttgaccgccagtgaagcacccgaagagtttcttaaagaagcccggttcattcctctgtgcacccttagcatcatttggtctgaccggattgccattgtagtagccagggaattgagcgtggaaaaatcagaagagccgtgaagctcttaatctttataaagatttgaaatttgaaaagttgaaaactatcataggacatagcaaacaaaaagcctgaggtaatagaagaatacatagaagactgaaaattaagaacccttttcaaagcacttatcaacctcaagttataacaagatctgctacatcatatccggcaaattgatgtatgcagaaaactaagcaaattgatgtatacagaaaactaattaatcatgta

SEQ ID NO: 25444 - DNA, 2532 bp, Oryza sativa
  Clone ID: PAT_MRT4530_3032C.1
atgggcgtccacgtcttcgccgaccggctggccttcgccgccgccgactggtgtttctgcctacacggctggcctattatgccaccgctgttgggcgtctacgacttcaccaccggcttgcctccgtcgccgccgactggtgtcctcgcctatacggttggttggtcacaccaccgttcatgggcgtccacgtcttcgccgaccggctggccttcgccgccgccgactggtgtttctgcctacacggttggcctattatgccaccgctgttgggcgtctacgacttcaccgccggcctgcctccgtcgccgccgattggtgcctccgcctacacgggtggcctattatgccgccgctgttgggcgtctacgacttcaccgccggcctgccttcgccgccgccgactggtgtttccgtctgcacggctggcctattatgccgccgctgttgggcgtctacgacttcaccgccggcctgtctccgtcgccgccgagtggtgcctccgcctacacggctggcctattatgccgccgctgttgggcgtctacgacttcaccgccggcctacctccgtcgccgccgagtggtgcctccgcctacacggctggcctattatgccgccgctgttgggcgtctacgacttcaccgccggcctgcctccgtcgccgccgagtggtgcctccgcctacacggctggcctattatgccgccgctgttgggcgtctacgacttcaccgccggcctgcctccgtcgccgccgagtggtgcctccgcctacacggctggcctattatgccgccgttgttggatgtctacgtcctcactgttggctcaccttcgttgccgtcgactggtatttccgcttacacggctgacctattatgccgccattagtgggcatcttcgctttcaccgtcgaccgccttcgtcgccgccgactggtgtcttcattgttattgatggacgactttgttcccacattggccacttctgccatcaccaaggggaatattacaaagctaagaatggatcagtcagaacatcacccccggctcgcctcgaccgccgccgactggtgtttccgcctgcacggctggcctttatgccaccgttgttgggcgtctacgtcttcaccgaccggcttgccttcgccgccgccgactggtgtttccgcctgcacggctggcctttatgccgccgttgttgggcgtctacgtcttcaccgaccggccgcctcgtccgccgccgactggtgcttccgcctgcacggctggcctattatgccgccgttgttgggcgtctacgtcttcaccgaccggccgcctcgtccgccgccgactggtgcttccgcctgcacggctggcctattatgccgccgttgttgggcgtctacgtcttcactgaccggcttgccttcgccgccgccgactggtgtttccgcctgcacggctggcctattatgccgccgttgttgggcgtttacgtcttcaccgaccggccgcctcgtccgccgccgactggtgcttccgcctgcacggctggcctattatgccgccgttgttgggcgtctacgtcttcaccaaccggcttgccttcaccgccgccgactggtgtttccgcctgcacggctggcctttatgccaccgttgttgggcgtctacgtcttcaccgactagcttgccttcgccgctgccgactggtgtttccgcctgcacggctggcctttatgccgccattgttgggcgtctacgtcttcaccgaccggcttgccttcgccgccgccgactggtgtttccgcctgcatggctggcctttatgccgccgttgttgggcgtctacgtcttcaccgaccggtttgccttcgccgccgccgactggtgtttccgcctgcacggctggcctattatgccgccgttgttgggcgtctacgtcttcaccgaccggccgcctcgtccgccgccgactggtgcttccgcctgcacggctggcctattatgccgccgttgttgggcgtatacgtcttcaccgaccggcttgccttcgccgctgccgactggtgtttccgcctgcacggctggcctttatgccgccattgttgggcgtctacgtcttcaccgaccggcttgccttcgccgccgccgactggtgtttccgcctgcacggctggcctttatgccaccgttgttgggcgtctacgtcttcaccgacgggcttgccttcgccgccgccgactggtgtttccgcctgcacggctggcctttatgccgccgttgttgggcgtctacgtcttcaccgaccggcttgccttcgccgccgccgactggtgtttccgcctgcacggctggcctttatgccgccgttgttgggcgtctacgtcttcaccgaccggcttgccttcgccgctgccgactggtgtttccgcctgcacggctggcctattatgctgccgttgttgggcgtctacgtcttcaccggccggccgccgcatccgccactgactgatgtcaccgctagcacggctggcctgttataa

SEQ ID NO: 25445 - DNA, 2738 bp, Oryza sativa
  Clone ID: PAT_MRT4530_30330C.1
ctcgaatcccagatcaaaccctccctccccttccacccccgcacgatccacctaccccctccccccttcttctccctcgcgcgcgcacgcagctagctagctaccgcgaggaaccgaatccaatcgagctcaggacgaggcggaggaggagaaaccaccccggattctcttgatccggagtccagagagagaccacggggtagtgccgtagtggaagcaatcaatcagcagcagcaggatcgacccccccccccttcttgattgctggtttggccggcggcaatgccggatccggccgggctgccatggctgcggcgtctgtgagccgcgtcgtcggcgcgtgtgaatgctcgtcgggtctagacggtttgaggaggaggagtggggagagggagcgggggcggcggcgacgatgcagatccggctgtcgccgagcatgaggagcatcaccatctccagtagcggcatcggcatcggcggcggcaatggcggcggcggaggcggcggcggcggcgtggggagcgggctgctagacctcatgaagctcaaggccgccgcccgccacttctcctaccgcaccgtcttccacaccgtcctcatcctcgccttcctcctccccttcgtcttcatcctcaccgccctcgtcaccctcgagggcttcaacaagtgctcctccctagattgtctaggcagacggttaggtccacggcttcttggtaggggcaacgatggctccatgagggtcatgagggatttgtataggatgcttgacgaaataaattctgaagaagtacctgttgatttgaaggtcccagactcttttgatgaattcatctgggacatgaagaataatgattatgatttaaggtcatttgcttttaggctgaaggcaacaatggagagcatggacagggaattgagaacatcaaggttatcagagcagttaaacaaacactacgcagcaattgctattcccaaaggccttcattgcctttccttgcgtctaactgatgaatactcatccaatgctcttgcaaggaaacaactccctccacctgagttgatccctcgtctttctgacaattcctatctccattttgttttagcatcagataacatccttgcagcctcagttgtggtcagttcaactattaggtcatcattaaaacctggcaggatagttttccatgtcatcactgacaagaagacctatcctgctatgcactcatggtttgctttgaatactctttctcctgccattgttgaggtgaaaggtgttcaccaatttgattggttaacaagagaaaacgtgccagttcttgaagctatagaaactcagcacactgtcagaagtcgtttccatggaaatcaccttgcaagaaatagtgcaggtgatagcccaagggtttttgctgccaagctgcaggcagggagtccaacatatacttcagtgctcaatcatattcgaatatacttgcctgagttgttcccaaacctcaacaaagttgtatttcttgatgatgacgttgttgtccagcgggacttgtcatcactttgggatattgatctaggtgggaaggtaaatggagctgttgagacctgcagaggtggagatacttgggtgatgtccaagaggttcagaaattatttcaatttctcccatcccctcattgccaataacttcgacccttcggagtgtgcatgggcatatggcatgaatatatttgacctgagtgcatggagaaagacatccattaaagataaataccaccattgggtcagggagaatctgagctcaaacttcacactttggaggcttggaacattaccacctggccttatagcatttagaggtcatgttcatcctattgatccatcatggcatcttttaggcttggggtatcaggaaaagacagatatccccagtgttcagaaagcagcagtcatacattacaatgggcaaagtaaaccatggctggatattggttttaagcatctccagccattttggacaagacatgtgaactactcgaatgagttcataagaaactgtcatataatggagccccagttatagattggctagataaaccattctataaatattggcgtaaattatggaattaaattcattattttggagaccaataccagatagtccagaaggatacccacgaaatgctctctgaacagtaacccggagctggtacacgagcggatggagaatatttaatgaacacaaaggaaatattttcttcctatacactaggatctctttccctttatttattccatttgtatcatagctcatgaaattacagtattgtttaggatggttcttttgtatttattggagcaatataaattgcctgatttggcgggattgatggtaggcccatcgttattgtaattgttgggtatccagttcaccacatgaacaacatgggccagattttgattttgcaaagcaagccctgtacatttgcttcctgttttctttatctttttgtggtcatctggtatgatactctggtgtcactggtgtcatcagaattggattattatacttactgtaaatttgtaactcctgtcatatttggtctttgactatctataaccttttcaagtttagtacatacatcagtgtgtattgatcattttattgtacattgtttacaagaaataagaacttaaatgaatttctttagacgaaaaaaaaaaaaaaaaaaaaaaaaaaa

SEQ ID NO: 25446 - DNA, 408 bp, Oryza sativa
  Clone ID: PAT_MRT4530_30331C.1
atgagcgtggagatcgtggacgggagcacggtgcggagcttcgtggacgacgaggccgccttcaacgcgtcggtggacgggcgcttcgcggcgctggacgccgaccgcgacggcgtcctctcctacgccgacatgtccggggagctcatggcgctccgcgtgctggacacccacttcggcgtcgacgacggccacggcggcgccgacgacgggctctaccgcggcctcttcgcccgcttcgaccgcgacggcgacggcaaggtcggcctccacgagttccgcgccgagatgaaggaggtcatgctcgtcgtcgccaatggcctcggcttcctccccgtccagatggtcgtcgaggatggcagcttcctcaaggtggccgtcgacagggagctcgccaaggccgcctaa

SEQ ID NO: 25447 - DNA, 2130 bp, Oryza sativa
  Clone ID: PAT_MRT4530_30332C.1
gccagcggcacgaagcagccacgagcgctacgcgggtgcgtcgcccgtgagcacccagccggcgggcgcggcgactccgacccgacgcgcgcgcgcgatgaccaccgctctcttcctgcgctgcggctgcctcgccgccgcgccggcgctccggcgaggaggcgccgcgctgcgcccccgccggacgccgtcgaggctcgtggcggtcggcgccacgtcctcgtccggcgacggcgtgaccaccgcggcggacgccgtactgcgaggagtcggcggcgccgatggctcaccggcgggcaagccgcgaggctacgggctcgtcggcggggccaacggcgccatggctcctcctcctcctcccaccaccaagtccaccgccgtcgagaccaccgtcgagagggtgatcttcgatttcagattcctggctcttctcgcggttgccggatcacttgcaggctcccttcgctgcttccttaatggttatctttctggtgaagatgtttgaggggagtattgtgctgaaggtaacaacggggttcgaactggggagctggtcctcctccctgtgcaggtcatccgcttcactgtagttgcaacactccttttaccggccggaatcggcttgctcggtttttccagtcttataacgtcaacgggagttcataaaaaacaataaagatgtatccggataacatcattatctggtatgcttgctctcagggtaaaaccaaagtggaagaagactgccttcctggacgaactgataacaaaaagagggcaagtaaccgttgtgatccttccggtgaagatggtcgagagcaacaacatggtcaagaaaacatcggaattggaactactgagctactcggtctgcatatacctgtcgtccgcttaagagtacagcagaatgaactttaccctgattcatcttacaacgtttgtaaattgttataatttgtacaagatcaaatgatgtgatgttgccaccattgtggccatccaaagatgcaaagcgggcctttgcaggtacaaatacttgttgactgatcatgtgagaatcagcgagtcattgtattgtgctaccactgcttttttttgtgttgtgtgggaaggcacaaagaattggttggcacatttgaggaagaaaatgccctcagaaacacttctttctaatcgattgtaacctgagaccacttgctcctcctcgctcctctccgctatccgccgcctcctcgcctcgctcgcgcgctcccctcctccagctgccgccgcggcgatgccgccgtcttcgccggagccggaggaggaggggatggggaggagcgacgccggcgtcggcggcggcggaggaggagaaggcgggggagggggaggcgggagggcgctgagctacgggaaggcggagtactgggacgcccgctacgtggaggagggcggcgcgccgtacgactggtaccagcgctacgccgcgctccgccccttcgtccgccgcttcgccccgccggaatcccgcgtcctcatgatcggctgcggctccgctcgtacgccacctccctcctcctccatctcctccctttccatagagattgcggctttcggctccgctctcgtgttttcaattcctttccttgttccaaagaaagaaagtcaattagacatgcaaatctagcatttattgaagcgtacatgtaatgccctttcatttgattgtgccattgataaaggtactttggactcattgatggtaagtaggctacattattcattgttccttttccttattctggtacttcttcaacattgcgatcttgctacttccatagtgtggtgtgggtgctcctctcagcgcagtcagatggttctagaagtagaaaggtttttaatgtcttgcttaccccactaagctatcattcacagtctcatctgcaccaagatacgccatagatttcaatagtgctgctgcagactcaccagctcaaccatttgattgcaggcttcttaaaccaggaggaatctttatgctggataacttatggtgatccatcggtgaggggtaccccatctgaacccatcagggtgcaattgggaaaatgtactatacagttcttgcccagacccgggtcaagggca

SEQ ID NO: 25448 - DNA, 522 bp, Oryza sativa
  Clone ID: PAT_MRT4530_30333C.1
atggcggcaataggcggccggagacggcgggtggtggtggggctcgggtcggcagtgggagcggcgttcgggcggcggtttggggaggaaatgtggtggccaagcttgatctcgcggcggcgaagccggtggtggtggccgcgcgacgcgacgatggctaggatggcggcgagtggtggctggagatcaccagcaacggcggagagagaggagcgacacggggagctcgagagggcgcgatgggagctcgggcgaatggggaaaaagagagaggatggcacagggaagctttttatagcgctcgggagtcacgggcatggccggggaagggcggcaacaaccggcgaggaagtggggcgacatcgaggggtggcggcggcgattaggtgccggattttgggggcaagtgggggaaggagtgtggaggaggtggggcgacgtggccccgcgatgagggtgagcgcgcgggtggaggagagggcggaatcggcggcgacgtggggagaccatggcggcggttga

SEQ ID NO: 25449 - DNA, 289 bp, Oryza sativa
  Clone ID: PAT_MRT4530_30334C.1
gggtgggcttttttttactacacaagccccaaaatccattcatcattaatggatcaggtggctttgcatccaagtaacaaggcctcggggacgcttacaatcatgcacaggtcaaagcactaccagcaccccgctcctgcttgccaggcgcaattctaggtaggggtcttacttttttttgggaggagtaaaaagttttccccggacacgagggcggacgcccgggcggacgcgaagacggacgccagggcggacccgcggtcggacgcccgggcaaacccgtagctca

SEQ ID NO: 25450 - DNA, 327 bp, Oryza sativa
  unsure (1)..(327): unsure at all n locations
  Clone ID: PAT_MRT4530_30335C.1
gtccttcttgtccttcttatgcttcttctccttgtgtttctccttttcgagcaggtgcgaggctagctggccgtcggggcgggcggtcttctcatatcctgggggcggaaacgggaagcagcgagacatggcacggccgcctcgggccccggatcacccaccacctnctccctcctccggctgaggtcaccaccaccaccaccaccgcagacacctcctccgccgccgccgcgggcgcgggcgcgggcggacctcctcccctcctcctggtggcgcagcaaccggggccgcctcactcgtgccacggcgaccatgtcctcggggctc

SEQ ID NO: 25451 - DNA, 484 bp, Oryza sativa
  Clone ID: PAT_MRT4530_30336C.1
agaggggaggccagatggcccagctttttatagaaagcataagtcttacaaaccgttttacataatactggggctgccagttttcaattaaaggcattaccatcaggcatcagaacataagcatccaaagaaggatgactctaagaagaaggatgactctaagaaagggtaaaggataaaggttatctagcagaacagagacgaaaactaaacagatgggagcagaattatccaatcccagctcttcgtaaggacaccagtactccttgcatagcttgagtcttcatttccaggtcatgggccttctccggctttaatagaatcttccactgtaaaagaaaaccaatcaagcggaaagagataatcaggggtgaggagattagtttgtttctaaaaatcatatcattgcgagcagaccaaagagtccaaatcaaagcagccaaaatcatggtattaagtctagaggttttagaagtatcaaaac

SEQ ID NO: 25452 - DNA, 538 bp, Oryza sativa
  Clone ID: PAT_MRT4530_30337C.1
ttatgttcagtagagcagtccggcagctgttcgggggtcagctttgggatttgcctgatcgacccctaccagtgtattaatctacaaaaattaagattgacattcgtatgtacaatttaccggatctatcctcttgtactaactttacaaaatggaagggaaaatgtgttgaccaaagatgtcaactactaagcatagtcaattgcaaatcggccgggtggtttgcttctctccaagtatgggagattctccaatcttcgaaagacgctcgtactttcttgatcttatgaagaaggggcttacttccattccgtaaggatcaattaataagggtattattcctacgaaacaactaccctttatcggtaatctattattagagaataaatgaattggctctttctgctttcatgtataagctacgtcatatggagtgtgatagaggatatctagggctggtagagttgattgaaataataatccgtagggatagctgagaattgctcaagaacaagagattacttttgatgagagttat

SEQ ID NO: 25453 - DNA, 228 bp, Oryza sativa
  Clone ID: PAT_MRT4530_30338C.1
atgggagaagcggtggcggcagcggcccccggcatgcggcggacggcggccggcgatgccctcccatctaccagaggtgagcgccgccgctcgggcgccgcactttctcaatcggaggacagcacgatgaggaaggttgcgggagaggcgccgtcaggcgccgctgatctggtccctcgcaaccagatcaccgtcgcataccctagagtcgacgtcgccggtgcatag

SEQ ID NO: 25454 - DNA, 317 bp, Oryza sativa
  Clone ID: PAT_MRT4530_30339C.1
atatggcggggggagcgagcaggaagggggcccaggctgaacaaccatcaatgcgcagcgccccaactgtccctcaccgcatttaatgcggtaagggcagacgtgcgatgtaaccagtctgtgaccggcctgttgccggtcacatccgattgaacgggtggccgtgcccccacgtcacctctgtaacaggcggagtggaagtagagggaatgacagggctgtcccctgtgtcaggcgaggggtggcgctgggtcccactcaaggacaggctgctgcttagcttccgagcgaaggcacggatcgtggcccggtcaagg

SEQ ID NO: 25455 - DNA, 192 bp, Oryza sativa
  Clone ID: PAT_MRT4530_3033C.1
agtcaaaaccaccgaagaacctaaatggaacggttttgtaaagttaagggatgtcatatatctggttttgtggttgagggacgattttgtaattcgatgacaagttgagagaacttgggtgtactttttccaagcaagaaatgagaaagtgcggtgctgagttgggcttggaaccaaaaaaaaaaaaaaaaa

SEQ ID NO: 25456 - DNA, 231 bp, Oryza sativa
  Clone ID: PAT_MRT4530_30340C.1
aagctttttttttttggaaaaacagttttattacaactttaaattttagttaatttaaaagcattttctgtgaacaatagatggtccagattcatcatattcttctttggagatccacatttgttggaaagtggagagagaagcgagaatagatccaccgatccagacggagtattttcgttcagggggagcaatgattttaattttcatggttgatggagcgataagctt

SEQ ID NO: 25457 - DNA, 105 bp, Oryza sativa
  Clone ID: PAT_MRT4530_30341C.1
ctcacggagctcgagcccacgccgccattacacgcgaaatacgatcaaaagcctcagacactcaagcggcgccacgagagctcactaacgccacaaacaaactaa

SEQ ID NO: 25458 - DNA, 633 bp, Oryza sativa
  Clone ID: PAT_MRT4530_30342C.1
tctctctctctctctctctctctctgactcttgactctctttcgctgtgcctgtgagcaacgctgttctcctccctccggcctccggcctccgctctccgcctcgcctcgccgcccgatccgcgcgtgccttctcctcctcccccttcgttgcgtgctcggcctccgcacccaccctccgcctcgatcagccgcagcccgactcccccctgcttccccgcctactccgcgccgcccgcctttggcgctcgccgccgcggtcgcccccttccgcggctcgtcgctgggttctcgtccagcacgcgggtgccggctgcttcttcttcttcctcctcctccggtcgccgcgtcaccagggttagtgcatggcagtgacaccgcatcatcggctatatgaatttgctaagactgcccttatcaagattttcgcattcccttatgccacggtctgtgacctgtattgtgatgatggggttgatacagacaagtggggcgatgcacaaattggtcactacatagggattgatgcctctgcatcaggtgtcaatgatgctcgtgagctgtgggagagcagaaagaaacttttcacgtctgagttcatcgagttagatccttctgctgatgactttgaagc

SEQ ID NO: 25459 - DNA, 760 bp, Oryza sativa
  Clone ID: PAT_MRT4530_30343C.1
cttttctctctctctcctggccatgttaggccgtggccgccactagtcgatctccctcaccggagcgttgtcggccaagccctcgcgccactagcttcgtctcatcgaggcgaatccatttcacccctttcccctttcccttcccctttaaaacaagccaccacaacctcctcttttgccgccggagcagagctcttgcctgcgccgttccagcttcctctctcacttcctctgccgactatcaccctccccggatgcgcgtcgctcgggaacatgtattgccaccggcgtcgcagtcttccatccaccggagagccagcgcccctcctctcctcctctcaactcactcggcaacagaaaagaggaagagaacgggaggaggaagaaggaagaagaaagagaaaagaaagaggaaaggaaaggctgacagtggagtccgttatattttggatggcaacctgtgatatttcaaggatcggataatcaggttgcccatctcggatttatttgcgttggagcaagagtctatcttggagttcttgccgaagctgggagttcaatcatataagttaatctcattttaacttagttctcaagtatagattagatagatggtttaagtctatagcaaaacattagagttgagtcattctatagcttctgctgtaatagttagccacaagcttgtaaatacccttatattttgtaataatatctcctttgaaaccttaatcaaataaaaaaaaaaacacaccaaccc

SEQ ID NO: 25460 - DNA, 807 bp, Oryza sativa
  unsure (1)..(807): unsure at all n locations
  Clone ID: PAT_MRT4530_30344C.1
gcagagaaatccaattcaggattattttgctcatgttttccgagaaatttaacatgcagcatgtataccccagagatattacgacgttctgtgcaaggcttgtttgaaggatgaactctatttctcctccctctctatatatagttccaacaaatgtacctatctttgttcaattgaccagatttaattggcagggaaactatcgagattaaggtttgctattaaactatcgagatttcgctgtaaccaaaataaagccatggaaagtttggatgcagcaggacaggacagcacctagattctatgggtgataagtgctccagagatgggagatgagtggcagaacagaagcaaaggtccaaggtgtgagaaagtcaactggggcaatgaagacagcaaaaattacggttggttggcaaagaccgcatgccatcgctgatgccattcaactatggcaagttcgcctaccatggtgatctggtgtgccactcaaacttcagaagagagcagtttgttatatactatgtcctgccattttaattttcaagttagggaaaaggtgacctttctttcttttcttttcttttcttttcctttttacaaggaagggataaggtgacctctgttatccttgttgacaggttttctagttttgagatactagtgctaaagatgcatatataatttgaaattgtttcagaatcagtcagttccatggcctggtgtgacagttttattttcnacactgcgttgcctgcaaaatgttgctgttttgtgttcctcgtatgataaaaaaaaaaaaaaaaa

SEQ ID NO: 25461 - DNA, 729 bp, Oryza sativa
  Clone ID: PAT_MRT4530_30345C.1
atgcggggagagggcggcgacgtgggcgcgaggtgcgggcgcggagtggaggcgcgacgtggacgcgggaggaacgaagaagacggcggcgcggcggtttcggcggcagcggttggagcttcggctccagcggccggagggaagaagcgagagagggggagaggaggctggcgcggcggcggccggcgcggagaggaggcgaacgcagcggcggccggcgcggagagggggagagaggcggccgagacggcgggagcggcgggcggggcggagggtggcgcggagagggggagaggagacaggcgcgtcggcggacggcatgcggggacgacgacgaggaaagggggagagaggaatcgacggccgacgacagcggaggcgggcgaacatggcgccaggctgctcacccttgccgaccaggaccccgctccgcatccctccaccgaccgctgctccacctgctgcgctcgtggaggccgaataataaacttctatgggcaaacggataggatcgggcggcccaacagggaatattccactgatatgccggatggagggatccgggcagccgctcgagtgcagggcgagcgaggcgagcagggtctcgtcaccccccaccacgcgacaacggcgacgagcacggcggccagtgcgagaagggagcgcgacacgcggcgggaagaggcgacggcggcggcagcgggaagaggcgacggcgaccggatctag

SEQ ID NO: 25462 - DNA, 834 bp, Oryza sativa
  Clone ID: PAT_MRT4530_30346C.1
cccacgcgtccgtcgaattagccgtcttcgcaggaggatgcttccaacgatgagttctttgtcaatctcctgctcggcctggtaaatactaaatagaagcttacactttaaatttcgcacaggagaagttcaagtatttgttctgtattgcgcacaactacgaaatcttgttagctctctggagagctactgaggcaattagataagatatttgccctatgtattatagtagcgttcggttgtgcagttttgggtcatcaccagtttggtccaagcctgttacatgtgtttgtttcaaatttcaaatgggcaagtatcggatactctgtaattggatccaaaagatcgttatgctccctatatatccactggaaatgcttaccgattctgactcgtttcctcctacatgcgagctaagatgtgagacgttatattttgtgattatcaacctactagttaagttgtggaaaaatattgtcaagaagtaacaattgcgtatatttatgacgtataacctgcatggaagttatgatgagcacccatgcacgcattaacgaaatgttcttgacctttgagcactttgggttcatgtatgagcctccagacgcctttttgtctcatcttgtttgccctcctcttttaactacattctctcatgtatgatccatcccagtatacccagaaattaatccatctgttaatctcttctcgatcgtttttctccctcggcatgtgtatagctagtgtatctgtaactctgtgggtatatatacagtcaagatcggtgggctgaaaaaaaacaaaaaaaaaaaaaaaaaaaaaaaaagggcgacc

SEQ ID NO: 25463 - DNA, 209 bp, Oryza sativa
  Clone ID: PAT_MRT4530_30347C.1
atcgctacactactcattcagcttagagtaaagtccatcaccggtccctaaacttgtaccgttgtgtcatcccagtccctaaaatcgcaaatcgaccgttcaggtcctcaaacttgttcgactatgtcatcccggtccctaaacttgcagatcactcgtttaggtcctccaacttgttcagctgtgtcacaacggtccctaaacaggac

SEQ ID NO: 25464 - DNA, 293 bp, Oryza sativa
  Clone ID: PAT_MRT4530_30348C.1
cccagcgttcactaacgaggtaactaggtctcttaaaaaacctgtaagatcctcagcgggatgaactatcttgccatctatccgccttccttaaaatgcctcatgaaggccgtcatgctggctttgttcagtaccttcccaattcttaaagttcagaccaagcaacacctgccggggcctattattaaatatcttcttaaacatcaagcatcaattaattttacacgctttcggactcatcctaaaggtcaggggcacaacatttggagcaactcgcgtccatattttgtccc

SEQ ID NO: 25465 - DNA, 376 bp, Oryza sativa
  Clone ID: PAT_MRT4530_30349C.1
agagaaaataattaaaagggtcatctgaaaataatctggacagggacccaggagttacatgaaccctttttatggggatgctttttaacaaatattatggtacattacccaccattggttccccaaaaatcaaaatttgaaagaaaaaaggggagagaactttttaatcgggtcatacccaatcagattcattcatcccccgaatcctttgaatgccaaatggccaatacccccttacctactggggaggctgatctacccgcacgacgaggcccaattaaatccacggggatcaccgggggccggtgccggaggaggggtcggaggaacaatcccatttggccggggggggctccaccttttgcctggggaagct

SEQ ID NO: 25466 - DNA, 2232 bp, Oryza sativa
  Clone ID: PAT_MRT4530_3034C.1
atgagacaacctgatcgtcagatcaatacacacccggcggattcaaatccccaaacaggagtaggactcgaggcgtctcagctttccggtcgatcggccgccggcttgtcttcgccaccgccattgctgataacaacaacgacttcaccgccggcctgcctccgtcgccgccgactggtgcctccgcctacacggctggcctattatgccgccgctgttgggcgtctacgacttcaccgccggcctgcctccgtcgccgccgagtggtgcctccgcctacacggctggcctattatgccgccgctgttgggcgtctacgacttcaccgccggcctgcctccgtcgccgccgagtggtgcctccgcctacacggctggcctattatgccgccgctgttgggcgtctacgacttcaccgccggcctgcctccgtcgccgccgagtggtgcctccgcctacacggctggcctattatgccgccgctgttgggcgtctacgacttcaccgccggcctgcctccgtcgccgccgagtggtgcctccgcctacacggctggcctattatgccgccgctgttgggcgtctacgacttcaccaccggcctgcctccgtcgccgccgattggtgcctccgcctacacggctggcctattatgccgccgctgttgggcgtctacgacttcaccgccggcctgcctccgtcgccgccgagtggtgcctccgcctacacggctggcctattatgccgccgctgttgggcgtctacgacttcaccgccggcctgcctccgtcgccgccgagtggtgcctccgcctacacggctggcctattatgccgccgctgttgggcgtctacgacttcaccgccggcctgcctccgtcgccgccgactggtgtcctcgcctatacggttggttggtcacaccaccgttcatgggcgtccatgcctccgcctacacggctggcctattatgccgccgctgttgggcgtctacgacttcaccgccggcctgcctccgtcgccgccgagtggtgcctccgcctacatggctggcctattatgccgccgctgttgagcgtctacgacttcaccgccggcctgcctccgtcgccgccgagtggtgcctccgcctacacggctggcctattatgccgccgctgttgggcgtccacatcttcaccgttggctcaccttcgttgccgtcgactggaatggatcagtcagaacatcaccaccggctcgcctcggccgccgccgactggtgtttccgcctgcacggctggcctattatgccgccgttgttgggcgcctacgtcttcaccgaccggcttgccttcgtcgccgccgactggtgtcctcgcctgcacggctggcctttatgccgccgttgttgggcgtctacgtcttcaccgaccggcttgccttcgctgccgccgactggtgtcctcgcctgcacggctggcctattatgccgccgttgttgggcgcctacgtcttcaccgaccggcttgccttcgccgccgccgactggtgtttccgcctgcacggctggcctttatgccgccgttgttgggcgtctacgtcttcaccgaccggctcgccttcgtcgccgccgactggggtcctcgcctgcacggctggcctattatgccgccgttgttgggcgcctacgtcttcaccgaccggctcgccttcgtcgccgccgactggtgtcctcgcctgcacggctggcctattatgccgccgttgttgggcgcctacgtcttcaccgaccggctcgccttcgtcgccgccgactggtgtcctcgcctgcacggctggcctattatgccgccgttgttgggcgcctacgtcttcaccgaccggctcgccttcgtcgccgccgactggtgtcctcgcctgcacggctggcctattatgccgccgttgttgggcgcctacgtcttcaccgaccggctcgccttcgccgccgccgactggtgtcctcgcctgcacggctggcctattatgccgccgttgttgggcgcctacgtcttcaccgaccggcttgccttcgctgccgccgactggtgtttccgcctgcacggctggcctattatgctgccgttgttgggcgtctacgtcttcaccgaccggccgccgcatccgccgctgactggcatcagtatcttcaacacaagctgcctacgtttgccatggctgccgactggtttcttcacttccatggctgcatga

SEQ ID NO: 25467 - DNA, 639 bp, Oryza sativa
  Clone ID: PAT_MRT4530_30350C.1
attgtatatgtttttttttttttttttttttttttttttttttgccccgggaacccaatttttttttgcccggtttagaacaaaattcctttccccccccaaccaatttgaccccccgtttttggctggttttaatttaaggaataaacttcccctaattgaaacccccgagcccccccttggcaatcgggtgatccttttttaccaaacccccccttttagcccggtaataataatcagggccccccacttaaaaaaaagggggggggcaacaaacccagggttttttttagccctttaaataaggcaagggggggcttctaacccccctggggggggcgaacccaacctttttggtaaagcaggggggccccacttttcggccgggctttccccgcccaaagggccgccccctttttgggttcccccgcggttggccaaaacacccggggggtgggggggggcccccattttttgaaggggttcccaacgttgccaataaaattggcgggacccaccggggggcccacttgtttttcaatttttttgtggaaggctaaacccctcaaaaatttcctggggaagggggctttgccggccagaaccggggcaaaaaattttcaagggaaccccccccct

SEQ ID NO: 25468 - DNA, 2586 bp, Oryza sativa
  Clone ID: PAT_MRT4530_30351C.1
atgcgttcttccagaggtgtcattcgccattccgtgtggtgtctggtgtttgtatggtcatggcgggttgcagcagctcaggatcaacaagcaccaaaaactgatccagtcgaagcggtggccctgaacacgatcatgaggagatggggcaaggaggcatcatcggagtggaatgttagcggtgatctctgcagcggtttcgccgctgacaaaaacgactgggattactatcccaacatcaacccattcatcaaatgcgattgcactttcagcaacaacacactatgccgcattacaaaactggacttgaactataattacttgactggtttcattccatcattcatcggaaaattcacttcgatgaaatacttggcattgggtttcaatccactatctggaccacttccaaaggaacttggaaacctcaccaatcttatttcattgggcattagcttaaacaatttcacaggtggccttcctgaagaactaggcaacttgaccaaacttaagcaatttctagcatcagacaatggattcacagggaaaatacctgattatttaggtagcatgactaatttggaagaaatgcggattggagatattgtaaatgggatctctccattggctcttatcagtaatctgacttctctgaacaccctaatattgaggaactgcaagatatatggtgatctcggagcagtagatttttctatgtttgaaaagttaagcttgctggacctaagttttaacaatatcacagggaaagtttctcaatccatcctgaatttgggaaatctacagttcttgtttcttgggaacaataaccttgcaggaaggttgcctgatggtataagctcttccttaaaagcgatagatttttcgtacaatcaactcactgggagcattccttcttgggctagccaaaacaatttacagttgaatttggtggcaaacaactttttactcggtagcaccagtaacagtaatacatcaacgagaggatcagataataccatttatgaagcagatcctgcaaatcttggagctgcaacatattatgttactggtcaaacaagatggggtgtcagcagtgtaggacactacttccgggccacagatgcaaagaacattatatatagttcccaaaattttaacaatgtagttgattcaaagttgtttgaaactggaagggtgtcgccatcatctctgaggtattacggccttggacttgaaaatggaaattacacagttctgcttcgatttgcagaaattgcttttccggactcacagacttggctaagcttggggagtcgagtgtttgacatatatattcagggtgctttgaaagaaaaggattttgatataaggaagacggcaggtggaaagtcttttagcgttgttaataggagtttcatggtaactgtgtctaaaaattttctcgagatccatctattctgggctggtaagggcgggggaatctatgggccaatgatctcagcattgagtgtcactccaaattttactcctactgtgcgaaatggcataccaaaaagcgaaagtaaagtaggtataattgccggaatatctattggtgcaatagttttagtattagcagcattatttggagtgtttacgctgttaaagaagcggagggcattggcatatcaaaaagaagaactgtactatttggttggacaacctgatgttttcaattatgctgagctcaagctagccaccgacaatttcagttctcaaaatatcctaggggaaggtggattcgggccggtgtataagcaatattttgtccatgctcaaaatatacatgtaacaaatttggcaggtaaaacacccttgttggtttatgaataccttgaaaatggaagcttggatcaagcaatctttggtgacagtagcttaaacctagactgggtaacacgcttcgaaatcattttaggcatagcaagtggtctaacttatcttcatgaggagtcaagtgtgcgcattgtgcacagggacatcaaagccagcaatgtcttacttgacactgacctcaccccaaagatctctgattttggacttgccaaactctatgatgagaagcaaactcatgtgagcactagaattgcaggcacattgggctatctagctccagagtatgcaatgagaggccatttgtcagaaaaggctgatgtttttgcatttggagtggttatgctggagactgtcgctgggcgaccgaacacgaacaattccctggaggaaaacaagatctatctccttgaatgggcatggggcatgtatgacaaggatcaggcgctcgaaattgttgacccaactatcaaggattttgataaggatgaagcttttagagtcatcaatgttgcacttctctgcactcagggctcaccgcaccagcgaccaccaatgtcgagggtcgtggcaatgttgactagagatgtcgatgtgcctaaagtggtcacgaagccaagctacatcactgagtggcagctcaggggtggtggcaacaacggtaacacctccaatagctatgcaggatccagctaccagcccgaagttcagtag

SEQ ID NO: 25469 - DNA, 548 bp, Oryza sativa
  Clone ID: PAT_MRT4530_30352C.1
cccacgcgtccgcccacgcgtccgcaattatcggtttgtttgttcgtgagttttatcttctcatgccacaagtgagatgtctttagtgcatggtcgtggcagagtgcagcttgtgatctggtgtcttttctggataaatgtagcataagggtgtgaaaacatccttgacaatttctgaacctaaaggcaattgtttcccctgaaaaaacacccttgtttaaaagtggcgccaactgcaatccttgtacagagttatgctttggttattcattggcaatttggtaccaaagtttgtcatatagaaaaggtctcggttgtacaggacctagatgtttctcttaactcaaaaacgtaacggttcatgattgggaatttgtagttgggactcaaagttccactaccttttcttgctcttttctgtcttaagtttaattatttttggtctacagaacaattacaatcagtagtaaaattttcaggtggcattgaagacaaaggtgttccacccaaacattaatagcaacggaagcatatgccttgatatcttg

SEQ ID NO: 25470 - DNA, 1452 bp, Oryza sativa
  Clone ID: PAT_MRT4530_30353C.1
atgcgcagcagcagcagcaaggccacacccacaacctccccggcgttccccgtcctcggctttccccccagtgccaagagtccaagacccaacaagggggaggacggaggaggcgaggcagaggcatctcaccgaagggggaagggcgacgccatgtgggacctcaatgactcgccggcggccgaggccgcgccgccgccgctgtcgccgtccgccgacgactccggcgcctcctcgtcctcggccgccgccgtcgtcgagatacccgacgacgccgacgacgactcggccgctgtggttgtcgtcacgcgccagttcttccctccggccgtcccgggcggcggcggcgaccccgcccccgggaacgcgcgcgccgggtggctccgcctggccggagccgccccgccggtcgctgcagcggggccggcggcgtcggcggcggtgtccaagaagagccggcgcgggccgcggtcgcgcagctcgcagtaccgcggcgtcacgttctaccgccgcaccgggcgatgggaatcgcacatatgggattgtggcaagcaggtctatttgggcggatttgacactgctcatgcggcggctcgggcgtacgatcgggcggcgatcaagttccgcggcgtggaggccgacatcaatttcagcttggaggattacgaggatgacctgaagcagatgagcaacctgaccaaggaggagttcgtccacgtgctccggcggcagagcacggggttcccccggggaagctccaagtacaggggcgtgacgctccacaagtgcgggagatgggaggctcggatgggccaattcctcggcaagaagtacgtctacttggggctgttcgacaccgaggaggaagctgccagggcgtacgaccgcgctgccatcaagtgcaatggcaaggatgcggtgacgaacttcgatccaagcatttacgccggggagttcgagccgccggcagcggccacgggtgatgccgccgagcacaacctggacctctcgcttgggagctcggcgggctccaagaggggcaacgttgacggtggcggggacgacgagatcaccggcggcggtggcggtggcgcgggctccgaccagcgcgtccctatggcgttcgaccttgactggcaaacggcggcggcgaggagcaccaaagctaagttcttgagcaatggtgatccggggacagcgggaggcctgtcactgacgatcggcgcaggcatggccgggcactggcctccccagcagcagcaggggtggggcaacgccggcggcatgagctggccgctcccgccgcacccgccgccgccgccgaccaacgccgcggccgccgcaaccgctacagcagctgcagcatcatcacgattccctccctacattgcgacgcaagcctcaacctggctgcagaagaacgggttccattccctgacccggcccacctaa

SEQ ID NO: 25471 - DNA, 481 bp, Oryza sativa
  Clone ID: PAT_MRT4530_30354C.1
tgtatagaaagtttgcaaaaaacgaaccgtttagcactttgaaaagcgtgcgcgcggaaaacgagggagtggggttgggaaccctcaaaacgaactcagccttagttgatgaccatgcttaattgatatcttaacggaccattttttttaactagaagcagcactgattctgaaggatcagagcaattagttattgtgtatttgtatctacaatactctttttttttgtgtaaaagcatcaacaacgctcaagtatcaatcaactttatttactgaagtagtagcttgtgtgatattttgcctgtcgatagaaccaatctttcttgtcaatttgagtgtatgtcctgtcaactattcaatgttcttttggtattgatttgcatctcaattttttttatgtaacttcaaatttgtaggaggacattgtggcttgtttcaacataaatatggcacaagtgctgtgctcaaggggagatgggaa

SEQ ID NO: 25472 - DNA, 712 bp, Oryza sativa
  unsure (1)..(712): unsure at all n locations
  Clone ID: PAT_MRT4530_30355C.1
agaagagttcgtcacgtgctcgcggcaagagcacggggttccccngggaagctccaagtacaggggcgtgacgctccacaagtgcggangatggaggctcggaatgggccaattcctcggcaagaagtacgtctacttggggctgttcgacaccgaggaggaagctgccagggcgtacgaccgcgctgccatcaagtgcaatggcaaggatgcggtgacgaacttcgatccaagcatttacgccggggagttcgagccgccggcagcggccacgggtgatgccgccgagcacaacctggacctctcgcttgggagctcggcgggctccaagaggggcaacgttgacggtggcggggacgacgagatcaccggcggcggtggcggtggcgcgggctccgaccagcgcgtccctatggcgttcgaccttgactggcaaacggcggcggcgaggagcaccaaagctaagttcgaccagaactcgaaccatccccagatgcctccggtcctgcaggtcacccacctgccattcagtcccaggcatcatcaccaattcttgagcaatggtgatccggggacagcgggaggcctgtcactgacgatcggcgcaggcatggccgggcactggcctccccagcagcagcaggggtggggcaacgccggcggcatgagctggccgcacccgccgcacccgccgccgccgccgaccaacgcc

SEQ ID NO: 25473 - DNA, 172 bp, Oryza sativa
  Clone ID: PAT_MRT4530_30356C.1
gtgttaatactgttggtagctgtaaaagaaagaaaatctgccgtctcgtctgctccgctcttctcgctgctgaacaggtgagggaagggtgctgatctccatctcatctggcgaggggagtgggaggggaggtgatcctgttcccaagttggatccgcccatgaataatcaa

SEQ ID NO: 25474 - DNA, 679 bp, Oryza sativa
  Clone ID: PAT_MRT4530_30357C.1
atggagggaggccctcttcaagctaaaggtttgaaaggtcacgacatgcaagcaagcgcctcggagaccgggaggaaagtgggaagtaaaggcgacagagaggaggctacaccccaatgccacgtggccctcccccaaggggagtcaggcccgaggtggggtggcggccactccttcccaaagactaaggaggctgcccccaaatgccacgtggccctcccccaaggggagtcaggcccgaggtggggtggcggccactccttcccaaagactagtcggaggaggccgcccccccaatgccacgtggccctcccccaaggggagtcaggcccgaggcccgaggtggggtggcggccactccttcccaaagactagtcggagaaggccgcccccccaatgccacatggccctcccccaaggagagtcaggcccgaggcctttgaggcaagtcttcggaatgtccgatggcccccaaaagttccggcccagcctcactgagaagtatgacgacggcgtcaacccctccgagtccctccagatccgcacgacgatcatagaggcggcggggggtgatgatcaggtcatggcgagcttcttccccatggccctcaggggccaagcgcgggtggctagctttggtctcgtcggctggctacggtgcctggcccggctcaactaa

SEQ ID NO: 25475 - DNA, 414 bp, Oryza sativa
  Clone ID: PAT_MRT4530_30358C.1
gggtgtagctatatttatggcgtcatacttttcatcaaaaaatagtcggcatgtatttacattgtaagtcactaaattacatatgtaattttagtgtatttacaatgtaagtctcaaaattacatatgtaagtactaaaattacatatgtaaattcgaaaattacatactaattacatatgtaagtggggtgtaaataaggtgtaactactgtgtaagtggctgaaaaaaaaatcgactatagcatatagcgccatatttctagcaactccgtagattttctagtctcacaacatgatgtgtgtcctcaccgtgtcacatgtcgtagtaagaggcctcactgaccagagcgaacgaattatcagattgctcacagcaagcagagaccagaacgaacgaattatcacaatgtaca

SEQ ID NO: 25476 - DNA, 285 bp, Oryza sativa
  Clone ID: PAT_MRT4530_30359C.1
atggccggagacgacgaccaaccacggcggcggtggcggcgcagggccgggattccgggaggggacgctcctcgaaccggacagagagagagaccgtacagggcgtttattcggtcggtcgccgtggggtgggggcgccacggccacatgcccgacgatgggcgatggccacgctgcgttgatagctacgtcacggagctcgccacgacggcatcccatgatgattcacgaccgccatgcacatatgctttgccccagcgtatggcgacgaagacgcgattgcga

SEQ ID NO: 25477 - DNA, 507 bp, Oryza sativa
  Clone ID: PAT_MRT4530_3035C.1
atgggagtgaagaaaccagtcggcagcagacgtaaacagcttgcgttgaagatgatgatgcctattagctgtggcggcgaaggcaagccggtcggtgaagacgtagatgcccatcaacggcagcataataggccagtcgtgcaggcggaaacaccagtcggcggagacgaaggcgagccggcggcgaagacaccagtcggcggcggcaaaggcaagccggtcggtgaagacgtagacgcccaacaacggcggcataataggccagccgtgcaggcggagacaccaatcgacagcggcgacaaaggcaagccggtcggtgaagacgtagacgcccaacaacggcggcataataggccagccgtgcaggcgaagacaccagttggcggcggcaaaggcaagctggtcggtgaagacgtagacacccaacaacggcggcataataggctagtcgtgcaggcggagacaccggtcggcggcagcaaaggcaagccggtggtgatgttctga

SEQ ID NO: 25478 - DNA, 543 bp, Oryza sativa
  Clone ID: PAT_MRT4530_30360C.1
gcattagcttgctgggttttccgccacgttgcaagcaatcatttctttcgttgagaacagtggtgaccatatcaaatttgtaagggctgccaaacatcagatagttttccttgtcaagggtccaatatacttagtttgtataagttgcactgaagagtcatatgaaggattgaggggacaactagagctcatgtatggtcagatgctgctgattttgaccaagtctgtcaacagatgctttgagaagaaccctaaatttgatatggcaccattgctaggtggcacagatgcagttttcctatcacttatacatgcattcagctggaatcctgctacatttcttcatgcgtacacatgccttcccctcgcccaatccacaaggcaggcggctagtgcagttttacaagacattgctgattcaggagttttgtttgcactgttgatgtgtgagcacaaggttattagtctagtgggagcacaaaaggcaactttgcatcctgatgatatttttctactttcaaatttcatattgtcctctgaatc

SEQ ID NO: 25479 - DNA, 1882 bp, Oryza sativa
  unsure (1)..(1882): unsure at all n locations
  Clone ID: PAT_MRT4530_30361C.1
ttttttnnnttttttttctagctccttgaagcctggaaatcaaaagcctcattttgaattaatttgtttccccccacatagtgcatatacaattgagtgatctcacgcttgtgcatgcttatatatactgtactctatgtacatcaatttgccaattaggagactaatacgtacgtatagcagaacaaatcaagcaattattaccatctaattgattatctaaacaaaatttagatcaattttatgaacttgcttcacttgttcggcgccgccgcgccgccgccgcgccccatgtaggacgtgatcgccgccgccaaaaccgactggaagctcgggtccgacgtgatcgccttcgcgatcgtgtccgtcacggccgccggcgcgacgccgccgccgccgatggctctctgcaggtacggcgacgtcgtctggccgccgaacagctgctccggcgccggcctcgccgccgccgccgccatgcccatcatgccgaaatgatggccgaacggcgacggcgcaacgcccttggcgtagtatggctgcgccgccgccgcgccgccgtacgccaggtacccgctgctccacgccgccggcagcgccctgctggactcgtaccccgcggcggcggcggcgtagggcgacgccgacgacgggtgcaggagcgagtgcggcgcggtgaggtcgagcgtgacggtggggcaggacgtggcggtggagatggtggtcgggccgagcagcccgacgccgccgccgccgccgacggccgaggcgaacggcaggtggtggtgaacgccgccgctgccgtgcatcgtggagttggtcgagccagacgtcagcatcgccgccgcggccgacgttgtggacgccatcgccgccgccgccggcggcagcgggtggctgtgcgtgccctcgtacgtcgtgatcaggatcgacatgtcgtccgcgcatctctgcacctgcttgcgtacagggcagttgggtgcaacggtgcaacggtaataggcgcgcgggcaagggttcccctttgagattttctgcccgtatttccgccactgacacccatcgttcatcgtgggggtgtcgcacttgactctgacggaaaccctagccttcttggcctgctgctgctgcagcacctcgtcgtcggcgccatcgccgccgccgctcgagctcctggacgctttgttcggctgggtaggctcgccggcgccggcgccggcggcgtccccgctgctgtcggagctgaggttcagcacgggcatcggcggcaacgcgcggcggctcgcctgcttgtcgtcgtcgtcgtcggaggcaacgccgccgcgagcgcagctcagcccgagggacagccgcccgtcgtcgccgccgccgccggacgacggcgtcctctcgtggcccttccggcgcgtcgcggcggcgttgggcctcgtgcagaggctcagggagacgaggtcgtcgggctcgtcgtcgtcgtcgtctccggagagctccgccgccgtttgctccttgaccttgacgacgtcgaggaagtgcgtgtgcagcgacttgtagtcgctgacgatgcgtgtgagcatcgtcttgagccgctcgttctcctccctcacctcgcccatctccgccttcgctgcctccatcttctcctccttcttgatgatggttgaatctctctgcgtcgatggtgcaaaactctcaaagactattggaggcgcgcctccaatcgcggcgacgtcgactttcttctcgtccctcaccggcgggctctcgacgacgacgtccattgcggcgttcgatcgatcgtcgttaccgatctcgaaatattaaaccaggcttagcttaatcacgtaggctctgaacaagaagggtatcaagcaaaacgatgcgt

SEQ ID NO: 25480 - DNA, 434 bp, Oryza sativa
  Clone ID: PAT_MRT4530_30362C.1
caaacagcatttccggaccgagccagcgccgtgttgccttgcaccaatcccgcgcacgctcgcgccgagctcgtgccgccccgcgcgcgccacacgcccgcacacgctcgcacgaggacgaacgacgaacgaatgccgccgtgacacctccagcttcccgcctccgtatctccttcgttccttaaatcgcaaatcctctgaaattgaaggtaaaaacggattctctatgccgagtactccctttcccctctcttcccccatctaatccgacgccggagtgccgccggcgccgcctcccggtgtcgccgctctgttcggccacagctccaggccgccccaggccgagctgccgccaccaccgcgctccccttgctctactgatgctcaccatagccatcaccctcaccgaagttcgctggaaccaccgcgaccat

SEQ ID NO: 25481 - DNA, 423 bp, Oryza sativa
  Clone ID: PAT_MRT4530_30363C.1
atgcggaggtggagctcgcctgggcggtcgacggcggagacggggctctcccgggcggcaggcggccagtggcggagcgggcggcggcagcagctgtggcggagctcgctcgggcgggtacggcggcggcgtccccatggcggcgttgaggagacagagctcacccgggcagccatggcgcgcggcatccccacggaaaccacggcggcgttgaggagacggagctcgcccaggcagccacggcgcggcgtccccatggcagtgatctacaagggcggcacgatgtgcacccactacaccgccgtcgtctggaagaacaccaccggcggcggcggcggtcgcgtcgtctgcacctccggcgacaccatcatggtctgcagctactggccgcccggcaactacgtcggcgtcaagctctactaa

SEQ ID NO: 25482 - DNA, 1206 bp, Oryza sativa
  Clone ID: PAT_MRT4530_30364C.1
atgcggcaacaagaaggtggggatcaccggcatgtggcagctgatgatgaactcctcgcgcggctcagtagccagagggacaatgacaacgggagcacacctcttcacttggccgcatcaattaacgggttaccgtcggcactatatattcccatatgttctccgcgagttttggcgccgttgcggcggccaaagccggtggagctgctgctgaaagccaacgaattcgcggcgtaccagccggacaaccaagggatgtacccaatacacgccgccgcgtcggctggcagcctggagaccgtgaagatcctgcttgagaaacacccagactgcgccactctgcgagatgcgagaggaagaactttcctccacgctgctgttgagaagaagaggtttggagtggttaagtatgtatgccactggaagaggaaggaaagcatgatgcctctaaaatgttattatgcatgggatctaagagtccacatacgaacattgctattgaaattgggagctccatatggtgaaagtcagagccacatcttcaacaaaaaacgacacgccatcatcgtcgaccccaaatttaaaggaggcgaggaaaagatgttggagaatgtaacagctgcaacgcaagtcttggcccttttctccgtcctcatcacaaccgtgacatttgcgtcggttttcacgttgcccggaggctaccggtctgccggcgatggtggcagtgccgccggcacgccgttgcttgctgggcgtgggtgctacgctttcgatgcgtttatcctctctgacgctctagcattcgtttgctatttcatggctacgtccgtcctgctctatgccggggtgcctgcttataaactcgaggtccgcctccgccacattaattttgcatatagcctgatgatgaattctggaagaagcttggcggccgctgtagctttgggactctacgtggtgctgcttccaccggttggccgcaccattgcgatcgcgatcgctgccgcgatggtcatgcttgcacttctgctcagcaaggcatcagaaggcatcgagtctctcttcggcattgctattgcaagaaaccggaagctgtcaattcgagactctgtggtaggcttcactatatatgtgggggaacgctattggtccttcatcctaatcttcggcctcccagcaattcgtaagtgggcaagggcagggtaa

SEQ ID NO: 25483 - DNA, 350 bp, Oryza sativa
  Clone ID: PAT_MRT4530_30365C.1
cgcctctcaactctcactctcgcctctcttccccaacgctccagcgccgccgccgccccatcagccattgccgctgacgggctgctgccggcgccgccacgctgctctccacctccgacgctggctcaacagcgtcaccaccaacgcccctcacgtgctccagtgtcgtcgctgctgccgggctgcctcgtcaaccgtcgccgccgccgagctgcgccggcgccgcgcactgggctgcgcctcgccgcctcctactgtgacgtcggcacaacactgtcgtcgccgatctgttttcctgttcgttcccttgttgagatcccatggattatcgaactggaagctcaagtgct

SEQ ID NO: 25484 - DNA, 663 bp, Oryza sativa
  Clone ID: PAT_MRT4530_30366C.1
atggatccgccggctcgcagattgatggattctcgggcggcgcagttggcggcgccacttcctgatccatactcggcagaaacatttgaagacctactccgagaattgggagtcgaccctagtatccacaccatagtccgtagcgccgggagatggatggatccggcagcggcagcagcacgagttccagtgagattccaccgcacgctccaacgcctaggaatcgaccccaatagcgatgcccggagcatccgcgacatgctacaagagttctatcgagtggtgtaccatggagaggtgtactgggctggccgagtcatcaggcctcgtccttcgtccatgccaacgcccgtgataggacgacgtcgccgcgccgccgacggggatgccccgatgcagccgccgagcaagtacgctcgagtacacgccgtgtcgcgcgatgtcctcctgggcctcgcgctgacgaaggcgtgcgacgcgaggcaggaggagtgcgccgtgtgcctcagcgacttcgaggagaaagacaggctgaggacgatgccgtgtaaccactccttccacgagatctgcctcttccgttggctcagcgatagctgcctctgccctctctgccgctacgcgctgcccaagcagcagcaggtccgtttgtaaagctgctga

SEQ ID NO: 25485 - DNA, 156 bp, Oryza sativa
  Clone ID: PAT_MRT4530_30367C.1
atggtgggatggatggacaccgtgtttatcttcggcgggagggaggaggtcgctctctcgctggacggtgggccccacgacctcgggtctctcgctcccgcttcagctccacctctcctcgagttggagctcggccaaacagtttcagctctttga

SEQ ID NO: 25486 - DNA, 249 bp, Oryza sativa
  Clone ID: PAT_MRT4530_30368C.1
atgaggtgggtaggaagtgtagggcggcaccggaggtcagaaacaagacaatcatcggtcaagaccagtgaagatacaagcggcatcagcggatctcgcaaagacacactgaaccagatggggaggagcctgctcatcggcgagcctcaaggaggagcttgcatcagcgacggtactcctgaagagaatttctccctgtcactcctttctttctcaaggttgaggctatggggagctcgatgcaactag

SEQ ID NO: 25487 - DNA, 163 bp, Oryza sativa
  Clone ID: PAT_MRT4530_30369C.1
atgacatcaagcagacaaaagataaggattatactggttcaggcccctgatcagattacaaagagagtagtcgagacaaataataccgacgagatcgtagtcgagggtttcgacgagatctcccggcaaattggcttcgtgtactccggctttgcaaactatg

SEQ ID NO: 25488 - DNA, 567 bp, Oryza sativa
  Clone ID: PAT_MRT4530_3036C.1
atgtccgccataaaaaaactctatttttttgaggcaggcctcttaattgtcagccagcgaatggttacaaagagagtaactgaaacaggcgataccggcaagatcatagttgagggatttgacgagatctcccggcgagttggctccgtggactccggcttcgtaaactttggtgggggcagcggcggcggcgccagctctcagcgtcaacgacgcagggaaaggggcggcggggagtggatccggcacctcctcctccttccctctggcgacgacggcatagaggagggatggcggcttgcgcatgcggcagcggtgctcgagagaggcaaatccagcatcgacggaccttgggaggtggatccgccgccgccaggcctcgggagcggcgcggggatgcgggcggcgggggcggtggctctcagcgtcaactctcggctcagcggcacgggggagagggcgggagcggatccggcacctcctcccccctccccaccggcagcggcagcaaagaggagggatggcggcattaaggtggctagcgcaggcggcggtgtatatttgtga

SEQ ID NO: 25489 - DNA, 3903 bp, Oryza sativa
  Clone ID: PAT_MRT4530_30370C.1
tcctaacccggcaccgtccgcatagcgctttatgtgtgcccgccctctccttccgctcccccgccctctcccctccccgctccccccctccgcggggggcgtcggcttctccgcgccggaccgtcccccgctcgccgccgccacccccgcgacggcgccgagctgtcatacggctcactatcgggcagctggctcgcctgctggctccgtccggcattcccgggtcgccccatgaccccggtggttcattgctctgttggcaatatcagcctgttccacatcggcagtttcaggccaagccatgaaatccaaataaggaggttccgcagcacagagaggtattcaagagtaccttcacgtaggctgctgcaaccgcaacgagcattcaacttgatcagtatttacaagagaagcagctggtcctctgcccgcaggccaagaactctgtcagcagcaactgttgggactgatgttactgtagaggatccgaatccaccaccttccggagaaacttctgaagaaagctctgaggatacagcacctgacactgctgaagcaagtgagcaagctgaggcaagcacttcttccattcccaaagcaggacgaaacataagaaagagtgagatgccaccactgaatgatgaggatctagttcctggtgcatcttttactgggaaggttaggtctatcaaaccatttggtgtatttgttgatattggagcattcactgaaggccttgttcatatctctcgagtaagtgatggatttgtaaaagatatatcttccctcttcactgtcgggcaagaggtgtcagtgagattagtggaagcaaataaagagacagggcgcatctcattgacaatgcgaacaggtggtgattatgtcaagcctaaaacagaaacacctaaggctgcaagtggcgggaggaataccactgcaaccacgtccagaggctcgccaaggcaaacgagggaaagagatgaagccaagagcatgggcgaaacaaactatgtgcaaggacaatttctggatggcgttgtgaaaaattcaacaagagcagggtcatttgtgaccctacctgatggaagcgaaggattccttcccagagaagaggaggcagtggcattgttcacccttatcggacattctgcactggaagttggtcaacaggtaagggtgaaagtattgaacgtagtacgaggccaggtcacgttgacaatgaaggagggagaagatgatgaagaggatctggcttcattaaacacacagctgaagcagggttggtccagagggaccaatgcatttgagctagctttccgtaggaataaggaaatctctgcatttttggatcagagggaaaagataatagttccagatgtacaagaagctgctgttgcatcagtaggtactgaacttgatgcagaagtaggaattgagcaaagtccaggcaaggaacctgagacaggcaatgctgaatcagttgcaatcgatagttctataacggaggtcaaggagactgatagtatagctgcagtggagaaggatagcgaaattagcaagactgaatcagttgagactgctagttcagttgtaatttctgaagatgatagcacagttgatggcaaactcgttgaaccaactgcttcagtttctgcaactgaaactgagattaaagaagatagctctgagggatctgtcaccactgagcctacagaagctgcttcaacagaatttgtcaccgcagtcgttgaggaaagcgctccgactgctagttcagttgaaacttctgaagatgatagcacagttgatgacaaactcgttgagcctactgcttcagtttctgcaactgaagctgagagcaaagaagatagctctgagggatctgttgcttcaacagaatctgtcaccgcagtcgttgaggaaagcgctcctgtgtcatcagtagcaattgaagttcctgctcctgaagcatcagaggcctccgctcaggagataattgaggattctactactgtggaaggtgccgccgatgatcaaactgtagaatctgatagtccacctccagaaggtgttgagctgtcctcgaatggggctccagacagctctattgctgaggataagcctgatgaaccagaagaatcgttgatagtagaagaggttccagtaactgcaagtagtgagtctgaggataaagaacctgctgcggtacctgaagaagtagcagcctcaagtgagaaaactgcagatgttgctgttgcaggagctgaagcaagcacggccacagcaactatttctcctgctcttgtcaagcaattgcgtgaagcaactggagcaggcatgatggactgtaagaaggctcttgcagaatcagggggtgacattgagaaagcacaagaattcctccgcaaaaaaggtttggcggctgctgacaagagggctggcagggccactgcagagggaagaattggttcttacatacatgacagcagaatcggtgttcttattgaagtgaattgcgagactgactttgtatcccgaggtgacatcttcaaagagttggtagacgatctagccatgcaagtcgccgcttgccctcaagtacagtacatttctcttgatgacgtccctgaggaggttatgaagaaggagacagagctggagatgcagagggaggacctcttgtcaaagccagagcagatccggtctaagattgtagagggccgtgtaaagaagaggcttggagaatatgcattgctggagcaacccttcatcaagaatgacaaggtcacaatcagtgaatgggtgaagcaaactattgccacaattggagagaacatgaaggtcaacagatttgtccggtacaatctcggtgaagggttggagaagagaagccaggattttgctgctgaagttgccgcccagacagccgcgaaggcaccgccagctgctcctccaaaggatgataagcctgaggaaacagcagaaactgaagagaagaaaccagctgtggcaatttcagctgcattggtaaagcaactccgagacgaaactggtgctggtatgatggactgcaagaaagcactagctgagacaggcggcgacattcagcaggctcaggagttcctcaggaagaagggcctgtcatctgcagacaagaagtcctctcgcctaaccgccgaaggcctaattggcgcctacatccatgacaatcggattggttgcatgattgagatcaattccgagaccgacttcgtggctcgcaacgagaagttcaaggagctggtgaacgacctcgcgatgcaggtggtggcatgtccacaggttgagtatgtctccatagaggacatcccagagagtgttgtcatcaaggagaaagagattgagatgcagagagaggaccttcagtccaaacctgagaacatcagggagaagatcgtcgaaggccggatatcgaagaggctcggcgtgctggccctcctggagcagcctttcatcaaggatgacagcaagacggtgaaggatcttgtgaaggagacgatcgccacccttggggagaacatcaaggtacggaggttcacccggtacacccttggtgagaactgattgaggaggtgatctctagtctcaatcctgacatcaggagttgggcatattttgattcatggaagttcatagctgttggtagtatgataagtttccatctgtaattctgtatcacctgttatattgctgcccctttttttcagctgctgttattactgttgctggttacagaacacatttttgagcactcctttgtagatgacaagagagatcaatattgtcaatataaacattacggcaaatcaaaactgtatctggttgtgtttgacaaaaaaaaaaaaaaaaaacctgcgggggggg

SEQ ID NO: 25490 - DNA, 1360 bp, Oryza sativa
  Clone ID: PAT_MRT4530_30371C.1
atgccgccgaagcggggcgccgcgcccgcggcggcttcgggcccttgggagatgtggcgcggcaaccacgcccagggcagtcgccacgattcttccccagccgagcgcggcgccctcgccgccgtgctcttccggttcggttccaagccccaacaatggcgccgggcgctccgccacctgttttccgcggcccgcccccgccttcgcagcagtgctatttatcatctcctaaaagggcctcaaccaaacgggttgtcgtcctccccggttcaacgcgggcgactctggtctcaggtgcattcgttgctgagttgagagtgtgcacttggttagtcggagaacttgtggaaatgctagcgaacatcacgagagacatgaaccgctaagtggattggaccctctcttggaccagtaaggaagatctgaaaatcatctacctacgtatatttgtacagtgttgcagaaacttacatgcggtcagctagtaatgccgcatctaatgttattatgcctttacaaagtcctactaatggggcatactaccccaatagtacagcatgccagggatattcctcctttggaagtattccgtattctgctccatttgagactttcggagtgcccatcataccttgtggatcggttgcattacatgaacaacaggttatgctgggtacagacttgtttcaaagtgcaggcacaaaaatgaaaggtggtcaacttactatcctcggaaatggaccaaattcatcggtttcttgttctgttcatgtccaacagagaaactctggtggaaattccagtcagggcttgaaagcaaatgtgcacatgggtgctcctcctccctggttagaagctagcgagcgtgatcaggagaatgagtcacttagtggttatgctcgtccatcctctcggaaaggaaaatctggaaagcttaacccaaagcgtgtaggagctgcatgggcagagaggagaagagcagaaatggagatggaaaaacgaggtgaacttgttccagaaacatctgattctagttggctccctaactttggtggtgtctggcaatctggtacaagaaaggaatcaaggaaagagtttgagaaaaaccataagcctcacgaagagaagagcaacaagttgtcccttgagatgaaaccatatataagcaaacggatgcgcgtaggttccaataaaggtgaacagtcagacattgatgtagagcagtgaatccaatggaaggatgcactcagaagtacagtatagtaggagtaacagccacagcagttggttgttgacaaggcaaaggtagtactagtaattcactggtctatcttttgcctcgtgccgaattcctgcagcc

SEQ ID NO: 25491 - DNA, 435 bp, Oryza sativa
  Clone ID: PAT_MRT4530_30372C.1
catgacgtcatcgtcggcactgcacgggaccacgagatcaccggtgctacagggctcggccgggctatccaagggcaccatcgtggagaggacgacgaggtgaactcaccggtgctcagaacaacgacggacgacgacgaacggcggccggcggtgagctccaacggcggcgcggctctgggcggcgtcgacggcgggattccggcgggtctcgacggcaacggaggagcggacggggtgcggctccactcggcgaacccgatggcgacaatagtgagcggcggcggcgaccacaacggtggcgtggggcggctaggcttgcggcgaccactaggacggacgcggcggctgtgctatggaccacggcggaggacgtggcttcagggcaatgttggcgtgccaggtaggggtagcgtcaagttcttcgccgactag

SEQ ID NO: 25492 - DNA, 1978 bp, Oryza sativa
  Clone ID: PAT_MRT4530_30373C.1
atggcggcggccgcggccgccgtgtccagggcgctgcagccgagggcggtcccggtggggttcccgcagccgcagcaacttagggcgcacctgccggtgggggtgccgcagcagctgcatccccggggcctgccggtgatgcggtcgcaccacgtggtgcatgtgccgctgccgcggccggcggtggccgtggcggtgcccgtgccacaggttcggccggcgcagccgcagccagtgccgcggccaccggtcgccgttccattgaaaccagagtcaccaaagccaccacgggcacggctttatgaagggaaagatggcaccccgacaaagaagaagtgctgcaactgcaagcactccaaatgtttgaagtttttaatgcgtttctgttcgatttccactgtagactcaaaacgcatacctctgttgtctctggtacctctttcactatgcttgtattgtgaatgctttgcatcgggtgtttactgtgatggatgcaactgttccaactgttttaataatgttaagaacgagactgctaggcgtgaagctattgatgctacattggagcgcaaccctgatgcattcaggcctaagattgggagtagcccgcatgctaaccggaataatatggaggcggctggtgatcttccattagttgggaagcataataaagggtgccactgcaagaagtcaggttgtctcaagaagtactgtgagtgcttccaagctaacatactttgctctgaaaattgcaagtgtatggattgcaagaatttcgaagggagtgaagaaagaaaagctcttttccaaggggatcataaaaattccattcacatgcagcaagcagcaaatgcagcagtaaatggtgcttttttttttttttttttttcaagaaagacttttttttttctattaatagaacacttgatatcactctatcctgtacatgaaatggacattgcttcttgagtggacaatggcgaaaacaagcttctcacattttgcacatacagttaaatattcattggtttctccaggcctgaagaaagcgaatcacgacggcaagagttaaggctgcttgtgctccattttcgcctcaaattactgccccaagacgcgagatacggaactcttgatgttgttcagaaacttttccctgtctggcttgaatagtaggttttgatatatgaacaaccatgcaaccaatatgccaattaattcaaagagtagagggagaacaggaagcttgtcgatgacctctacaagatttatagaagcccataatgcggcaatccctgcaaatcctataccagctagagcaaagaggtcttcaggactgctgaacgaactctggacatacttcacaacgctcccggatgacggttctgaactgtcctgcgcagcctttgcagcgacgacattgcgactcctcatcctccctgaaacaaatctggtgcttggcactgcaggcagcatggggagattcccggtgatgctctcgctgccgccgcgcggaacgagagccgcaggccgagcaacggcgagagcagaggccatcgcggttagcttcccccgagaatacggtggaattgcggaggtcgcgagcggtggatattgggaagaactactgccggacgcgtggggggcgagcgccgcaggccgagcaacggcgagagcagaggccatcgcggttagcttcccccgagaatacggtggaattgcggaggtcgcgagcggtggatattgggaagaactactgcttggccttcgtctgctgcagcggatgcgagtggaaggctcctcgtccacgaaagcaccatcggttggcagatttgcagattgccccttgccttctgcagatattctgattaatttccattctacgagtattactgtaccgcctgcctgtccgggagaccggggaagttcacgctgggatacagcttcagatttcgctaggtttatagtgactgactag

SEQ ID NO: 25493 - DNA, 1321 bp, Oryza sativa
  Clone ID: PAT_MRT4530_30374C.1
cgtccgaattcccggtcgccccgcgtccggtggtgcctagccccgcggccgccgccgccgtggtgctgcccggggcttgacggcgtcgctcctcagttcctgcctccgccgactgtttcttcttctttgagagcaagctggtaaagcaaagtagtatacgatctccagtccaaacatccattcgtgtgagcagtcaaacagttaatccttaagtttatggtttctgtatacgaagaagcacgggaaaggtggacttggaaaaatcaagtaacagaagaagggccttatggctttaaaattctctcccaaataagacgccaggaccatgactgctgtaccttctctgctatggcttcaactctcgaggccaatgtaagagttcagcatggaaggaacgatcaattttccatacctcacctgcaatttatagatgctcaatcaaaaatcagtgcaccaaataccaatgagacaaaggtactgaggcttttgaaaagtctaaaagagagagacggtggggtttacttggatgaagactatgatagtgaggggaatctccgagccttagatgctaaagtttgcagggtatggaagttcaatctctaccatgtgaaggacattattcatcttcgaagtgctcttcatcggctgcgcaggcaagggcctttactggctgttatccgcatcagccgtaattatgatgagtgccgcaagtcaggccatgtctacaaatatgatcctgcccgaatctgcacatatgatgatgggaaacccaagacgcacgcgttgtgtgttgtttcgtttgtaactgagaagggtacaccatgccttgagtgtcaggactctcacggcacagcttggggtattggcggttacttaactgtggaaatcaggtcactaaaagagctatacagtgttagagttacgtagctggtggctgtcaagtcaatgcaactcaagactctacgtatgcactcattttctatcattttaatacttcctgcttacagtacgtggccaatgcaaagatttcatggctcagaagaaagggatctttggaattaatactttgtatttaagtgataatggcctgttgcttctcttgaccttttgtcccttttttggatgtgagagttatggaagttagatttggggaacagaagattttgtgattctatcaaagcgagatcatttctttaatttgaatatccacatgcctgagggtatggttgtagagtgcctgaatgctgatatacgtggaattttgctcatttgatcatcaaccagcatgcatcttgttctctaaaaaaaaaaaaaaaaaaaa

SEQ ID NO: 25494 - DNA, 231 bp, Oryza sativa
  Clone ID: PAT_MRT4530_30375C.1
ggctcttaggtttttccatttggcttgtcctacggtcaaggtcggctctgataccaacttgtcacgcccaaaaattcccgaatagaatttcaagcagaatgtgcattaaaatccccgtccaggaccggccggggtacacaaacgacaatgttgacattcagatccacgtcttacaaacatcataaaagtcttacataaatgcagcggaagaaaaaaaaagacaacaggagc

SEQ ID NO: 25495 - DNA, 483 bp, Oryza sativa
  Clone ID: PAT_MRT4530_30376C.1
ccggccggatgctattaaaatcaaggatggtgtaaatattcagtgcaagtattctctgttgaactcaaatattggtgttacaatggatatttgttattccatttctgcgaaaataagcatgccagagaaatggagcgcctgacggtcttacacgagcagttggggttcacataaagattcattgtcagtgcagctaaactttgcatgatatatcagatgcggctatgaaatcgtgagaagagataatctgtggtatctgatcaggttgctatcatggtgcagcaggcaagtagcacagtggctgattatgtgttgccaagctgaagattctgttcagtgaagtctaacagtggagctgtggacgcatcttcatatctgtggctccctctggtgttgtatcgggcgattacaagtgcatactatcgaggggcagttggcgcacttgtcgtgtacgacgtgacccgccatgtcacctttgagaat

SEQ ID NO: 25496 - DNA, 1202 bp, Oryza sativa
  Clone ID: PAT_MRT4530_30377C.1
atggggcaactgcagcagcagcaccaggagcagccgctgaggaaggatctgtacccgcaaaccgagccctacgatttcgggttcctcaaggtctccggcgtccacaccatctactacgagcagtccgggaacccccagggccatcctgttgtgttcctccatggcggccctggagctggcacgtcgcccgggaatcggaggttctttgatccggagttcttcaggatcgttttgttcgatcaggtgtttggtggttcatggggaagcaccttggctctcgcgtacagcgagagtcaccctgataaggtcactggcattgttctaagaggcattttcttgcttaggaaaaaggaacttgattggttctatgagggtggtgcagcagctattttcccagatgcatgggaaccatttagagattttattcctgaggatgaaaggaattgtttcatagctgcttatagcaaaaggctaacttcctctgatgctgatgtccaggctgaagctgctaagagatggacaatgtgggagatgatgactgcacatcttatccaaaatcatgagaacatcaagcgaggggaagatgataagttctcattggcattcgcaaggattgaaaaccattattttgtgaataagggatttattttttaccctcagactcgcatctgttagacaatgttgacaagattcgacacattaaagcttttattgtacagggccggtatgatgtttgctgtcctatgatgtctgcctgggatcttcataaagcatggcctgaagcagaatttaagatggttccagatgcaggacactccgctaacgaggttggtgttgctgccgaactggtatccgccaacgagaagctcaaaagcatgtttacaaaatgaagcaggtgctctgatttcaaagggtttcatcgcatagctgatgcagaaatccagaagcgttttctctggtttcattagtgttgccagaaatacagaataaacagctcgtagtttgaacagccttgtgggcactgtggtgtgtcaaacgatgtcattataatctcaatcatagtttctggccttgttttgaaaaaggtaataagcgtttctcgtttttaaactgaccaaaaaaatgatatctgccattgtgcaagaaacaagaagaaaaggcgactcgatgcccaaaaaaaaaaaaaaaaaaaaccccccccc

SEQ ID NO: 25497 - DNA, 1068 bp, Oryza sativa
  unsure (1)..(1068): unsure at all n locations
  Clone ID: PAT_MRT4530_30378C.1
gcagggggacgacagggtttgggctgccacctccgttgccgcgccaccctcgccgccgcaaccaacgcgccgatggggcaactgcagcagcagcaccaggagcagccgctgaggaaggatctgtacccgcaaaccgagccctacgatttcgggttcctcaaggtctccggcgtccacaccatctactacgagcagtccgggaacccccagggccatcctgttgtgttcctccatggcggccctggagctggcacgtcgcccgggaatcggaggttctttgatccggagttcttcaggatcgttttgttcgatcagagaggtgcaggcagaagcactcctcacgcgtgtttggaagagaacactacctgggactcggtcgtccgcatcgagaagcttagagaacatcttggcatcccagagtggcaggtgtttggtggttcatggggaagcaccttggctctcgcgtacagcgagagtcaccctgataaggtcactggcattgttctaagaggcattttcttgcttaggaaaaaggaacttgattggttctatgagggtggtgcagcagctattttcccagatgcatgggaaccatttagagattttattcctgaggatgaaaggaattgtttcatagctgcttatagcaaaaggctaacttnctctgatgctgatgtccaggctgaagctgctaagagatggacaatgtgggagatgatgactgcacatcttatccaaaatcatgagaacatnaagcgaggggaagatgataagttctcattggcattcgcaaggattgaaaaccattattttgtgaataagggatttttacccttagactcgnatctgttagacaatgttgacaagattcgacacattaaagcttttattgtacagggccggtatgatgtttgctgtnctatgatgtctgcctggggatcttataaagnatggcctgaagcagaatnnaagatggtnncagatgcaggacactncgctaacgaggnngggtgtntgctggcgaactggtatncgnnaacgagaagnnaaaagnatgtnnacaaaatg

SEQ ID NO: 25498 - DNA, 376 bp, Oryza sativa
  unsure (1)..(376): unsure at all n locations
  Clone ID: PAT_MRT4530_30379C.1
tgntttccaaataaatgggagatatttttatttattattattcattggggataaaaaaaacattaagcatgactgtctccaacaagaaggggcaggcatgcatgcatgcatgcagcttgttgtacaaactatcaacaggttcacttgaaatgaaccatcttcattattttagctttgtctcaactctccatcttcagaaattcacaatgctcattgaatggtgtttcaatccaaatccaagcttaacgggaacacgcaaggcgcggcgcactttggccggaggtctcggattgcgtctccctttagcccctttaaccgcgcccccgccttttttacacacattcaagcgaaccccccctctgcggtgcccacaggc

SEQ ID NO: 25499 - DNA, 994 bp, Oryza sativa
  Clone ID: PAT_MRT4530_3037C.1
tctcggcgggtacaccatcgctttgtttcatattccttgtcgagccccatcaaccgttctcgagtaatcgagtaggcgtagagtctgcgacaaagccttcagaacatttgccgtactcgcttagtcgatcccggtatagaatcgtagagacagggagtcttcaacaatgttgaaatagccccccgagcgaacgctcaaaatcgcaaaagtagtgggagaatcgctacaccgctggtcaaagacctattgtagtcataactcgaccaattttctcaaatagtccagccgcagccggcgctatacatgagataagtcgtcagtcttcgttggtaggttgggtgtgacaactcagcatttttcaagaacgttctcaataaagcggtgtactcgaccgcatcctacaagagtgctcaattgttcctgaaaaatattttctagaagacaagatatatagtagagaatatcgagtatgtacttaaaagactgcgcgaatggatataacgagcagattaaatattagacattgtgtaaaccgtaaataagcatgatttgtataaatattagaccgtagtcggcctaacaccggaaacagcgccattgtcgacattaatttggtatcacggctacggtatttggatggtatggggatcgttggtaccagggtatatgcgagattgaggtaaaagagatggagacagggatttttatacaggttcgagccccttatctgacagggctgacatcatcaagtaggggaagcagcgccgacaagcaggccccatggatcagcgacacaaggggaggggagaggtgccggcaagcgggccccaaccggcagcggctcaaggggcccggtccaacgtggaccgggaccacgcgggtggtccacctccggtccacaggaccgacggcccaaatcggcctccccgccaatcggacggcgcggggagcagccgtcgggcttggccgatcacagcctgaattttcgttttag

SEQ ID NO: 25500 - DNA, 311 bp, Oryza sativa
  unsure (1)..(311): unsure at all n locations
  Clone ID: PAT_MRT4530_30380C.1
gtacacatcggatattattttttcttctcgaagagtattcctattcacacactataaacttgtagaccacgtaggtcctaccccacgttatggganccacaaacctataacctattatgccccgctccggttaactaccccacttacccctacactcgacccactctgccttatttacacagtcatgtactggtgtgatttagctggtctgtgcctggcgacttttgttgtgcctggcaacttttgttgtgtacatgaaatacagagactaattaaccactcggttctatgaaaaaaaaaaaaaaaaaaaa

SEQ ID NO: 25501 - DNA, 440 bp, Oryza sativa
  Clone ID: PAT_MRT4530_30381C.1
atcgtaaacctaggcttgctcaccattgagggcttccttaattaacatggcgtgttgtccacaagacttatctcactttctatatctatgttatatggaggtgatggattgtgctatggtttactagatagctgatctatcaaaatcaatcctagcattccccaaattacctatcacaggaggtgtgcatggatcggtacaacatatatatatacagtaggttagttttgttctgttgtgtcaacacagagtcatgaggaatgttagatgtgttcattctgtgatgctgtctataattctatatgtattaaatttatatgacacgtgagtgcatatatgcaatgccattacgaactgctactatagtctccctgtgtcttcctttcgcatacatggataacacatatggcacaatttaaggcaattgccgttttacaggc

SEQ ID NO: 25502 - DNA, 484 bp, Oryza sativa
  Clone ID: PAT_MRT4530_30382C.1
tatgctttcgttgtgagcaaggacacggaggagcttccgactactttatcgcccgttcgcatcgatacagtgagcgcggctcctacatgatcacgaattgacttgaaaaacatactgtggtacaggctctaatgaagaaaaacatacacacaccgaccagcaaacagagttaatgatcctgctccaaatgcatgtgacgaaaagagatctaacatacactactcataatagaacgctagctagacacagggcaaggtaactggacatatgaagatatgacagacgcgcgtgatataggcatccatattgcatgcaacgccgtgctctacataaagcacattacccgcgcagcagcagtaacgccggctgtaacagccacgcctctcatggcttcttggcctgcttgacggcggccgcggtggagccaggcatgccttctgcgaagccaggtgagcctgcgtcgaggccgcctaacatgggcatg

SEQ ID NO: 25503 - DNA, 254 bp, Oryza sativa
  Clone ID: PAT_MRT4530_30383C.1
catgtgcctacaccagcagaaaagtcatttttgaggcggcagttcttacagcagcggtggtgatcaggtcgacagcatacactttctgggctgcatagagaggccatgacttgaatgtcctcaagcccttcctgttgtctgttgtgatggacgctgattctatctaaaatgatccagatattctcaccatggggcaagatctctgtaatgatatatggcgcactggcatcgctcgcgtgctctggatacatgat

SEQ ID NO: 25504 - DNA, 705 bp, Oryza sativa
  Clone ID: PAT_MRT4530_30385C.1
tcatgacctactagattttgaacttccagtagaagcgtatcttcgataataaagaatgtttttcctgcgaattgtgatagcatcttttggtgggtatagctgaagatatctttgaagatagtgtaatccctcgtgggaactagaatagagtagtcctaatagttctgtgagtattcccccgtgcgctagcttcggcgtgctcgtgccagacgacgcggacgccggcgacgacgggaaggagaacgggcccggcgccgcgccgtgtggcctgactcgagatgcctgagaccggctccagtgcgagaacgagaacgacgccgacgccgacgccgacgcctcgcggagctttgacgacgccgacgacgtcctgcccgccgcaccggcggagacagcgcggggaagtgacgacggccaccgcgacgagacacggggagcgctaggcacctccttcttcgccttcgccttcgccttctgcgcgcttgtgggcgcggcgctcatggtggccggctgcacagctgcccgcttcttcttcaacagtcgagggaggtacaggcacaaggcggtgcacttgacgccatcggcgccggcctcgccaccgccgttgcctgctctccgttggggcgtcgaggacagtgcagatctggtgggcttctctggcaatagccggagcgacgacatatgagcgcggcggtttgcagaagccat

SEQ ID NO: 25505 - DNA, 474 bp, Oryza sativa
  Clone ID: PAT_MRT4530_30386C.1
gacactcactctaatcgctagcgctcttgcgtcggccgtcacaacctgtgccatcccagtatgcggcggatgtactactaacgtctggcatggactgctaggagcagctccaccgttggaggtaccgggtactgaagtgctctaggctaatggacaaaatgggagacatatagagatgcctcatcatgcgcgatagtggacactcgatgtcctatgagtttcactgatgccgcctatgtgacttgcagcgcgcggaggagagcctcccggcgttctgcaacgtggacatccccaatgggacaggttggtgctgctactggctagggtatcctacgacccattgaactgttcactaggctactaaagctagctgagtgtatgacattggggggttgctgaataactagtgctttcatttgataggaagcatatatacatatggtgaataagtgaagaacttcaatgttcttttgt

SEQ ID NO: 25506 - DNA, 136 bp, Oryza sativa
  Clone ID: PAT_MRT4530_30387C.1
attgcgaggaagcagtcagcgacctcgcgaatcctaccgacataaatttgatcacgctttgcgctgatctacacgccggcacatggcccagtgacagtcttcacgcatggagcattgctggttataaggaacactc

SEQ ID NO: 25507 - DNA, 811 bp, Oryza sativa
  Clone ID: PAT_MRT4530_30388C.1
cacctttcgaaagctagatgatcctccttggtacgaaatcaatcggcacactaagatatacagcttcttgaatatgggcacatcatgcagtttgaacatcagatgaaaagtttttgtcggcattcagaatggagaatgcaatcaagagctagccaccagtcgatcagttgcgagcactgccaggcaacaagaattctcgaacattaaattaagagaaaattggaaagggataaaatcctaaccagccgatgagcacgaactgagcatactcgattactcggaaactctctcagtgatctcttaggcaccagcaatgtatatggcctaacctggtcttaaggtgagtcccaagtgagccccactaacccatagcaatctgcccacaatgtatatgaaaggagtaggcattaagctagacccctcatcttccaaccatttctttccttttcctttccccagccttccagatccacgactctctccccaacacttccccttccaaatccacgagctctcgggacggcaggaggagacagagaccacgatagcggagctcgcaggaggagcaagcgcgtcccttcccccatgggcatctggcgatgctcggcaactcttctccaatggcaaatacgatgatggcaacagcattcatgggctgatccgcgaaggtggtatccctttccccgagcgcgatggatccacgacgacagaggcagcgtctagcacacggatcagcgacgcggcagcgaaaggagcctgtagtggcggaagccgtctaggcacggcttcttgcgggaggaggttgcggtag

SEQ ID NO: 25508 - DNA, 400 bp, Oryza sativa
  Clone ID: PAT_MRT4530_30389C.1
cggacgcgtgggcggacgcgtgggcggacgcgtggggggcgtctcgctgtcgagcatgaacctctccgggaggatatcgccggcgatcgccgcgctgacgaccctgacacgccttgagctcgactccaactcgctgtcggggagcgtgccagccgagctgagcagctgcacccggctcaggtttctgaacctctcctgcaacggcctcgccggcgagctgccggacctgtcggcgctggcggcgctcgacaccatcgacgtcgcgaacaacgacctctccgagaggttcccggcgtgggttggcaacctattcggcctcgtcacgctcagcgtcgggatgaacagctactatcccgtggagacgccagcgagcattggtaacctgaagaacttgacgtat

SEQ ID NO: 25509 - DNA, 508 bp, Oryza sativa
  Clone ID: PAT_MRT4530_3038C.1
ttcctctatgtctctctctatgtgtcacacgagcgcgacacacactcttactgactgtgggtgctgcattagacactcgcagagagccacagctgcctgcaaagaagatctttctgggtgaattgcctagagcacgtactactacacatagacctactaatagagccctagagaagaggagaggaggaagaaccagacggcgtacatgctcaacggggaggagcactactagagctcgcagctggtgttgatgttctacgatgatggggcaatcgccgagctaatagaaggaggggctcaagataggggacatggacgccggaggaggaccagaagctgctggcctacatcaagcatagcggtcacaagctgcaggcgctcgctaccctacaagggcgtgccgaagaagcgcagctaagatgctgacggctcctgtggacaaaccaccctccgacggacatcaagaaggcaacgttatacttgcggatgagcagttcttgatacagct

SEQ ID NO: 25510 - DNA, 501 bp, Oryza sativa
  Clone ID: PAT_MRT4530_30390C.1
tttctccgagggcgcagccagcgcggttagggaaggcggcggagaacgaggtgagcggtgccggcgctgttgggggaaagtttctttcttgtccaataaggactagtatctacccatggatataaatatgtacacctagggtaattataaactacctctcgatcaatagaactactatcggtgcatcaccaccctcttttccgaggtttttacttatcaccggtggaacttggcacctgatgcgggactgcatcggctttcgatcttcggcgaaggggtaagtcctatgttttaccgaccctggtaattgtatcggctacattggtgtggttcaaggctgcatcgcttcgacctctcaaatcactctggttcggttgatatatttgtctgcctatttatcatatatataagttaatctagtttggtagatttacttgtatcggctgggatctgctttagagtttttgccggtatcagctaaattgctttgccagattagat

SEQ ID NO: 25511 - DNA, 1236 bp, Oryza sativa
  Clone ID: PAT_MRT4530_30391C.1
atggagtcactgagcagcgtgtcgacgatcgtgaggatcgcgcaggagatcgccggcgcggtgtcgacggtgagccggtgccggaagctcgccaatcgcgtgcagtgcatcggcgacctgctgcgggagctagagtcgtcgtcggcggcggcggccggcgacgacgacgaggcgacgaggaggctgctggccgtcctggaggacgcgctccaccgcgcgctggagcttgtgacgtcgtgccaggacagcggatgcccgcgcagcctcatcgacggcggccggatggccggcctgttcgacgaggtcgacggcgacatcgaccgctgcctcctcgagctcggcgtcgccaaccgcatcctcatcacccgcctcgagggcctcctccaccggaacgccttccgctcctgtgatctgccgccgccgccgccgtcgccggcgacaatcggaacggagacggagacgacggtgacggttaggatcggcatgcctcgcgtcgagcacatcgagcaccgtgtccacatggtgcaaggagccaccaacgtggcagctgttgttgcctccagcaaggaccacctcaccggcaggtctagcgctgctccacgtggtaacgtaggagtgaccgatgtggtaactgttgtagcctccaacaaggacaagtttaccgttaagtccggcacagctaaacgcggcaatgcaagagtgaccgacatggcacctgttatagcctccgactccgacaaagataagttcaccatgaggtttggcaccgctacacgtggcaatacaggagtgactaacgtggcaccggttgtagcctccaacaggaacaagttcaccgtcaggcccgatgccgctacacgtggcaatgcaagagtaaccgacgtagcaccttctgcagcctcaaacaaggacaagttcacagtcaggtccagcggtgctacgcgtgacaatgcaagagtgaccaacgtggcagctattgcaggctccaacaagaatcagtttaccttcaggaacggtgccactagcatcgcaaccttgttgcaggagccaccatcaaacgggtatggctattgtccgtatgctgaggggctcaccaccggtgaaagctaccgcgatactaccggtggtggcccattcgacgccgctgccaccgccgccgctacctactactatttcccgccatttcagcacatgtttagcgaagaggaccctaccaatacctacaccattctctaa

SEQ ID NO: 25512 - DNA, 536 bp, Oryza sativa
  Clone ID: PAT_MRT4530_30392C.1
ggggccgacccattccggtcgcccagcgtccgctcctgctcgccggcggcgcctggcggccccacaaaccaggggtcagcctcgcggcgttgtcagccaggatgggctcccgtgtactgctgcacctgcggcggtggtgaagcgccagtgcgtgggccacggcgcacccgggcgccgtgtcgagcaactccggcaggactgtgcggcagctcgccgcggtcgcgacagctggtgcagtgctgggctcaaccatggttggaggcatctacggagctcggcgccaccgtgttgggcaccccatggccgagtgttccccggctgccgggaggggacttggagcgcgcggcggcagcctccggcgttctgcacgggacatccatgggacaggtgggctgctactggctaggttatcctagccccggaacggtactagctctaaagctgctggtgtatgactctgggggtgctaaataactgtgcttcatttgcggaagcttatcattggtgaataatgatgacttcaagttcttctgaat

SEQ ID NO: 25513 - DNA, 351 bp, Oryza sativa
  Clone ID: PAT_MRT4530_30393C.1
tgacatgacaggcacataatcatatcatacatagcagtcatgtgcgtgcacgctgacacagaagaggcgcagtctacatttgatgaagctgcaatcttccatgttagggctgcatatgacagctactaacgtgatgcatgcacctgttgttcgctttagtttggtccatagctacggatgtcagacctgtgatatctttgtacaatgcctacacaactagaattagcattagcaaggctatggatgcgtgcgcgcacgacacataaagcctagagcgctggttatgtccaagaaacgtatatgaagttatactgtcttctatatgatcgcccaaccagacttaagagacct

SEQ ID NO: 25514 - DNA, 185 bp, Oryza sativa
  Clone ID: PAT_MRT4530_30394C.1
gatcccggtcgacccacctccgcggacctgggaaaaaaaaaaaaaaaaaaaaaataaaaaaaaaaatatataacatacaataaacaattccgaggggccttctttaataggggcgccttttgaggaccaacttactaccgtcatgcacgtataattttttatagtgcacctaaataaataactgc

SEQ ID NO: 25515 - DNA, 561 bp, Oryza sativa
  Clone ID: PAT_MRT4530_30395C.1
ggccgcaaatttttttttttttttttggactgaaacaagctggaatgctgtaaaccagtaactgagccatttttgttgtttttttttttttttttttcaaacataagagagtacttcaatatttgatcacaaagttagttcaacaacctcatggttcccatcaaaacttaaacatgtttaataggacggtactccgaacaaaagctaaaccacataaatgtagtattatactaaaagatccatttctctggttcaggcggagttctcaggctcaacggcgaggcaaaatggccttcagcggtacttgatgaagccaatatccttggcgttgctgcggaagcactgcctgcagcacatgagcccatacttcctgatcagcccatgagggttcccgcagacccggcagacgcgggagccgggcccgtagttcttggggtgggagttccacacgttggagtggcccatcgctcgccgccggtgagggtgacctcgagctctcgcttcccttccttgtcggatcggatgcggcggcgaggagctggagaaggcggccccggccgg

SEQ ID NO: 25516 - DNA, 1551 bp, Oryza sativa
  Clone ID: PAT_MRT4530_30396C.1
ccaacaatgcagcatcatgcataatgcttcagaagtttgcaagcccaagattttacaatgcagcagatcgacataacagttcaacatttgtggagtttcacatttgtacaccataaatatagagagcaaaataagcaatgagacattgaaaccagcagatacgtacaggtaaaacatctaaagactccgctaaaatatcttgagggaccaattagggtgcgtatcctaaagcaaggaactaggccgtctctcattctccttgtctaaacttcttgtggctcgacctttaagagccaaactgtttaacctctttgaagttactgagacctccgagccagcagtgctctgaacatctatggaagagaatgccatcctgttgttgtgatggaggagatcaccggacctttgcctttgaagaggtggcttgtgagagccatagccactcagccttgccttggctgatttggtcaggctcatgtagctcggtccaccaacctgaccacaatcagatcttctctctgttgccagggaattgttggctgacagtggagtcacagaagatgtagatggggagctctcatcgcacacgaaatcagaagaggtagccgagatcatggagggaggctttgctgccacccttgttgtaacattgttccttctgatcttgaccgagcttgcatcagaaagcttcgggccgccaacgcttacttcctcgacgctctctgaacaccgcgaattggtggagttttcggtgtgggtttgctccatcagtcggctctcccaaggttttgtggccatccacccttccagatagctccaactatggttgctcctagtagcaccattcccatggtgcttgagagatacagcaggggagctgggtcttccaccgtggtttgaacacctctggtgggattgagcataagtacgtgccctttctctcttgattgcaccctcatgcctcatgtgtatcttcgatctcacgtcatccgcagtgccttgactatcacaccatcctgcctcggcttccttgacatgatcgacgcgtccgccgcgctcgtcgagcatgtcctgagagtcgaggccgtcggccgagatcctggctcgccgatcccgcgcgcgagcctgcacccggacgagcgcctgcatgcacttgagcgtgacggccagctgcttgcgcacgcggcggccgcgcaccagcgcctgcagccgcacgatccctcgcagcgccctcagcgcccgcctcgccaggaaggcgcggaaggcggtctggatgcggacggcggcccactcctgcctgatgagccggaagtccctgggcggcgcgcggacgacggccgcgacgacggagctgagcgcgtcggcggaggacgacgtctcggagtacacctccgacgccgacgcgttcccgccgcccctctgcgacgacgagctcctccacagtctgctccacttcctccccttccccccgccgccgcccctctccttctccctctccgccgccggcctcagccccaccagcgtcctgatccacttccccgacgcccccat

SEQ ID NO: 25517 - DNA, 253 bp, Oryza sativa
  Clone ID: PAT_MRT4530_30397C.1
cgcacttgcgcacggaacattgtttcgagcaccgcatgtcaaagcccagtgtccgcaaaaaccgtgttcggttgcccacgttcgtgccatgaggagtacaacgacttgcgttcgcagatgctgtacaacatggtcttccactccaacaatgttgctgcgcctctgccaccggaactagaagagctatgacccagcagcccctgcgcagactcaagggatcctctagagtcgacctgcaggcatgcaagcttga

SEQ ID NO: 25518 - DNA, 496 bp, Oryza sativa
  unsure (1)..(496): unsure at all n locations
  Clone ID: PAT_MRT4530_30398C.1
gcggatgtggaacagaatcccggcccgcctactcccacgaatgcgcttaccgtccagcgacatagacgccccgcatatcgcgcatacactggggcgggctcgtgcaaccacggacgtccagtggctcacgacccgctacacgcgccccagggaccccacccacgcggggcgggaaccgcccatggccaaacacgacgtcttcttcggcgcggtcgcagacgccacaaaacggacccgccgacaactggtcgccacacccgcgctcccgcgcgcccgcccggctttttttgcgaccagggccccgcgcccgcaacgccggggcgcgaactctcgcgtgttcccccacgccccccccccgatngcccgcggccgggatcggcccccgggggaggtaaaatggacttttgcggagggatttgatttggaaggatttggattcggaattgaactcgacgatagatcagggattgagatcttgagatggcacggacactag

SEQ ID NO: 25519 - DNA, 411 bp, Oryza sativa
  Clone ID: PAT_MRT4530_30399C.1
atgccgtgccgtcgtggccgctgccgtcgcgagctgtcccaccgaggcgcgccgccgctgccgcaagctcgaggtcccgccgccgtcaccgcgagcgtgaggccgcccgccgtcttgccgcgccaccatcggcgcgagctcgaggccgtcctccgtctcggagcgccgccgctgcacttctcccgatctggccgccagggggccagatcctccaccggggaggccggatccgccccgccggccgctctggccgccgccttccaccttgcgtgcgtcacgctgcctcccacgccgaggggatgctccgccgctggcgcgttttccccaccgccgccttcccggccagccgcacggtttccggcgacggcgaggcagctggaggcgttgggagggggtggcgctggcggctag

SEQ ID NO: 25520 - DNA, 288 bp, Oryza sativa
  unsure (1)..(288): unsure at all n locations
  Clone ID: PAT_MRT4530_3039C.1
atcgctgttgcgtcgccgggaacccacgccgcgcgaacgtctcgtcgcccctgtngcgcccgcgggatatatgccgcccctctcacctaaacctacaacatggccgccattactccgacgaatcccgaatccgcagacataggtgccttgctcggatttgcatgccctactccggcgccattagagcacccactcgccctcccacctatttaaaccctcttcgactaggnttcaccagaactcaaccctcaatnantttcggccaaccatcttctcttcacacgaaaa

SEQ ID NO: 25521 - DNA, 500 bp, Oryza sativa
  Clone ID: PAT_MRT4530_303C.1
ttcgtctccgcgcgaaaattcccacgccacgcgcgccggaagagagggaaggcttttcctccgttctccgcccacgcgccgtcatcgctgcccgcctttcttcctccgctttgtttgggccggagcggggggcgcaccggcgccggcgacgtctctcttccgaatcgggaggcgggagccagttcatggaatctggtggaattgatgctcaagtcagagcaatcgagcagcgcacaagattggagattcctatacgtgattgagattgcaaatgtggcgcctgttcaatgagttgtgggatgttctaggatctgggtttttctcatcgaggtttctttaatccagctcaaatctatttacaccttatccgtttgcaccgagatcatctctgtgtgtgtggtcaccgtgagattaggaggagatggacgaggaggattactcgtgggttcggcggacaaggttctcccactccgtcgtccgcttcaagtcccgcagggagc

SEQ ID NO: 25522 - DNA, 472 bp, Oryza sativa
  unsure (1)..(472): unsure at all n locations
  Clone ID: PAT_MRT4530_30400C.1
atagtccagcatactaaaattaacccgagcaaactggtgtgtcaactgaaaccagtttgctaatacctcagagttgatagtttagaatgagtgcaagtcccagttggtaaggttggtttagataataatacatttgaaccaatgaatgccgattgaatgctagaacgtgttcttttttaagcttctggacttatggattttgcacctttctacatcagcattacttagataacttgtggctaagctatttattaggtttataattataattactcaattataatatttacctcatccctgtaagcaactgtccattatctgtccaatcatccatacagaacatgtcttaaacttattatggcatccatgancacacttagtttgagcgtacatttttcctactgttactttggttgatgatggttaaatgcggtcctttttggttgttaggtgggtctgtgtctttaactgg

SEQ ID NO: 25523 - DNA, 1479 bp, Oryza sativa
  Clone ID: PAT_MRT4530_30401C.1
ctcgccgcccgcgccatgccgtcgcgccgcccgtctcccctgctcctcctcctcctcgcgctcgcgctcgccttcctcttcctcctcctctccccatccgcgggcatcggcgattcccgacgacgagctgcggtacccggggcaccagcactcggcggagtggtggctcttcaaaggggccccatggctgtggccgacgagctgtacgtgaagctggggagcgtcttcacggtgagcttcctcggggtggtgaaggcgaccttcctcgtcgggccggaggtgcagggcggcttctactcgcggccggagtcggaggtccaccagggcggcacgtacaggatgacggtgcccatgtttgggagaggggtcatgtacgacgtcgacgtggccacgaggtcggagcagatcgccgtctgcttcgaggcgcttaggccgaccaagctcaggagcagcacggtgaccatggttcgtgaaaccgaggaatatttcgcgaaatggggagagcaaggcacggtggatctgaaacgcgagctcgacctcctcatcctgacgatcgcgagccgcgtcctcctcggcaaggaggttagggagaccatgttcgccgacgtcgtggcatccttccacgagctcatggacaacagcatgcacctcatcagcctctgcttccccaacctcccgatcccgcggcaccgccggcgcgacacggcgtccgctaggctcaaggagctcttctcccgtgccatccagcttcgccgcggctccggccgcgccgaggacgacgtgctccagcggttcttggagtccaggtacagggacggccgcgccatgtccgacaacgagatcaccggcatgctcatcgccctggtcgtcgccggccagcacatgagctccagcgcgagcacctggaccggggcgttcctcctccgcgaccccaagcacctggccgccgccgtcgacgagcagcggcggctcatcggtgacgaccgcgtcgactacgacgcgctgacgacggggatgagcacgctccaccgctgcatcaaggaggcgctccggatgcacccgccggcgccggcgctcgtccgcaccgtgcgcaggggcttcgccgtgtggaccagggaagggaaggagtacaggatgccggcagggcacagcgtcgtgtcgtatgccgcgttcaaccaccgcctcggctacgtgtaccgcgaccccgacgagtacgacccggagcggttcggcccggagaggaaggaggacagggtcgccggcaagttctccttcacggcgttcgggggcgggaggcacgcgtgcctcggcgagcactacgcgttcctgaagatgaaggtaatatggagctatttgctgaggaattttgagcttgagctggtctcgcctttccccgaggttgaactcaacaacataatgctagggccgcgaggggaagtgatggttagatacaagagacggaagctgacaagcacctag

SEQ ID NO: 25524 - DNA, 240 bp, Oryza sativa
  Clone ID: PAT_MRT4530_30402C.1
gttaagaaacaaaacttcaagctccctgtcgtgggctatatcaacacgcggtattcagcaaactatttttcaatttctcaattaccactctcttatcaaacttttaattttaatcacagtcacacattgagacacatgaaaataatttaagattcacatcaacttcatatttctttattaattacaagttaactcggcagctaatcaaatagagtcatttatccttttgtctactgctag

SEQ ID NO: 25525 - DNA, 516 bp, Oryza sativa
  Clone ID: PAT_MRT4530_30403C.1
tcagttgatgacttggctggcggcgctcgggtccgcgtcgccgtcggcgccggcgccggcggggggatccggcgcgtactggccgggcgccgccggcgagccccagccgatgggcttgaatgggatgccggggagaggcatgccgaggccgggcatcccggggaacagcgggaacgacgggatcgtcgacggcggcagccaccacttcatgctgtcgctgccggcggcgctccccgcctcggccgccggcccaggagccggcgccgccgcgtccgcatcccccgcggcgtacggcgtcgacccggcgtcgaccggctcgaactccaggtggctgatctcgttctcgtagtcgtccagcaacgggtccagcggctccgtctcgtcggcggcggcggccttggagccgaaggcgaagccctggccgaagtcgccgtcgacgtcgtggaggatgcgcaggccatggccggagacggcgagcaggaggaggcagacgaggatggacagcttcttctccat

SEQ ID NO: 25526 - DNA, 406 bp, Oryza sativa
  Clone ID: PAT_MRT4530_30404C.1
gcaggtcgactctagaggatcccccactcagggctcaccgcaccagcgaccgccaatatttatgttgcgttggttgtgggggacacagagaaaccaggctacatctcttcttcacctgcccgttcagtgtaagatgttggtaacatctgggaatcacatggaatcaacacatgagttctttcaaatgaatgtcttagtaaggctgaattttgccagaaagggtttcttggaaattttctttattgcctcttggcacatctggaagcagagaaatgggtttatttttcagaatatttcccctccttttcaatcatggagaaaccatttcaagaacaaaattcttcagtatatctgcagaatgaaggatcctttaaagcaattagtttttgactggttacaaactttg

SEQ ID NO: 25527 - DNA, 273 bp, Oryza sativa
  Clone ID: PAT_MRT4530_30405C.1
ccttacccacggccacggcgacgacgaacgcgagcccgaagcggtccaaggtcgccgccggcgccggagacgacggcgacgccgacgccgacgcggcggaggagaagccggagccagccaaagactacatccatgtgagggcgaggcgggggcaagccaccgatagccatagcctcgccgagagggtgaggagggagaggataagcgagaggatgaagcttctgcagtcgctcgtgccaggctgcaacaagatcaccggcaaggctctcatgc

SEQ ID NO: 25528 - DNA, 139 bp, Oryza sativa
  unsure (1)..(139): unsure at all n locations
  Clone ID: PAT_MRT4530_30406C.1
cctgaaaggcacctgacagttacatggtgccatctaangttcaccngatccttgggtgcntgattcccttggatacgggttgagatttgttatgggtcttgaagaggcctttcaagatcaagtgtcgatgaatcaagcg

SEQ ID NO: 25529 - DNA, 321 bp, Oryza sativa
  Clone ID: PAT_MRT4530_30407C.1
atggaggtattccaggacgtggagtccgtccggcttcggtcgcgggtggacggcagcgtcggcagagacttgagtacctgcctcgcagctgggagaccctgcacgtcgtccttgtcaagtccaacaccgcagatgcgcaacgactcgcattctcgcaagattaactcctttgagcagattcgtttcgtttccagcgagcagaacaagttcagatgttctctgaatcttcagagttttagaggtctgattcagagtctaggagtttcagaattgaagcttgctccaatggaacgattctccagaattaactggactagctag

SEQ ID NO: 25530 - DNA, 1300 bp, Oryza sativa
  Clone ID: PAT_MRT4530_30408C.1
ccacgcgtccgcagcacaggaggaggagcttgctttccttccttccttccttcctgggttgggtttgggtttgcgttgcggcccatccatcgcattcgcgttcgcaggcacaaaccaaacacctcccctcaaatttctctttcttgtctcttctccctttccgcctcgcctcgctgccaaagcttcacaaatcacaaatcggaatcagatccaccacgacacggcggcggcaatggcggcgtcggcgacccaggaggccgactgcaaggcttccgaggacgcccgtctcttcttcgacgccgccaagcccccgcccttccgcatcggcgacgtccgcgccgccatccccgcccactgctggcgcaagacccccctccgctccctctcctacgtcgcccgcgacctcctcatcgtcgccgccctcttcgccgcagccgccactcggattgacgtctccgtcgcctgggcggcctggccgctctactgggcggcgcagggcaccatgttctgggcgctcttcgtcctcggccacgactggagaatcagccacagaacacaccatcagaaccacggtcatatcgagaaggacgagtcctggcacccgatcaccgagaaattgtaccggaagctggagacgcgcaccaagaaactgcgctttacattaccatttccattgcttgccttccctgtctacctctggtacagaagtccgggcaagaccggatctcactttctgccgagcagcgatctgttcagccccaaggagaagagtgacgtgattgtctccaccacctgctggtgcatcatgatttcgttgctcgtcgccttggcgtgcgtgtttgggtctgttccggtgctcatgctatacggtgtcccatatcttgtattcgtgatgtggcttgatttggtgacttatctgcaccaccacggtcacaatgaccttccctggtatcgtggagaggaatggagctacctccgcggtggcctgacaacggtggatcgggactacgggtggatcaacaacatccaccatgacattggcacccatgtcatccaccaccttttcccccaaattcctcattatcacctcgtagaagcaacaaaggcagcaaggccagtgctgggcagatactacagggagccagagaagtcaggtccgctgccacttcacctgtttggcgttctgctgaggagcttgagagttgatcactttgtcagcgacgtcggggatgttgtttactaccaaacagatcacagcttgaacggcactgactgggccgaagatgctaagcacaagtga

SEQ ID NO: 25531 - DNA, 1976 bp, Oryza sativa
  Clone ID: PAT_MRT4530_30409C.1
gcttgctttccttccttccttccttcctgggttgggtttgggtttgcgttgcggcccatccatcgcattcgcgttcgcaggcacaaaccaaacacctcccctcaaatttctctttcttgtctcttctccctttccgcctcgcctcgcctcgctgcctgcgcttcacaaatcacaaatcggaatcagatccaccacgacacggcggcggcaatggcggcgtcggcgacccaggaggcggactgcaaggcttccgaggacgcccgtctcttcttcgacgccgccaagcccccgcccttccgcatcggcgacgtccgcgccgccatccccgcccactgctggcgcaagacccccctccgctccctctcctacgtcgcccgcgacctcctcatcgtcgccgccctcttcgccgcagccgccactcggattgacgtctccgtcgcctgggcggcctggccgctctactgggcggcgcagggcaccatgttctgggcgctcttcgtcctcggccacgactgtgggcacgggagcttctccgacagcgccatgctcaacaacgtcgtcggccacctcctgcactccttcatcctcgtcccctaccatggatggagaatcagccacagaacacaccatcagaaccacggtcatatcgagaaggacgagtcctggcacccgatcaccgagaaattgtaccggaagctggagacgcgcaccaagaaactgcgctttacattaccatttacattgcttgccttccctgtctacctctggtacagaagtccgggcaagaccggatctcactttctgccgagcagcgatctgttcagccccaaggaaaagagtgacgtgattgtctccaccacctgctggtgcatcatgatttcgttgctcgtcgccttggcgtgcgtgtttgggtctgttccggtgctcatgctatacggtgtcccatatcttgtattcgtgatgtggcttgatttggtgacttatctgcaccaccacggtcacaatgaccttccctggtatcgtggagaggaatggagctacctccgcggtggcctgacaacggtggatcgggactacgggtggatcaacaacatccaccatgacattggcacccatgtcatccaccaccttttcccccaaattcctcattatcacctcgtagaagcaacaaaggcagcaaggccagtgctgggtagatactacagggagccagagaagtcaggtccgctgccacttcacctgtttggcgttctgctgaggagcttgagagttgatcactttgtcagcgacgtcggggatgttgtttactaccaaacagatcacagcttgaacggcactgactgggccgaagatgctaagcacaagtgaaaaattaacttgaaaattattggagtcaccgtgtactagtagcttagtaagcgaagaatggattgttttcctgatagatagcatatccatcatagcatgaactgctgaaagaaagagaaataataagcagcaagggctacttacctgctcaaaagcatgcggccctgcagaacacagggattcattgatctgttggatcaccatattcagatcactaaacaagcattgtccaattgttgttgtagctagcgggtcgttcagttttgattagttctgaaagtgtccaagttataccgtgtaaccctttggagtttgccaggcaattcaatgtctggagtttgtatgtgccattgagcagacaattatgatccgaattaagctctgcaccttaatttttccaaaaaaaataaaaaaaaatggagtttataaaaaaaaaaaaaaaaaaaaaaaaaaaaaaaaaaaaaaaaaaaaaaaataaaaaaaaaaaaaaaaaaaaaaaaaaaaaaaatattgaaaaaaaaaaaaaaaaggggggggcctttttaggggaccaaagtttctttcccggggatggcaaattataattttctttatggggcccccaaaat

SEQ ID NO: 25532 - DNA, 327 bp, Oryza sativa
  Clone ID: PAT_MRT4530_3040C.1
atggcggccggctcggatggcgacctcgccggagctagggtggtcggccggggttttggaggacacctacacgtagagggcgacgacgcgaacccaaaggtgctcacctatgcgtcaaacgacgaccgacgacggccggcgacgagaggtggcggcggcggcggcttggacctcgccgacggcggtcctccgatggccggcgacgacggggagggggcggccgggccctcggtcacgcgcacccgacggcggcgagaggaggcagtggtgacggctagggcgacggcgcagcgcggctggtggttggccggcgacggcggcggctaa

SEQ ID NO: 25533 - DNA, 540 bp, Oryza sativa
  Clone ID: PAT_MRT4530_30410C.1
atgacgcacaccgaaggtccaacaaaggccacaataaaagatatagcgaaaaagctacacacagcgaacagagcggtccaccacggcgaaggcgcatcgctgcaatcgccaaaatcggaaatcgccgaaacccctcaaatcagcccacgaggaaaagtgagagcactaacaaacgcaaagccccctcaacacacgcacggcgacaggcccaaatacatcacttccgtctcgcaacactgccaacattacgacccacgcacatacctcaccaagcggcctacagtgcacgccgtcccggccggccccaacccccgccgcgcaggccgcctccgcgcggccctccggacgggcagccgccgccgccgggccctccgcgcggggcagccgccgctgccggccgccagcgcctccaccacctgcctccgcgccggccggcgcttgccgccgccggccctccacgccggccgccgcccgctgccgccaggaagacaggggagagaggaagaggaggaggagaaggaggaagaggagaaggagtga

SEQ ID NO: 25534 - DNA, 1947 bp, Oryza sativa
  Clone ID: PAT_MRT4530_30411C.1
ccgggctgccggttttccgcacgagggtctcccttctcctacctccagccttcaggcagctgctaaatcgaacgcgacgccgccgcgccaccgcgcccaattcaccgccgtagatctcaatccccataccccatggggatctcccacccgctgtccgacgacttcgacgcttctcccgtgctctcgccgccgccgccgccgtcctcatgctgcccccccgcccacgacgaccactaccttgagcatcaggtttccagagatggacacgctccccggcctcgccatcaagtacggcgtcgagatatctgacatcaagagggcaaacagtttgatgactgacagccagatgttcgcacacaaaatattgctcccacctcgccccgctagccccgggccaccccctctctgcctctctgattcactcataagtcatcatgcataaaagtaacatcagcctcggattacgaaagcaacacaagggttgatgtacttactaaaccatatcatttagtgtgcatggggatctcccacccgctgtccgacgacttcgacgcttctcccgtgctctcgccgccgccgccgccgtcctcatgctgcccccccgcccacgacgaccactaccttgagcatcagatatctgacatcaagagggcaaacagtttgatgactgacagccagatgttcgcacacaaaatgttgctcatacctctaccaggaagacccatgccatcctctgtaaggctcaatggttctggtcagaaaatgaagagagcgtgggctccaaacaatcagcaaaacagagatgttacggattcgctagactcatccaactacaattcttctaagcagcaaatgtcactcgccatgagcaccttgcagtcctattatggtctaactcctcaaaatggggctatgacagatgctggcactgagatgtccttgtacagtaagggcagtttggagcgtatcaacagtgaaacattggtcacttcatctagattaccagacacacataataccgacagaagtaggaactctgaagacacgtcgaatggcttttcagcaacaaacggtgccagtggggccaagatcaatgggacagccaaagcaaagcaagatggttccattcgtcggcggcaaaaagttgaagctgatcaagtgtctaacaccacagatacccaggacgatgtttttacagacccaattaagatgaccaagagtttgttgccaaggccaatttctagtatccgacaaaacatggacacaagcaacccagagtccagcctgaagagcaatggttcatttctgagcggatttagatcagtgcggaagtcgcctagcacaccaaactttgcagatgcagagaatgggatctctatgtggtcaagctcggcatggactttcaaccatgagtcgttcacgcgaccattgcttgatggccttccgaaacccacagcacctaggaggaccaaagctgctttggattgagctgcctgtggccgtagtaggtttgtcctgccgatggacccaacttggaatttgcccaaggaagaagcccggtgggaaaatgggaagttgtggccttggcttgtttttccagagtttttattttgacggccagttgcacccttgacgccagcgctgcattcttcatcttacctgtggcaaaatgtagagctcaatacttgtcagtgccatggaagcaagcggtggttctggcatagaaactcatatatatttgtatcaatatacatacatgtattctttactctgttatgtagatgatgtgctggtatataatttagtatagagttttgagaaagagagcagagagtttacagacagaggacctatatacggagtatatcccatgcattctaattgaggcatgcagttgtgtgatgtcacagcaagtgctaccctaatttgatatcaaaaaaaaaaaaa

SEQ ID NO: 25535 - DNA, 344 bp, Oryza sativa
  Clone ID: PAT_MRT4530_30412C.1
gaaccgaactacaataagaagaggtgggtttttttaacatggacattcacacactcaactactacatgaattcaaggctgtgttcagataaaaacagtagtcaacaaacttgaagtggtacttcgtatccacaaaaagtactatcatttcactaatgtgtaaacagtcgatcccattaaaaacagtttgcttttgattggcattttgacagtgataatagctgatgcaggttacgacctgctcttgaatagtattgccctgattaccactttggcggtagattggagcaaggtcagcgccaatgaatgtgccaacctagaaaatccaatgtttatcccaggcat

SEQ ID NO: 25536 - DNA, 348 bp, Oryza sativa
  Clone ID: PAT_MRT4530_30413C.1
atggccatcgaaaatagcgaaaagaccaagttcgtttcctttctcttctgcaagttccgcgacatgatagtcctccattggatgattcgtcatccctcttacaaggcccgctgcgcggcaattaaagacttcggggggggtgccccgtttgacttgcgcgtctacgggccgagacgggtgctgggcgggctccgtgcaccgggtctatggaccggggaggcaggtggcgtggagcggacggcccagattgagccgcgggtgtggagcctggccgtggagcacctcaaaaagtgttttgtgaagtgtagcaatttgactgaccgcgttgcagctgctgcaacactgtag

SEQ ID NO: 25537 - DNA, 222 bp, Oryza sativa
  Clone ID: PAT_MRT4530_30414C.1
atggagctcgccgccatctccaacacctcgtcgtcgctgtcgaatcttatttgtgacatatgcttgcctccgccacctttcgcttgcttcgccgacgtcccgccggcactctgcgaccagctccaccgtagccgttgctcgctcccggtgcttcctcctcttcctctaggaggcatcctcggcggctggtccctgtgctccacctcctctgcctcctcgtag

SEQ ID NO: 25538 - DNA, 399 bp, Oryza sativa
  Clone ID: PAT_MRT4530_30415C.1
cggacgcgtgggttttctcctacacgaactcgagagaataccaacaatcggtggcggcggcagcacggctgctgaagtcgtctccccggctggacggcgccccaagccgccggcgcaggagatccgtgcgtttctcggtaagccgttgcacggcgctatcatttcgattctcgcttgcatgcgtggttgggttatgtagggaggaattgtctgccttgtcccgtggctcgtgaagcgcccttgtccagagagggaggaatcatcatttcagtttgtaaggctggggagtgcacttgattcttgcagctttaccgtttagctcatattcagatatgcctgcatgtgggcatactttctcatgcgagtgaactaacggatctttgctccgagagtttttac

SEQ ID NO: 25539 - DNA, 516 bp, Oryza sativa
  Clone ID: PAT_MRT4530_30416C.1
caccaacacacccaccttctccccctcttcgtcttcccccaattcaagaagcggaggagagagcgcggcgggggtggagagaaggttctagattgttctggaggtggagggatgtgggggcggcagtactggggcggcggccggcggccgagcggcggcggcggcggggtggtggtgatgttcgcgtggctgtcgagccaggagcggcaggtgcgggcgtacgtggagctgtacgcggcgctcgggtgggcgtgcctcgtctgccactccgagttcctcaccctgtttttccctgataaggctgccatgcttgctgatagggtgcttgcagaactagttaaggaactgaaggttagacctgtacctgttgtgtttgcctcattctctggaggcccaaaaggctgcacatacaaggttcttcagctgatcgagagaagatgcgagggtcaactgagcctggtatagtatcaacttgtaagagactgtctttgcgggcagatgtacgactcgagtcct

SEQ ID NO: 25540 - DNA, 555 bp, Oryza sativa
  Clone ID: PAT_MRT4530_30417C.1
atggcaatgttcatatactatgagtgcggcacccggacgcccaaggacgtgcccctgtcggtgcagctggagtcattcgcctacagcggcttcaccatggcgtggtccacgtccaccgattacgtgctcgtcgacgagcgcgccttcctgagaggccggcgggcgggcgagcaggcgacggcaggcggtggcggcggtgtgcggagcaggcaaggggtaacgggtggcgggcgagcgacggcgcctcagagagggtgtggtgtgggcgtcgctgtgctgtggcgggcggagcggggtggcggcggtggggtgcagaggacgacgacatatggaagtgatggcggacgctgtaggggacgatggcgaggaggacgaagtaggccgggagaggatgactccgacgcgcttggggtttcaccaggagacctcgccttcaccgtcttcgtgccctcaccagagtcgttccaccgcgtcctcaggctgcggcgtcccaataacaacgttgccgatgggacacgggtgcatgctgctttggcactagatgcgatgaactga

SEQ ID NO: 25541 - DNA, 412 bp, Oryza sativa
  Clone ID: PAT_MRT4530_30418C.1
atgccgccaaacatcgacatcagagataagcctagacagaccccatatggtgcctgcggaggccgataagagggatttagtgccatctcagatatcgacgagttcgtatttgaggaggaagactaccctgtcgtcgactacgtgttgatgagtaaagagcaacaccggcttcggccaataggagtagggctattacccgtcagataagggacccgaacatgtataaaatccttatctctgtctcttttacctcaatcttgcatataccctggtaccgatgatctccctaccatccaaataccgtagtcgtgacctaaaacgtctacacatcggttctaaagaagaaaccgtcaccgatgagtcatctgtgacgatctccaaaggaaaccgacaaaaggtgacctagtcatct

SEQ ID NO: 25542 - DNA, 378 bp, Oryza sativa
  unsure (1)..(378): unsure at all n locations
  Clone ID: PAT_MRT4530_30419C.1
atgctgacttgtgggctgacgtcatcaaggggggcgcggcgccgacatgcggggcccaccggtcagcggctcgggagagagggaaaaggggctgccgcgcacgtggtgcacccactcggcagcggctcaaggggggncggtccaccgtggaccgggaccacgcgggtggtccaccgccggtccatgggaccgacggcccagatcgctcccggggctgatccgacgggcggcggaaacccggctcggctcggctcaagcccgcccaaccgccacggcgatggcgacggcgcgcgcacacgcgtcgccggcgacgaaaaccggcggcgaaggcggcggcacaaaggcgacgtgaagccggtggcgctaaccgccggctag

SEQ ID NO: 25543 - DNA, 835 bp, Oryza sativa
  Clone ID: PAT_MRT4530_3041C.1
tgattttacctagaggtagcgagcttgtagcacgtggcggtgaagatgtagctggggatgttgcccttactgctgctagagagagaactactgaagttgatgttttagctgtagaggggaatgcgacgattggagaagccgctgcgacagcttctagtgctgagtcagtgttgccatcctgttacagtgtggaggcattttcaaaagcatatgggttcaacatttgaccatgcagtgacatttctaaatgggagaagacaaatgggccagaagtgaggcctccagtatatgaaaagaaagtgggcaggccacctaagtccaggaggaaagcaccacatgaagtccaggggaagcatgggctaaaaatgtccaagcatggtgttgagatgcattgcaagtattgcaatgagcctggccacaaccaaaggggctgcaagctcaaaaaaactggactgaggcccacacaacagccacagagggctgccactactactgttgaggaatctgatccaatcagcccagaggtaatgcaatttcaaattttaaacttacccatgaccaactgttgacacaaatacctaatgcaatggtatcacagatgtttgatgagtcatctcaagtttctcaaatgaacctagcacctgggcctttacctgacaatcaatttgtcatgactaacactccaactgtcaggccaacccttctcaccactgcaacaaaggcaggaaaagcaagagcaaccaaaagaaaggctgcagttgttgctccagcaaagaaagctactacttcatcatcaccatcatctccctcaaaatgagcaacatatgatcagcct

SEQ ID NO: 25544 - DNA, 638 bp, Oryza sativa
  unsure (1)..(638): unsure at all n locations
  Clone ID: PAT_MRT4530_30420C.1
gnaattgtaatacgactcactatagggcgaattgggtaccgggccccccctcgagtttttttttttttttttttagcaagcatggcatatatcagtccataatctggtaatcaacatgaccgatggatgatacatattgtattgcgtacaaagcttgaagttacttcccaacacatctgacacctatgcttagcaagtcaagcaaacagctccagtaaaactacacaaattttaataatttacaaggaagactacaaccagcagttcacaagatatgacacaactttgagattacaggttagaagtagaagaatccgatctgcaagtaacatcagcacgtataacactacaagtatttaagaaatgaccataataagatatcatgatcgcaattcagtggttgactccaacaaagcagcaattccgtctacatgttntatacaatacaacatactaccacacactatgttgcatcatanaccagcagggtntacagtacctactgttggggactgaataatgctcctgggatccaacatggattatttgggaaacantgaatcctgccnatcctgcgcccgggatcctattctaaaggcncncccgggganccccttgtnccttatgngntatcactg

SEQ ID NO: 25545 - DNA, 337 bp, Oryza sativa
  Clone ID: PAT_MRT4530_30421C.1
acactcctatctgggggaataagcttgcggccgcgaggtcgccttggccgcggcatggaggatggtgcccacctggtggaagggcatgggccgtccttggacggagtacatacatacactcgttggcatcgtgtgcgtttatcgagtaggactcaaacgtgtatgtgtattatttttgtttttttaacttcttgttggaactcccatttgtctgtggatgctcctacttctttgcatgctatgtgaggaggcctcgctatatcttcaacactgaggatgcttctactttagtaatacgtataattgtttttgccgctccaacattagacctgctggc

SEQ ID NO: 25546 - DNA, 234 bp, Oryza sativa
  Clone ID: PAT_MRT4530_30422C.1
gtgtgagaagacaacttgccatggggggcagctgatcaatggctaccacttcatcgggagtctgtagactccttgtgacctcgaggcctatggtgggctgggagctctgcaagcctcagacatgccgaacaaaatcgaggcgaatgttaacgtgcatgacgggggggctaagcaacaggtccttaatggcgggtccgtgctcactgacctggccgatctgtacaaggacatggc

SEQ ID NO: 25547 - DNA, 532 bp, Oryza sativa
  Clone ID: PAT_MRT4530_30423C.1
tatgacaacaggagatgcatcaactaggatagttgaaatatggtgttgaactgtaagatttccatcttactgtggataccgcggatcaagattttgatctaaaacaatccatggaaaatcttgattcatttagtgaggcatattcctacaacattgtcaagcagatgtttattgagaatgatctgggtggccaaggccgaaaaaaacttgagagttttatgtgtggatcatattgcatcttcagctgccatgtgcaatttacagcgaatttctgcatatatagattccatttttgttttcttaaaccggatgtttgtagatcttcatgctttgcttcaaagcaacattgaaattgatttattaagggatttcaaacaatcagagaacactggagtgtccgatgcccatcctgctacccaaggagacatgaaatttgccctatgaaagcttgggcttggagaccatgctctagacttgcttgaacaagtacaagctgctgttactagaataggtagcgtactaggtctcatga

SEQ ID NO: 25548 - DNA, 3321 bp, Oryza sativa
  Clone ID: PAT_MRT4530_30424C.1
atggcgtcactcttactcgagcagcaggagaagctgcggcggcacgtcgacgagtggcggttccggtgccgcgcggccgtcgccgagatcgggccccgctccgcgtccacctcggtgtcctccgcctcggtcaggctccgggtggcccccaccgaccccggcgtcggtgtgggcgccgcgtccctcttgaccgccgcggcggcggccgaggacaacgtcgacgtctccaagttcgttgccgtgctctcccactcgtgccttgagatatcccgcctctctgatgctgcgtcaagtaatctctatcggcaactgctcctctttgggcacactgcagagggaccaaatgaggcacttctggagggggagccacaaaagacatttgcacactcaattccattgttacttgaggtgtatgaaatcatcaatgggctggtgatgatccttgggaacctgctccggcagctggacgcaatctgctcagtccgtgacaagaatgtgcgtccattgaactcatttaagggtttagatttgacaaccgtatttggatcacttggcgaggggcttatggtgttccttttggtagatgaaattttgaggcacaatggcaataccaggagttacctatctctattctcaaggatgctggacaaggtgaaatctgaggtcgatgtatttagtatgtcattcgaggatgtagatttccttgatcaagttgtacacaacttacagaaactttttgacattggcttcttccaacggttggtgcaagaagattcacctttgtgctcttcaataaccctcgttagatctaataagaaactgttagacacattttattctttcttctctgagagcagttctgagatcattcaacgcatcggtgaagctcctgataagaaatcaatgaacctgttagtggagatatttcagttggttccagtggtctatgttgaaggtggaaagcgtattgtgctatctgacttaattaggtttcattgctctccatcactttctttgttgccacccattaaggaagcttgtgaagcttttggtatcatgaagaatagctatctggcacggttaaatgaaatgcattcaagggatattcaagccataaatgattcgttatcatgctggtctgtttcattccagtcagccattcatccatcgtcgcagatgctgactgaagagtgggttcgacatctccagaaacaaattttgcagggagtagtgcttgcagatagaatacatatgcttgtcctatcaatgcttgacttgcatatgcatcttgaggttccactgagaagggagaaagccaagtctctttgccaaatgattgtgtcattgaagactaaattacaaaatgaaatagccaaggggagtcaggcagtcaagacaggatttcttagttcattgatacgtggtggtacagacacggagacaaggcttattgattcactttcgttgtttgctcatgggttcatctctgagttactccaggttctgatgtccttgcaattgcttgaaggaggtgggagttctcagaggcaactgacactttctattacaatggatattctgcacagtctgcctgatttctctgatgtttgtgacactaatgtcttagccatgaaacagggttacttggatattgagttggttggtgtgagaaagcttatatcgaagttcagcattctttcgaatttctggtctctgattgatgaaaggacgaactgcagctttttgtattggagaaaagagatgcttgtgacttggttatcaatggtatatggagatgcctgcaaattatcttggctacagaacatcattgatgcattttctgatggaatgtcacttcttacacttgggaatgtgggaactgttactcttcagcactatgaggaagaaattgagaatgctctgcgaaagactggggttcgtaatctttcgtggtacttaagaatgaagcccttgagactaccttccaagtttgttgatattaaatttcttgtggagaaccatctaaattctgcgttctatacttactcagtgatgtctaactatgacaacaggatgtatgcagagatgcatcaactaggagagctgaaatatggtgttgaactggaagatttccatcttactgtggataccgcggatcaagattttgatctaaaacaatccatggaaaatcttgattcatttagtgaggcatattcctacaacattgtcaagcagatgtttattgagaatgatctgggtggccaaggccgaaaaaacttgagagttttatgtgtggatcatattgcatcttcagctgccatgtgcaatttacagcgaatttctgcatatatagattccatttttgttttcttaaaccggatgtttgtagatcttcatgctttgcttcaaagcaacattgaaattgatttattaagggatttcaaacaatcagaggtaatatttactaccactgttccaaattattcgcaacgtgttactcgtagtttacaggctttacaacagaacactggagtgtccgatgcccatcctgctacccaaggagacatgaaatttgccctaggaaagcttgggcttggagaccatgctctagacttgcttgaacaagtacaagctgctgttactagaataggtagcgtactaggtctcatgatggaccttcttttcaatcgtagatatgtgagaaaacccaaatttgacttgagatacacgacaagttgcaagctgctggggtgggatgatgacattgttgaaattagtaaagttttggacatgggcacaagaaacaatgatccatcagacgatagaattcagccattttcaatattagcaaccaacttttcaaaggtcaatgctagtagtggatgcaagaattccaagttcagggtgatgcttgctgttatgtcgtatttgcaatcagcggttatggccagagtgctagctggtaacattgttcagatgcagttttcatttccttccagtttattttacaggaacatctatgaacatgttcttgttgtcggtattaccctgctggttttggagcaagataactcatttgatgaactcaattggttcgcttccacaaaagcaaaattggaaggagaggcaaaggacagggacgacaagaaaaccgatagaaacacgagcggagctagctttgtcagtctgaaactctggcgctcaagtccacctgttaggacagagcagcaaaagggtggtgttgacaaggggacgcgctacatgcaggaaattgagcttatagaatgtctattcaggcttgctagaacagtattgagatga

SEQ ID NO: 25549 - DNA, 457 bp, Oryza sativa
  Clone ID: PAT_MRT4530_30425C.1
gttggagcgaaatgtactgtttttaagcatgtaaaaaagattgaaagggtggactgagatgaacagttgagatggaaccttgtacaactccatgataacatagggccagcggaccagcattgaatattgtgagtacagagccaacatggattgagttaggcggttcatacatacaaactttgggctgtaaattaccgtaaaggctgttggccgaaatggctcatccttttctttttctcagcagaaggcctaacgctctttgttgccaactgagaggcaccaatataagctgctgagtccatacctaggattgagttcatttgatcaaatgcgggtaccgtcttgatcctagccttgatagacatagaacctacctattaatcaggctcagtagcagcagtttgttccacccaaacatttagtaactgggatgaattcgtgtacgttgcagaattgt

SEQ ID NO: 25550 - DNA, 3360 bp, Oryza sativa
  Clone ID: PAT_MRT4530_30426C.1
atgggcactgaattaactgttacaggatggttcttgtcacctattatacgggaaatgcaagatactgcactgtcctacataagggggcaattcagttgggagaaggatcaagaaaaggaccttgagcgtcttgatactatccttacagagatcttggccatcgtggacgccatcgagaagcgggagatcaaggatgggaatcagaggaagctgctccggaagctcaaggatgccatttacagcgccgttgatgtgcttgacagcttccagtacatggccctcaagtctaaagtcgacagccaagctatggtgagtcgcgttacctcatcctgtgtttacttgggtaagcgcgtagtaggtactgataagttccggaggaagctaaccgatatgttgaaaaaattggatgaggttaaaacaactgcggataccttgttcaaattggttagttttgatagtgctactgcaaagctgctcccagtcacacaggcacgtgtaacgtctcctttgaaggaagagaaccacatatatggtagaaaagatgatcttgataggctgagagatttgttgcttatgcaaagtgatagtagtgcacctggacctagtaactcatgtgttcctgttatatccatcattggtgttggtgggattgggaagacaagcctagcacaattagctttcagagatgaaaggatacgtgcgagctttggtctcaggatctgggtttgtgtatccgatatttatgatgagataacattggcaagggatattttagaatctgtaacaggtgaaaattatcgcagtgttactaaattggatgaattgaagaatgttcttcaagaaaagataagtcaaaagaacttttttcttgtattggatgatgtatgctgtgcctttggtgagaaacatccaggactgtttcaagaacttaaggaaataggaatgcagattgctgaaagattgaatggtttgcccttagcagcaaaggtaatcggtcgcctattgaatgttgatttagattcaagtcattggaagaaagtgctagagagtgacatatcaggtgatgttatgaaggttctcaggttgagttaccaacacttgcccatccacttgcaactatgcttcagcttctgcagcttattcccgaagaactggcgttttgatcccaggaggcttacagacatgtggatttcacagggttttgttcagaaggaggatgagtctgacaatgacatgaatgttgaagatgttgcgaagggctactttaatgatcttgtacaaagatcattcttcgagagatctttgttagaccttccaatagagtatgtcatgcatgacttgatcaatgaccttgccaggaatgtttcaaaggacgagtataccagaattgagagtgagaagcaaaaggagatcccaccaaacattcgccatttatctatatctgcacatttgtgggccgaaatccaaatacatccgagtgctagatttgactgttgttgcctggagaggttgccaacatcagtgaaaaatttgaagcatttgcgctatcttgcttttagggttcctgaaaaaccattgcccacagcattggtccaactttatcacctagaggttctagtcacaagaggtcactcttgtcggggaagtgaatgtttccaacttccaacaaacatgaagaagaacctactcaaattgagaaaagcttaccttttcaatgtagggggtgccacaatatctggttttggtggacaaactcttctgcatggcccaggggaattccatgtcaagaaggagagtgggcacagacttggagagttaaaggagatgaacaatatccgaggaagattaagtgttaggtttcttgagaacgtggaacatcagcaacaggctgttgatgcgcacctagattgtaaagagcacgtcaaacacttgcagctagagtggagtgaccttccaaggcctattacttctgagttggattctgatgtgcttgaggcccttcgacctcaccctgatcttgaccggctgaatatcacaggttacaagggactgaggtcacctacttggtttgagaccaattggatgaaagcactgacttctgtaatccttgagaattgcatgggttgggtgcaattgcctcctcttggacagcttcctctactggaggatcttgtactgaggaacatgcatgctgttgggcagataggtgaagaattctatgggaacggtgaaatgaagggctttccaaagttggaagaaatagtatttgatggcatgcccaactgggagaaatggtctggaattgaagatggttcattgcttccatgtctcacaagactttacatagctaagtgccctaagcttcaagaagcaccacccttaaatgcaagaccaaaagttgaagtggcgataacatctgattccttaccaagttcgtgtctatttgactccctaatggcatcggcatcgtatctgatcttacttgtcaactgctgcagcttcttgagcagcctgaatactgaccaacttagtcatgttgaggagttgaacgtgaagagctgcacagatccaatgccagcttgtggatttatcggacttagctcccttaaggtgcttagaatcagcaactgttcagcgttactatcgtcagtttgtgtggaagcaggtgaagaacttgacacatgttttttccctcagtcactaagtgaacttgaaatagttgatagcaatattcagtccagtttgctaccaagatacttgcaaggcctaactaacctctcggtgctggtgattaatagctgtgattctatggatttgctatctcttgcttatggaacccatcaccttacttctctagaagccataatcattaaagactgtattttcctatcctcattggatggatttgaaaatctgattgctctcagaaagttagtggtagcagattgtaaaaatttctgtttcttgccagctgatctgaatgcattaatatctctcaaaacattagccatttatgggtgccctaagatgaaatttctcccccagaatggcgtaccagcttctctacagttaattttgctgtcactgttgcatccagagttagacagacagcttcaaaggagggaaggtactgaatgggacaagattgctcatgttcctgaaaagaaactagagttctttctgacgagtgttgtcatttttggacgtgtggtatgccttcctgaaccactctactacatttacttcaaccgaataactactagtcatattctcttggtcctcttcaatcttcctgtcagtgctagtctttttgaccctgagattcttgaattcccaagcatgaagccaaaaaattgctga

SEQ ID NO: 25551 - DNA, 178 bp, Oryza sativa
  Clone ID: PAT_MRT4530_30427C.1
cacagaaccatactgaacccatggggaagcctgaactattcattatattaattgtatacggatacatagcatttgttgcaacctgggaaaaattaggtctggagtgacaaaatgggacaaaatacaacccagaggaatagcctagtgagcctgttcctccttacagagcttggtgtcc

SEQ ID NO: 25552 - DNA, 325 bp, Oryza sativa
  Clone ID: PAT_MRT4530_30428C.1
ctcacgcgtccgcccacgcgtacgcggacgcgtgggtgatgggggatgaggtggccgcggcctcctcgacgatctgattcgcgggggtgacgcggcaccggatcctgatggaccgcttccgccggatccggcaatgcctccgggggccccgcgccggagcgtacctgagctggtactaacacctgattgggattctgaagaacgcgttccgccaccgacgtgcgcgccgcctaccggaggctcgccatgaagtggcacccggaccggtgcgtgagcgacctcggcgaggccaatcggcggttccagcggatccaagaggcgtact

SEQ ID NO: 25553 - DNA, 741 bp, Oryza sativa
  Clone ID: PAT_MRT4530_30429C.1
tcaaaatttgtggcatttgctgtgagacatccaaagaacgtgaatcttctcgtggatatctcttgttctttctcccatcctcttcttcctctttctttcgttgccgctgaaggcatcgtcggtgagctcccacagcgaagatggagtcgacgcacggggtgtgcgtgcgcaccgctctagcgtctcctgctctgcctgcctcggcgttggcatgttgttctccttctccggctcggacgcgccaccgacattgtccgcgatgccgccgaagcccaccgcccgcttgatgcggtcgcgggcgtggtgaccatgctcaccgacctgcggagcagcttggtcagcggcaaggacatggccggctgcagcaacggcccggtccgcgaggtcagcacgacagacggggcaggtgacatgcgcggcgagccacacgtcgatgcaggcggtgtggaacacatggcagcacccggggaggaggcagagcttctcgccgtcgtccacaaactcggcgaggcagaccgcgcactcgagcgccccatgcccggccttcaccgccctcgctgtcgcgtacgtcgagccccacgtgcctcctccgatgttccccaccgacgacgcgaacggccgcgctggcgtgcacagcaccgcccccacggcaacgatgcgcggcagtggtggcctcggagcagcgtgggcaatggagaggaggaggatgacgtgggcgacgaatgcgtagtgacgccccat

SEQ ID NO: 25554 - DNA, 5187 bp, Oryza sativa
  Clone ID: PAT_MRT4530_3042C.1
tcatacaaagaatttacgtagttggtcaatgttccaagaatttgctaattcgcgaccgtcgccgtctgcgattttgaatgcgcctggccgcaagacttgtgtgatcgtgtaaggtccttcccatttaggtgagagtttgttttgccctgcttggctttgaactcgtcggaggacatagtcgccgatcgaaagtatgcgtgcacggatgcgcttctcgtgataacggcggagggtctgttgatagctggctgctcggacggcaactcgttcccgatgcttctcgagaagatttacagcgatatctcgctgctcctcctggttctcgtcggagtgcttctgtactcgtgtactctgatgttgtagctcgcctgggagcatggcctcagagccgtacacgaggaagaaggatgtttccttattagacgttgtcggtgtggtgcgtacggcccatagtactgacgggagttcttcaacccaccttttgtcgtgtgacatgatcctgtcgtagacgcgggttttcatcgcttgtagtactatgccgtttgccctctcaacttgtccgttgctttgagggtgagagaccgaggcgaagcatattttgacccccagcccgatgcagtagtcctggaaatcggcgctgatgaactgagagccgttatcagttatgatgcggtgtggtagtccgtatctgcaaaatatccctttgatgaatttgatggcgttgtcggccttgatttcccccgtgagtactgcttcgatccatttggtgaatttgtcgatcgccacgaataggaatctgtagccgccctgtcctcgtgggaatggcccaagtatatctagcccccagcacgagaatggccaagtcagagggatagtctggagtgcttgcgcgggtagctttgtgtgtttactgtggaattgacaggcttcacatcgctggaccatgtcgcatgcatttttaagggcggttggccagaaaaagccttgtcgaaaagctttgccgaccaatgtccgaccggcggcgtgtgacccacatatgccttcatgtatgtcgaggaggaggtgtctgccgtcgtcggtcgagacgcatttgagaagtaccctgtttggcgctttcttgtataaatcattgccgaccatacagtagatctttgctttacgggttattttctcggccactgtgtcgtcctcgggcaactcctcgctgctgatgaatttgattagtgggatgcgccagtcgtcgctaacctctttcaccgatgacttcgtcaggatatcgagaaaagtgccaggctcgagcgattctcgtctggacgcacgtcgtgctaggtcgtctggctcgacgttgtccttgcggtagacgtgtcggacctcgatcccatcgaactttttctctagcttcctgacttttgcgagatacttggataactcagggttagagcatttataatctttgtgtacctggttcgcgactagttcggagtcccctttgacgattagtcgcttggccccaagtgtagctgcagctcgtaccccggcgagtagtccttctgcagtgttattggtcgccccctgctccttggctgttgagtgcgccatcgaacgccattgtccatgttgcattgtcgccttggttgtctgatttgttatctggcatagtccgatcggcaacgaagtcggcgagtacctaggacttgatggctccttgagtcttgtaggcgacttcatgttctcgattgccttgatcttctcggggtttgcttctattcctctgccagagacaaggaatccgagcagcttgcccgacggtactccgaacgtgcacttctcaggattgagcatgaggcgatatcgtcggaggttgtcgaacgtttcccacagatcgtcaatcaatgagtcgcctgtcttggttttgacaacgatgtcgtcgacgtaagcctcgacattgttgccaagctggttgctaagtgcgccctggaccgtgcgctggaaagtattcccagctgttatcagtccgaacggcatcttaacatagcaaaataccctgaacggcgtgatgaatgctgtcttctcttcgtcctcttttgccatgctgatttggtggtagccagagtaagcgtcgaggaagctcaataactcgcaaccggctgttgaatccaccagttggtctattcgaggaagtggaaagtgatccttggggcacgccttgttgaggtcggtgaagtcgacgcacattctccattttccgttggacttccgcaacatgactggattggctagccactcgggatgaagtacttctctgatgaagccagctttgagaagtttgtcgagctcttctcgtatggcttgtttccggtctggtgcaaatctccgcaatctttgctttactggcttggcatcgggtcgcaccatgagtttgtgctcaatcacctccctggggacccccggcatgtcggacagttgccaagcgaacacgtcggcattgtcgcggaggaaggtgatgagcgcgagttcggtcttgtcggggttggcactggagagtggaacaatcttgatggcgctgtctaatttcggcgtcttgtttgtcttggtcactttcttgggtggctcagtcgtggcgggtgggctgggcgtttgctcgaccatgtcgaggctttgcttttcgcattgcaccgccagctttgcgttcccctgaatagtgattgttcccttcggtctcggcatcttaagcacttgatatgcgtagtgagatgcggccatgaacttcgcaagtgcagttctcccgatgatggcgttgtaagctgtatcgaattcagcaacatcaaaggtgatctgttttgttcggaagttgttggcttgaccgaaagtcacgggcaacgtaatcttgcccaaaggtctggacgatgattggggagtaattccatggaagggttgatcagttggtgtcaactcgttttgcggaattcccatcgcgtccaaagtgcacttcatcttgggtgcagccccctgccatgtcgagcagacttcacgttccactttcttgtattctcgcttggaggagtacgttgtggaaccgccgaagatgtgtgagatgtggaggtcggagtctagatacgctgagtccgattcgtgaggagccgtctcttcgttcgtctcgacaacgcgtactcgcttgcctttttcaaatgccatgtgcttctcgagcgactttttgaaaacaaggcaatcttccagagaatgtctgtccgtcttgtgtatggggcaccatgatttctttgtgtcgctgctttgtgggtctgggcgtttgggagggttcgcgtattctgctgcgaggacttccgcttgagctttccttttcccgtttttgcgatttttcttcttgcttgactcagatgtgtccgtggctggtttcttctctcccccggtcttcagcctatcgttcttgcgtcttagcgcatcatcagcgtgggcgcatcgctcaacgatctcgaataatctccgagtggttgtgatgcgtcttgtcgccaactcctgggtagtgtagcgatctctgacaccggatttgaaggcgcgaattacagaagcatcggtgatttcaggaattgtgtttctgcactcgttgaaacgtcgaacatattccctcaatgattcacccgagttctgtgtcaacgcgtgtaggtcgtcttcgatcgcgtggcgcttgtatgttacttggaaattggcgatgaattgttgccacaggtctgcccatgaagggattgagtagggaggaagatgcatcagccatgaacgtgcagaacccttcaacgcagttggtaaatagttcgctaacgcgttgttgtctgctccggcagcatagagtactgtggagtagacttgaaggaactcctctgggtcagtgctcccatcatacttttctattgctccgggtcggaatctgattacgaggatgacggcctggatctcgggaatcctgtcgtcgtcttccactgttgtctcggcgccaatctccatcgtcgtcgtcgatacggcggcggccatgaccagtattgtctggcacccgtcgttctcgatcgttgtgatcgtggtggttgtcatggtcccggtcctcgtttgagcaatttcctcgatttccgttatcatggcgccgtcatggcgccgtgaagagacatgacgccgagagcgattcacgttgtctcgtgtgcgtcgtgcttctcggtggccgttgatttgatctggaagatcgccagtgccgcgaggtggaggggtagcttgttgaggtgattccctccgttccggatcttcaccattggccttgctagttggtggctgctcctggtgtgctgcggtagcggcttcttcaaacgcgttgctgaggttagtcaccgattcccgtagtcgttctgtccaacgctcgaggtcaacgttcagaacgggatcgtagggagtttccctcagtatcgcttgaacaaccctgatgtgctgggctggagtagtcgattgattccccgcttctgtgttggcgtgcgctgatgtgccaacgtcatcgatagccaatacctcccgcggcgcgctcgttgtcgatgacccatagtcctcgaggagatgtaagaccgatggttcgtgaggatcgatatcgattaccccaacgaatcgatctgaagttggagtcgctccttgttccttgctgttatccctgatggggatatatgacttaggagactgagctttcatggcgccgagaaagactttgcagctcgagaggtcgtgattctttgtcttgtgaataggacaatagacatcccgagttagagaagtacgctgaattccacgttctttgcaggcacgaatttcagcacggacgttgaggaaaacccagcaatcttgcagggtgtgtttcttagttttgtggataggacaccaagaccttgtggcttcggaagtcatctttgtcggctcgtggttcatatcggaaggacaaggtttggccgtatcagaatccttcttgagcttggatgtcgtcaatattccgttctccgtctcgacgggaggatttttcgacatggaatcgccttggttcgtagccactgcgttctcgtctccggtcattggaggaccggttgagatcggcgtcgtggtgtaaatcgggaagatgatttcgccgacttgagtccataccagcat

SEQ ID NO: 25555 - DNA, 654 bp, Oryza sativa
  unsure (1)..(654): unsure at all n locations
  Clone ID: PAT_MRT4530_30430C.1
ttttcttatcattctcttttatgtaatgttcatgtttataataatataatttaattttttttatatcttatcttcttatacctttttttatatttttcccacgcgtccgcccacgcgtccgcccacgcgtccggtttttctttcccttcacaaaacaagctaggatgtctctccagtctccatataaaaaatgaagatgtttcaccactcccctgtaaacaaatctgcaggttgtgcaaattcccggagttggaagcaaatttgcagcctctacattgaaaggccctgtctgataaacctttatctgtgcaaatctgagcccagattccagaggaatttcttggcaccaacactagttcacatgggaaaaaagaagccaataactgaacagatgttgtgataatcgaacaggagagtaatgaatcattttcactttttcagcctaatctaaaactctcagttcatacatctccttgaacagccaaacaaaacagagagagacaccaaatgatccatccagttggatcaaatccatcatctcgatcttgacgaatatttacacatgaaagcaagcaagaaagaaagaagcgaanaaagagagagagagagagagagagagagagagcgagagaggagagcttgccaagaacaagg

SEQ ID NO: 25556 - DNA, 3511 bp, Oryza sativa
  Clone ID: PAT_MRT4530_30431C.1
atggcagccgctcgccggagctccgccgactggccacggagctcctctccggcgaagatttgcatcacccacggggaagctgccttcttccaggatgctgaggcaaggaggatggaagattcagtagttgaaaaatggcttgaccagctaagagatgttatgtatgatgttgatgatattattgatttggctagatttaaaggaagtgtcctactgcctgactatcctatgtcatcgtcaaggaaagcaactgcttgcagtggcctttcactttcgtcctgcttttctaatattcgtatacgtcatgaagttgctgtaaaaattagaagcctgaacaaaaagatcgataacatttcaaaggatgaggtatttttaaaactcaaccgcagacatcataatggaagtggttcagcatggacaccaatagaaagctccagcctagttgaacccaaccttgtgggcaaggaggtcatacgtgcttgcagagaagtggtggatttggtgcttgcacacaagaaaaagaatgtttacaagcttgctattgttggaacaggaggagttggtaagacaacactagctcagaaaatattcaatgataaaaaattagaagggagatttgaccatcatgcatgggcttgtgtttccaaggagtattctagggattctcttttgagacaagttcttcgtaatatgggaattcgatatgagcaagatgaatcagttccagagctccaaagaaagattaaatcacacattgcaaataaaagtttttttctggtgtcggatgatgtgtggaactctgaagcatggacagatttactaagcactccacttcatgcagccgccacaggagtaattctaataactactcgagatgacactattgctagagtaattggggtggaccacactcatagggttgatttgatgtcagccgatgtaggatgggagttactttggaggagcatgaacatcaaagaagagaaacaagtgaaaaatctacgggacacaggtatcgagattgtccgcaaatgtggtggcctacctcttgcaatcagggctattgccaaagtcttagcaagcctgcaagatcaaacagagaatgagtggagacagatattggggaaaaatgcctggtccatgagcaaacttcctgatgaattaaatgatctgagtgcattttttttctttgataatgtcagggaaataggggttgaggaagcacatcgtgttgacctaatgtcaccagctgttggttgggagctactttggaagagcatgaacattcaggacgagaaagaagtgcaaaatctgcgagacatagggattgagattgttcagaaatgtggtgggctacctcttgcaatcaaggttactgctcgagtattggcaagcaaagataaaacagagaacaaatggaaaaggattttagctaaaaacgtttggtccatggctaaactccctaaggaaataagtggtgcactatatctaagttatgatgatttaccactgcatttgaagcaatgttttctttattgtattgtatttcctgaagactggaccttgaaacgtgatgagcttatcatgatgtgggttgctgaaggctttgtagaagtgcacaaagatcaattactagaagatacagcagaagaatactactatgaactaataattaggaatctcctgcaaccagtttacacatattttgatcagagcagatgcaaaatgcatgatctcttaaggcaacttgcttgttatctatcaagggaagaatgtcatattggagatctaaaaccattagtagacaatactatatgtaaactacgacgcatgttagttgtcggagagaaagacacggtggtcatacctttcactggtaaggaggaaattaagttgagaacttttacaactgatcatcagctacagggagttgataacacatttttcatgagattaactcatcttcgtgttttggatctaagtgactcacttgtgcaaacaataccagattatattggaaatttaatccatttacgtatgtttgatcttgatggaaccaacatatcttgtctcccagagtccattggttcccttcaaaaccttctcatattgaacttgaagaggtgtaaatatctgcacttccttcctttggcaacaactcaactgtacaatttgaggcggcttggtcttgctgatacaccaataaaccaagtcccaaaagggataggaagattgaaatttctcaatgatttagaaggatttcctatcggtggtggaagtgacaatacaaaaatgcaagatggctggaatttggaagagttggctcatctttcacagttgaggtgtcttgatatgataaaattggagagagctactccttgcagcagtagagacccatttctactaacagagaaaaagcatctcaaagttctgaatctacactgcactgaacagacagatgaagcatattcagaggaaggcattagcaatgttgagaagatctttgagaagctagcacctccacacaacttagaagatcttgttattgggaatttctttggttgtagattccccacctggcttggtactaaccacttgccttctgtgaaatacgttgtcctcatagattgcaaatcttgtgtgcatcttcccccaatcggacagctaccaaacttgaaatacctaaaaattaatggagcaagtgcaatcaccaagattggacccgaatttgttggctgctgggagggtaatctcagatccacagaggcagttgctttccccaagcttgaagcgttggtcattgaggatatgcccaactgggaggagtggtcctttgttgaagaagaagaagaagaagaagaagaagaagaagaagaagaagaggcacaggaggaggacgcatctgcagcagtcaaggaagcgggagaggatggaacttgtgcttcgaaggaggaaggagccctatctccaactccaaggtcattgtggctgctgccttgtttgacgaggttggaacttgacgactgccccaagctgatggctctcccacgactgcttggacagcaggccaccaacttgaaggtgctccttataagagatgcaagctgcttgaagacggtggaggacctccctttcctctctggtgtcctttcaattggtggctgtgaaggcctggagagggtctccaaccttccccaagtgagagagttgcttgtagatgaatgcccgaatttgaggcatgttgaggagttgggcggtttggagcagctatggctggccaagaatatgcaggagatctctcagttgtgggtccctgggcttcaggagcaacaccgccagctccatggagatgagcatgagctggaggtcaacgagtggctctgagagccaattagtttggatggcacaaggtattacactaattggttgggatttttcactgggttgtacattcatgctgcccctctgctcttcacttgtatatatgcagctattttagcaaaaaaaaaaa

SEQ ID NO: 25557 - DNA, 606 bp, Oryza sativa
  Clone ID: PAT_MRT4530_30432C.1
atgaaacaaaaattagaccgattacttgtgcaggcagatattcagttaactgaacggcaaaaagaacaacttattggctttgttcatttattgcataaatggaataaggcttataatttgacctcagtgcgcgatccagaagaaatgctagttaagcatattatggatagtttagtcgtcagtgttcatcttcaagggcaatcttttattgatgttggtacggggccgggattgccgggtattccgttagcgattgctaatccagataaacagtttgtcttgttagatagcttaggtaaacgtattacttttatcaagcaagtattacgtgaattagccattacgaatgttacaccggtgcttagtcgggttgagcaatataccgcacgtcagtttgatggcgtattaagtcgtgcgtttgcttcattagatgatatgttgaattggtgttatgccttacctaacgatagcggaaagttttatgcgttaaaaggtgtgtatgacggcactgaattgcaagcggttcaaaagccgattaaattagttgacgcaataaaacttaatgttcctcagttagtgggggagcgccatttaattgtattagca

SEQ ID NO: 25558 - DNA, 2678 bp, Oryza sativa
  Clone ID: PAT_MRT4530_30433C.1
gctcgtcgcgctccggcacgccgcgaccccgagcctgcactctgatctctctccgacttccccttcttctgcttgctcgccgcccgccgatcaccgcctcctctacgcggggcgggtcaaaggctagtggttctctccaccctactagcgcagcccgaggcggcgtcgccggaagtaggcgggggagatctccggcgccatgtcgatggactcggacacctcctcccagggcggggaccaccggagcttccgccaaatcacgcgagaccgtttattatttgaaatgctcaggtcaactaggaaacattcaaaatcaacatggaaggttcttattatggataaacttacagtcaagataatatcatgttcatgtaagatggcagatattacagaagaaggggtttcattggttgaagatttgtacaaacggagacaaccgttgccttcactagatgctatatatttcattcaaccaactaaagaaaacattgggatgttcctgaatgacatgtccggaagaaatccgttatacaagaaggcgtatgtgtttttcagttctcccatacagaaagaattagttactcaaataaaaaaagattcaagtgtactaccccgtattggtgcacttagtgagatgaatttggagtactttgctattgattcccagggtttcaccactgaccatgaaagagcattggaggagctttttagtgaaaatgctttggattcacacaagtacaatgcttgtttgaacacaatggctactcgcatatctacagtgtttgcatcaatgagggaattccctagagtgcactaccgtgtcgccaagacaattgatgcttctgtaacgacaacactacgagatttagtgcctacaaaacttgctgctgctgtttggaattgcctttcaaaattgaaaacatcaataccggattatcctcaaactgagacatgtgagctacttatagttgatcgttcagtagaccagattgcaccaatcattcatgaatggacatatgacgcgatgtgccatgatcttctatgtatggatggcaacaagtatgtccatgaggttccgagtaaaaatggttcatcaactgaaaagaaggatgtcctattggaggatcatgatccaatatgggttgagctccggcatgcccacatagcagatgcaagcgaaagactgcatgacaagatgagcaattttgtgtccaagaataaagctgctcaactgcagcaagcaagaactgggggagagatatccaatagagatttgcaaaaaatggttcaagctcttccacagtacagcgatcaaattgagaagctttctcttcatgttgagattgcaggtaaactcaatagcataataagggagcaaggtcttcgagatgttggacagctagagcaagatcttgtatttggtgatgctggaactaaagaattaatcaattttttgaggacacaattgggtgtaagtcgtgaaaacaagttgcgtttgctgatgatctatgcagcaatcaacccagacaagttcgaaagtgacaagggtgaaaaattgatgcagtttcttttcatattggataagcgtgacttctatgctggcattaaatatctgttggcaggattatccactgatgacatgattgctgtgagtaatatgcgttgcttatgtggccctgacaccaaaaagtcctcgggaggaggttttacgtttaaatttgatgttcacaagaagaagcatggacttagaaaggagcgaactggggaagaatctacatgggcactttcccgattttatcctgttctagaggacttgattgagaagcttagcaagggagaattaccaaaagacgaatactattgcatgaacgaccctagcccaagtttccacggtctgccaatgagcagctcagtcagaactagcccagctcaccaaccagctcattctatgagatccagacggacaggtggtacatgggctcggccacgtggctctgatgatgggtattcaagtgattcagtgctgaagcattcgtcgagtgacttcaaaaagcttggtcagcgtatatttgtgtttgtcattggtggcgccactcggtcggagttacgtgctgtgcacaagcttacatccaagctaaagcgggaagtcatacttggttcatctagtctggatgatcctccccagttcatcacgaaactgaagatgatgtcagtcgatgaactgacgctggatgatcttcaaatataaatagcaacactgcacacatggaattatgcggctctatctagatttgctccatttgtagctatatatataatttttaatctgtgatttgtaggactagttattatgcacgggttgatctctataccgcaggttgtcaatacgaggggctgcatcatattcatttgctagggagagtccgcacaacattaggtgattcttaacggaatgaatgtacataacagtggccggcagatgtaactatgtaacgattttctcgattgggccaatgatcgattggttgccttctccacggaatgtgagatgttctctatttgcccacgaacctccatccacatttaaaattgcaaacgtgaacttatgaagtagtagtattagtaagatgcaagcttatgatttgtgagttgtgactgaaaaaaaaaaaaaaaaaaaa

SEQ ID NO: 25559 - DNA, 3845 bp, Oryza sativa
  Clone ID: PAT_MRT4530_30434C.1
cctccaaagtaactcccatcctctagctccttttttgccaccaaatcaaaggggaaacgttcttgatcatcatcttcctcgccagcggcgatgctgcgcacggctgcacgcaccaattaaggcctcactctgaggtgagtctttcttcctcacgcaccaaccctctgcttgcccacaagctctggttccttgcagtatgagctcctggttccttgcagtatgagctcctgattccttgcaggatgagctcctggttccttgcagctggtggacttggtgagctgatgaacagctgggggtttcaagaaatgtaacccccattattccagttcttagcttcagtatgctaacttgctcaatacacatggcaaaacaacctattaaaaaacataccgaaatgtaaccccattattctagtcctttactgagatgtgcccctctgttgcaaagatactctgaaactgattgaactttgtccattttcagatcgtgtaattgtcataaataatttgattggaaatttttggtgcatcaccatcaacgagtttctctatggcatgaatactgtgttctttggttggttcatgcctagacaagaccccagccttcattactgaggaggcaactctgatttctggagtaaaaaatgagtctgaggaactgcagctgggaaccgactttacaagcttctctctgcaggtagcttcgtcaatgtggttgaaagattgggctgtccaaagctgtccgctttacagctaaatcttgaactatgatccagcaaatcttcaaaatttgggatgatttaaacgaattgtcgtacgacggtgctagccctcgtcatccggtttgaggacccctctcgttgaaggattctaaggcctgcagaggatctccaactgtccccgaagtgagagagctgcatggaacaaaatctgccccaatttgtgccaagatagggaaaaggatggtttggagcaggtatttttacacacaggtcagtcatgatgattcagcagggatacgtatagaaagcttcagcgtagtagaaccaaaagttgtgggcaaggagatcatacgtgcttgaagacaagtggtggatttggtgcttgcacacaaggaaaagaatgtttacaagcttgctattgttggaacagggggagttggcaagacaacactagctcagaaaatattcaatgataaaaaattagaagggagatttgaccatcatgcatgggtttgtgtctccaaggagtattctagggattcccttttgagacaagttcttcgtaatatgggaattcattatgagcaagatgaatcagttgggaaccttcaaagcaaaatcaaatcacacattgcagacaagagttttttccttgtgttggatgatgtatggcactataaagcatgggaagatttactaagaactccactaaatgcggcagccacaggaataattctagtaactactcgagatgacactattgctcgtgtaattggggtggaccgcactcatagagttgatttgatgtcagccgatgtaggatgggagctgctttggaggagcatgaacatcaaagaagagaaacaagtgcaaaatctacgggacataggtatcgagattgtccgcaaatgtggtggccttcctcttgcgatcagggctattgccacagtcttagcaagcctgcaagatcaaacagagaatgagtggagacggatattggggaaaaatgcctggtccatgagcaaacttcctcgtgaattaagtggtgctttatatctgagttatgaagtgctgccgcaccagctgaagcaatgttttctttattgtgcacttttccctgaagatgcaaccattttccgtggcgatcttactaggatgtgggtggctgaaggctttatagatgagcaagaaggccaattactagaagacacagcagagaggtattatcatgagctgatccatcggaacttgctccaaccagatggtttatattttgaccacagctgctgcaagatgcatgatctcttaaggcaacttgcttcttatttgtcaagagaagaatgttttgttggagacccagagtcactagggactaatactatgtgcaaagtacggcgtatttcagttgtcactgagaaggacatagtggtgttacctagcatggacaaggatcaatataaagtgaggtgttttacaaacttatctgggaagtcagcaagaattgataattcacttttcgagagacttgtatgtcttcgcattttggatttgtctgactcacttgtacatgacatcccaggtgcgattggaaatttgatttatctgcggttgctcgatcttgacaagacaaatatatgttctctcccagaggccattggctcccttcaaagccttcaaatattgaatttgctggggtgtgaatctttgcgcagacttcctttggcaacaactcaactatgcaatttgaggcggcttggtcttgctggtactccaataaacctggttccaaaagggataggaagactgaaatttctcaatgatttagaaggatttcctatcggtggtggaaatgacaataccaaaatacaagatggatggaatttggaagagttggctcatctttcacagttgaggtgtcttgatatgataaaattggagagagctactccttgcagcagtagagacccatttctactaacagagaaaaagcatctcaatgttctgaatctacactgcactgaacagacagatgaagcatattcagaggaaggcattagcaatgttgagaagatctttgagaagctagcacctccacacaacttagaagttcttgctattgggaatttctttggtcgtaggttccccacctggcttggtactaaccacttgccttctgtgaaatacgtgctcctcatagattgcaaatcttgtgtgcatcttcccccaatcggacagctaccaaacttgaaatacctaaaaattaatggagcaagtgcaatcaccaagattggacccgaatttgttggctgctgggagggtaatctcagatccacagaggcagttgctttccccaagctcgaatggttggtcattggggatatgcccaaccgggaggagcggtcctttgttgaagaagaagaagtgcaggaggaggaagcagctgcagcagccaaggaagggggagaggatggaattgctgcttcgaagcaaaagggggaggaagccccgtctccaactccaaggtcgtcgtggctgctgccttgtttgacgaggttggatctcgtgggctgccccaagctgagggctctcccaccacagcttggacagcaggccaccaacttgaaggacctccttataagagacacaagatacttgaagacggtggaggacctcccgttcctctctggtggcctttcagttgaaggatgtgaaggcctggagagggtctccaaccttccccaagtgagagagctgtttgtaaatggctgccccaatttgaggcatgtcgaggagttgggtggtttggagcagctattgctggatgaaggtatgcaggagatctctcagctgtgggtcccaaggcttcaggagcaacaccgccaactccatggagatgagcatgagctggaggtcaccgagtggcgcctcgcacatagaattagatgacataaggttgctaatctcgaagatttgggcagtgcaggcactttcttatttatttgttatctttacctagttactgatctatggaagatttaagaaatccaaaaaaaaaagaaagaaaaataaaaataaaaaaaaggtaaaactaagaaaaaaaaaaaaaaaaaaaaaaaaaaaa

SEQ ID NO: 25560 - DNA, 105 bp, Oryza sativa
  Clone ID: PAT_MRT4530_30435C.1
atgccgggtgatcaagccgacaacgttgagagcgacaactcagcctttaccgagaacgttctcgataaaagggtgtactcgaccacaacctactcgagtgcttga

SEQ ID NO: 25561 - DNA, 645 bp, Oryza sativa
  unsure (1)..(645): unsure at all n locations
  Clone ID: PAT_MRT4530_30436C.1
tgcgatgctgggccagtggtanttgtgcaaatggatcaaaatggtaacacattggtaacaggtgttgtttgatgcaatgtgtgacttatgtggttagggccaaagtacaatcaagatggtgactatagcacacctgcatncaggggtttttattttggtcccttggatggacaacaatgctgaaagcttgatgatgtcccaattagtggaggggaaagtgtnttttgctgtgcgcgcacctgatgacctgaatgcaatgtgttgaactggtgggactgtggcaatgtgtgttgggctggtcttggaagaccgctggcttggaagacaccagggctgcggccaactgaacctgttttgcttggctcctntgtatctggctcaaatatttgctttatgattcatttgctagcgacaagttttgttggtggttatattaggatactgctggcttgagtctgttaccagtcactggtgggttccttcatggttcctgtgtgccgtggggccctgtttcntctcatgttnggatnggactagtagaagtatttcccccacggtantcctcgtgtcagtttctattatcctnggtgtagacggttaactttcttnaanttaccctcgtttcgtaaaaaaaaaaaaaaaaaa

SEQ ID NO: 25562 - DNA, 804 bp, Oryza sativa
  Clone ID: PAT_MRT4530_30437C.1
atggccgccgccgccgcggcgaacgacacgacgccggcgaaggccgccgggccgcagctgaagctgctggtggacaagcggtcgcggcgcgtgctgtacgcggaggcgcgcaaggacgcggtggacttcctcatcggcctcctccgcgtgcccgcggggctcgccgcgcgcgtcctcgccagccacggcgtcgccgcgccgggctccctcgccacgctctacgccgccgcgcgcgccctcgacgacgccttcttcctcgcgtcgccgccctccccgggcccagaccgccgcgacgcggtgctcgcccccgccgttctcccctccgccgcgcttcccctgctcggcgagcgccccccgccgccgccgccgccgccgccgaagcggtactaccggtgcaacgcgtacgcgatgccgtgccggtcgaacccgctgaacgtgacggacacggcgggcctcgcgtgcccggggtgccggcagccgatgacggtggagatgaagtgggcggccggcggcggcagcaagccggcggaggaggaggaggcggcggccggcggcgagggcgggtacgtgaaggaggtggtgacgtacctggtgatggacgacctgagcatcgagcccatgtccaccatctccgccgtgatgctgctcaagaagttcgacgtcaaggattgctccgccctcgacgagatgaccgtcgacctgggccccaaagagtgtgtgaagctgctgaaggcgtctctggagtcgacgacggcattgacggatgtgttcagcggcggcgtctccattgataggcttgagtga

SEQ ID NO: 25563 - DNA, 2917 bp, Oryza sativa
  Clone ID: PAT_MRT4530_30438C.1
gatcaaatcaactggcacgctcatgaacctaaaggcgagattttggacctgtacaggatttaagcagatcttccaggctaaaaaacaatcaccgtcatcaggagtcaagcctccaaaccccccgagggccaagcttccaaaccctccggggaccaagcatccaaatcctccggggaccaagcaatcatcatatgaagttgggactgataacattgttccagtcactatagacaaattatcaccagaacaaaagctggagtttgtgcaaataatgaagagcgctcaggagaaattcatgaactcattcaaggaaacccgccaaggaacagtcattcaaaagtacaagctgaaggtggttgctgccgatgaacctggaacaagctcatctcaagatggtagaaccaagggagctaaaggtggtgtggatggttcaggtgacaaaggtgcggaacctagagatggtgaggttgaggacattggagaagaggatgctgaggagcaagagcctccaaggtgcaataatttccaagaccaagttgactatgctgtgcaacatgctttgaccaaccaatcaggagtgcttgttaacactttaacaaatatgattaagtctgtggttgatggtacgataactgagcatcaaaacacggggccagtcttcctaccaaatggcgtgttcccacagtacaagaatttggtgataggcaaccaacagcataccgccaatgcaccaccggtccagccgatggcagcagtttcagctctagcaacaggtgcaccgtcgtcggcacaaaggcaggtggttaatcctcatgtcttgaccagagagcaaccacaacatgttggacagaacatcaatcggctgactcaggagcagattgctgcaatgttcgcgccaactcagccgactgtcgagccagtacagtcgacaccaatcaggcagcaggttatccagccgattaggcagcagacggtgcaacagataccaacaggacagagaacacctattgctcagaaaatccacctgtcggagcccagtttgtgcctgaacagcagatgtataatgttcaacaaacccctcaaaactatcttggtgcagcagatgcaaggagtgccccagcagaagccttgggcaggcatgattgcagatgtgatgagggagcagtttgggcttaagccaaaagacactggaaatttgtatcggcacccctatcctgagtggtttgaaagagttttgctgcccaaccgatacaaggttccggacttctcgaagttttcaggacaagacaatatttcaacctatgagcatgtcagccgattcttagctcagtgtggagaggcattggctgttgatgctttgaggagtttgatcgctccgatcaaggagaagttttcgtcccaagacttcgagagcttgtcccatcttgcactaaaggtgaccttgcatgagcaaaggtttgtagaggctaagaagaatttcaagaaggtcaatcatgtgtatccttatatgtatgactctgaagaagaagatgactccaaggtagcagcagccgaatgggccagaagcaaaaagattatagcgtgcccatgggtgaagagttctgggaaggaagaaagatatgatttcgatatcaccaaggctgataagattttcgatttgctacttcgggagaggcagattcaacttcctgctagtcatgtgattccatcggctgaggagttggggaaaaggaaatattgcaagtggcataactctagttctcatgctaccaatgattgcaaagttttcagacaacagatccagctggctatcgagggaggcaaaattaagtttgttgactccaaaaagccgatgaaggtcaatggtaatccttttcctatcaacatggtgcatatatctgggagaacagccgatgagggcaaacatcggagttcacagctgaattcagttagaattatcaacaaatatcaaaggaggcatgacaagcagcaggagagagacaatgcggggagttcaagccgatcctacaatagaggcaatcggctgggtcagaaaagagtcctgttcatcagagatgaagatgagggtagaaaaacgcaatggtgtccttctggtattttcaccaaaaatcagaagaaaagggttcaaaggatgaggaacagagagcgttttctggaggtacaacaggagatcaatcatcggctgaagaagaccaagcaggaatggcgcgtcaaaagtaaagttacaacagccgatgaatttgaagccgacaaggcgaagagattgaccaagagcaaagctgttgcatccacgtcggtaaacatggtttttatgttacctgcagaattcgaagctaaacaagccaatgttgatgatgtagaagaggcctctgctaggttgattttgtcgccagagcaagcaatctttgagaagccagaagggacagagaatcggcaccttaagccattatatgtcaatgggtttgtcaatgggaagccgatgtccaagatgatggtcgatggtggggctgttgtgaatttgatgccatacgctacattcgggaagctgggcaagaatatagatgatctcatcaagacaaacctgattctcaaggattttggtggtaatccatcggagaccaagggagttttaaatgtggagttgacaatcggcagcaaaactgttcctacaacgttttttgtcatcgatgggaagggatcctacagcctgttgcttggaagggattggattcatgcgaattgttgtattccttcaaccatgcaccagtgcttgattcaatggcaaggtgacaagattgagatcggctcgaagataaatgatacgtcatcggcaactagccgatcggctatcatttatggatttaaccacggtttctcttgtctttattcttgttga

SEQ ID NO: 25564 - DNA, 4689 bp, Oryza sativa
  Clone ID: PAT_MRT4530_30439C.1
atgaagagcgctcaggagcaattcatgaactcattcaatgaaatccgccagggaacagtcattcagaagtataaggtgaaggtggttgctgccgatgaacctggaacaagctcatcccaaggtgataacaccaaggggacaaaaagtgctgcggatggctcaggtaataaaggtgagggacttcaagatggtacagtcgaggatgttgatgaagatgatgatgaggagcaagaggagcctttgaggtgcaacaatttccaagaccaggttgactatgctgttcaacatgccttgatcaaccaatcaggggtgcttgtcaatactttaacaaatatgattaaatctgtggttgatggcacgatagctgagcatcaaaacacttggccagtctttctaccaggtggcgtcttcccaccatacaggaatttgcctcctcagaattatcttggtggtaatttcaatctccagtatccacctcagtcacctcagatccaatatcaaatagggggatcacctcagccccagtttgttccccagctcaatcagtttgatccgatacagcagcagatgcaaggagtaccccagcagaagccttgggcagacatgattgcagatgtgatgagggagcagtttgggcttaagccaaaagacactggaaatttgtatcggcatccttatcctgagtggtttgaaaggattccactgcctaaccgatacaaggtcccagatttctcaaaattttcaggacaagacaatgtttcaacttataagcatgtcagccgatttttggctcaatgtagagaggcatcggctgatgatgctttaagggttagattgttccctttgtccttgtctggatcggcatttacgtggttttcttcgctaccttataattctgttaatagttgggccgatttggagaaacagtttcatagctacttttacagtggaattcatgagatgaagctttctgacttgacagcaattagacaaaggcatgatgaaactgtacaagattacattcaaagattcagagagatgaggaataggtgctacagtttggctttgaccgattctcagttagccgatctggcttttcagggtttgatagctccgatcaaggagaagttttcgtcccaagactttgagagcttgtcccatcttgcacaaaaggtgaccctgcatgagcaaaggttcgcggaggctaagaagaatttcaagaaggtcaatcatgtgtatccttatatgtatgactctgaagaagaagatgactccgaggttttcatacagcagatccaattggctattgaggggggcaaaattaagtttgatgactccaagaagcagattaacatggtgcacacgtctggaagagcagccgatggaaacaattatcggaatccacagttcaagtcaactaaaatcattaacaaatatttgaagagacatgagaagcaggagcagaggtattatgaagataacgatggtttcgaccctcattgggattgtgagtttttcaggttctgctggaacgaggggatgagactgccatcaattgaagattgccccggatgcagtgataatgcggggagtacaagccgatcctacagtagaggcaatcagctgggtcaaaaagggtgcatgttcatcagagaagagaagggttcaacggatgaggaacagggaggttttcaggaggtgcaacaggagatcaaccattggctgaaaaagaccaagaaagaatggcgcgtcaaaagtaaagttacaacagccgatgaagttgaagtcgacaaggcgaagagattactcaagggcaaggctactgcatccacatcggttgatttggcgccggagcaagcaatctttgagaagccagaagggacagagaatcggcaccttaagccattatatgtcaatgggtttgtcaatgggaagccgatgtccaagatgatggtcgatggtggggctactgtgaatttgatgtcgtacgctacatttaggaaaccgggcaagaatacagatgatctcatcaagacaaacatgattctcaaggattttggtgataggaagggatcctacagcctattgcttggaagggattggattcgtacaaattgttgcattccttcaactatgcaacagtgcttgattcaatggcaaggtgacaagattgagatcgtgccagccgacagcgaattgaagatgaagagcccaaattattactttgagggcgtcgtggagggttcaaatttctacaccaaggacacggtagatgatctcgatgacaagcaaggacagatgtcaggactcagccgatcgattgttgaacatcggctgcctattaagccaggatttaaaccacatcagcaacctccaaggaggtgtaaagccaatatgtatgacgctatcaaggctgaggttactcgcttatatgatgctagtttcattagaccgtgccgatatgctgagtggatttctaatatagccccggtcatcaagaagaacggcaagcttagggctacccctaaggatgggtacccaatgccgattgccgatcaattggttgatgctgcttcaggacataagattattagttttatggatggcaatgcaggttacaatcaaatttttatggcagaagaagatattcataagactactttcaggtgtcctggtgcaatcggtttatttgaatgggttgtgatgacttttggcttgaagagtgctggggctacatatcagagggccatgaattatatattccatgatttgatcggcttgttggttgaagtttacattgatgatgtggttgttaagtcaaaagaggtagaggaccacatatccgatttgaggaaagtttttgagagaacaaggaaatatggcctgaagatgaatcccacaaagtgcgcttttggtgtatcggctggtctgtttttgggttttcttgtttatgagagggggattgaagtaactcagaggagtattgatgccatcaagaaaattcaacctccagaggacaagaaacagttacagaagttgatccgcaaggtaaattttattagaaggtttatttctaacttatctgggagattggaactttttacacctttgctaagtttgaaagccgatcaagaatttacttggggggcagagcagcagaaagctttggacaatattaaggcatatttaagttcccctctggtgttaattccaccacaaaagggagtacctttcagattgaatttgtcagctggcgagaagtcaatcggctcagttttgatccaggaactcgaaggcaaggagagatctattttctatttaagccgtcggctcttggatgcagagacaaggtattctcccatggaaaagttatgcttgtgtttgtatttctcttgcaccaagttaaggcattatttgttataccgtggtatgcaaagccaatgtgatcaaatatatgttgatggctccggttctcaaagaaagagttggaaagtgacagaatttgaccttagatatgaatcacccaaggcaatcaaggggcaggctatagccgattttattgtggaacatcgtgatgattcaatcggctcggttgacattgttccttggactttgttcttcaatggatcagtttgtactcatggctgtagtattagcttggttaaaatttcccctcggtgggcaagttttgagtttgtctatactatcaaaccttatacaactaacaatcaggctaagtacgaagcagttctcaaggggttgcagttgcttaaggaggttgaagccgatgctgtggagatcatggggaattctttgttagtgatcagtcaattggtaggggaatacgaatgcaagaatgatgtattgatgatctacaatgagaagtgccgggaattgatgaatagttttcggctgaacgttgaagctaatgacctggctctgggggcatcaggatacaagccgatgatgaaggatattaagatagaggcggctgcaatcatggccaatgattggaggtatgatgtttttcaatatttacagaatccatctcaatcggcttcacgaaagttgcgttataaggccttgaagtatacattgttggatgatgagttttattattggacgattgatggggtattgtttaagtgtttgagtgccgatcaagctaaggttgtgatgggtgaagtacatgaagaaactacaatcggctcaaggagaatagatctacaggatgatttaccagcttataagcttgtttatggacatgaggcagttttaccatgggaaactacaatcggctcaaggagaatagatctacaggatgatttaccagccgatgagtattataatcttatggtagatgagacagaagctctagtccaatccagactgagagcccttacaaaggtgactaaagataaagaacgagttgctcggcattataacaaaaaagtggtgcccaagtctttttctgaaggggagctagtttggaagctgattttgccgataggaactcgcaataataaattcggcaagtggtcaccgaattgggaaggaacgtttcaaatatacaaagttgtgtccaaaggggcttatatgttacaaggacttgatggtgaagtttatggacgagcatttaatggaaaatacttgaagaaatattatccaagtgtttggatcaattcatga

SEQ ID NO: 25565 - DNA, 1140 bp, Oryza sativa
  Clone ID: PAT_MRT4530_3043C.1
atgagtagagtgcccactagttggggttttgtttattctagggtgaacaaggaaataaggaggggcgcgcggaccgggtccacgggagtggggcccacgcggcagcctcacggtccacggtggaccgggtgcacgcggcttgcgccggccggcgccgtgggtcccacgcgtcagccgcacccgagggcgcgggcggctgacggccgggccccacatggcagccgcggggcgcgcccgaaggcggccacgccggcacagccgacgggaggcggcgcacccgcgccctgatggtcgccgccggcgaccaccggcgcggcggagcggcgcccgagagaggggagggaagggggaagtgaaacggcggtccacggctcaccccgggtcgacggcgacgacgggaacggcgaccggagcggaggaaggtggcggcgcggctcgggtagacgggggcggcggcgctccggcggtcggcgaccgaaacggagaggtggacgaggtcggcgaggatgcggcgaagccgaaggagccggccccgaggtgggaggcggtccggggtgacgacggcggcggaccggagctcggcggcgacggcgagagagagagcgacatcgcgagctcaaatccggcgaggaggaagggcggcgagaggcggaaccggacggaggaggtgcggggagggtttaaatagagccggggcgagagagggtggccggggaagggaggaaaccggcgcgggaggtcggccgccatcaatggcgccggcgagatttgcgggggcaaatccgcccgtttgaacgcgggagagagagggagaaatggggggaaagagagaggggatcacggggaatatttccccccgctttattgcacgcggggacgacgggaggcggcgggattcgcggcggcggcggcgctagggcgcgggcggcgggaacggcgggaggatagggatgacaggtgggccccacccgtcagcgagggtggcgggcggggccacccgtcagcggcacgcgcacggggaggaggccggatgggccgcgggggagaggagagagggaaggaggtgggccgagccggcccaagaggggaagggggggggaaaaaggactttttagggtttttctttttataaaatcattt

SEQ ID NO: 25566 - DNA, 262 bp, Oryza sativa
  Clone ID: PAT_MRT4530_30440C.1
aaaacaaactggtgtttatcatagtaaattttcccggagaatcagatgctcagaattcataggggccttcagcattttacaacttccaagatggggcaaaattacaagcgcaacttttttaaagtaagctgttgggggaaacgggaccttttctaacaccgggaaaaattttggtttttggagggaaccctttgtaccccttaactggggaataaacccgggcgggttgtttcccgccctctcttaattgaaccgggccttt

SEQ ID NO: 25567 - DNA, 540 bp, Oryza sativa
  Clone ID: PAT_MRT4530_30441C.1
atgacgagtgattgtgacaagaccctttgcataactccccttagccaaacgaatcacactgcaggttttgcccctactcttaaaataggggtaggcagccccctcttgtgttgcggtgaatctgaaagccaatcaacacttaaaacctgggctgacccaactccatcacgcttaccctcgcctaggaaagtcggaaagggaagtgctatactacaggtccagaagttaccctttcttgcttggggtaagcacgccgaagggggagccggtgtgacatgtgggtcccacacgtgggtgactcaaggaggggcgggtgcacggtggagcgggtccacatgcgcactgttcacgggcgcaccatgtggcacacacgttgcggccacagcgaacaagcaggcggaggagaaggaggaaggggggggagggctctcactctgccctctcaacggcgagaaggcaacgggaaggcggccgacggcgaggaacagcagcagcgggctcctcaggaaggaagccggacagtgctcctgtggtggttag

SEQ ID NO: 25568 - DNA, 222 bp, Oryza sativa
  Clone ID: PAT_MRT4530_30442C.1
atgaggacactatgtctgccctacaaagcaaggcgtgctaggctcctgacaatgcttgacaccatcacggaggatgacagagaggccatggaatcaccaagggctcctcctcgcagaacaagctacgacaaggaatttggtggcacctcggtgcactgcactaacaaggaggtcctcctcgccccaatggtgaaagtagggtatttgaagatcaaggcctag

SEQ ID NO: 25569 - DNA, 972 bp, Oryza sativa
  Clone ID: PAT_MRT4530_30443C.1
atggttgcaaccatcgcacctgatatttccaagactgcttcaaacttcagcagctgggaagacactgcaatcttggagacgattagaggccgcctgggacttgcgaggtcatctatagtgcgtctactgaatgtgcttgatctagaaggctgcaccggctttgaagaagagacggacctcaggaccatttgcaccgaggccactcacctcaagtatttgagcctccggaacacgggcgtcacccagctgcccaagcacatacaaaatctccagcaacttgagacgctggacgtccggggaaccaatgtgagcaagttggacgtggtgctcccgatgctgaaggagctgcattctggccaatcggaatggtccctctaccgctcccgccgtcgccgtgagcgagctgacgaggtgatgtgcatcggtcggatgctaaagctgaccaagctgggaatagttgtgaccgggaaagaagcctcttacctgatgaagctgcttcaaaccctcagcatcagcggacttcatcagcttgtcaagatcaccctgcgcgagacttacctgacaggggacgctctttacgtcctgggcaacctacgtagcctacggtgtctcagattcctgcccaaagcattagcagaagggatcatcaaattcagcgccggcgaattcagcaatctcgtccatcttttcttccaagaagactacatcatctcagtcatatttgatcacgaaactgctcctaggctggagacagttgttttcgacgtcaagataataacttccctccatggcatccgcaacctcccaagcctgaaagatctccagattaaaggcgaactgagaggagagcaagccgtccaacaagcaattgcagatcatccaaacagtcctgattacgagagcaaaatccaaggaaaggataggtacaggtactcaccaggccttttcgtcctttgctgcatctgctgctga

SEQ ID NO: 25570 - DNA, 180 bp, Oryza sativa
  Clone ID: PAT_MRT4530_30444C.1
ctaaatttggtgatgcatgcttgcgagcaatgcgtggtgatgctggcgttgtggaatgttcatatgttgcatctgcggcgaccgagttgccgttctttgcaacaaacgtgaggttaggtcgcgctggagccgaataggcatctcctctggggccgctgaattgcttttcagagagctgcc

SEQ ID NO: 25571 - DNA, 358 bp, Oryza sativa
  Clone ID: PAT_MRT4530_30445C.1
atgcagctccttcagcatcgggagcaccacgtccaacttgctcacattggttccccggacgtccagcgtctcaagttgctggagattttgtatgtgcttgggcagctgggtgacgcccgtgttccggaggctcaaatacttgaggtgagtggcctcggtgcaaatggtcctgagggagacagctctcttcaagaaaaacttgaccaggtattctcggtggcgctcaggaagggtagctcggagggaacgtcgtggaggacaagcaagaacctcgcaagtcccaggcggcctctaatcgtctccaagattgcagtgtcttcccagctgctgaagtttgaagcagtcttggaaatatcag

SEQ ID NO: 25572 - DNA, 282 bp, Oryza sativa
  Clone ID: PAT_MRT4530_30446C.1
atggccttcctcctcctctccctcctcgactccaagactatcgtctccgacgtcgactgttgggcagttatgacggttgtagccatgggaaatgtccattttgcccctgcaaccgacattgagagagcatctggagcgtacacgtggagggccaagctggttgggcaccgccaggtttcgggaaaggccctggacaccgacaggaaggtggatgcggccggtatcgacatagatggtgaccttgaagggatcagtacctcaggtatcgtgcctgatacctag

SEQ ID NO: 25573 - DNA, 847 bp, Oryza sativa
  Clone ID: PAT_MRT4530_30447C.1
ttaaaatccgcaagcgcatggatataccgatgtatcacttcccctacggagtattccaagggcactggcaacccgctgttcccagatgtcgctctactacgtaccccgacagggaggacttaatgagggagtgaagcctttatatagaggtaggtatgacggctgtgagaaggggaaatgtccgaactgccccgcaaccgtcattgggagagcatctggagcgtccacgccaaaccccaggatcaacggtgatcaggggggttcggccgaaccagggtgttcggccgaacttgggctgggccctgctggcctggccttcgatgttggcggtatagaatcgacatttaacagccgccaacaggtgccagatctagggcttccattgacaatcgacgtggtgatgcagacaccatgctactcgtcgttgttgagcttagatttcagggttggcacctgtggtatcgtggttgatacctacatgtatcagccctggtactcgagaatccgcccctgcttcgggtaccggatgatacctgtaggtaccaaacgataccccataggtaccaagtacaaggctcaccatgctgctgtgggaaccaactttggccactatgcgccaccgtatgtgctgtcaccttctgctagcacctcacgtgtgctcctccaccggctggggctgctagctgacaaaggagaagcaggccgatgcctatgtgacaacaaggacccaccaccaactccatcgaggatcaagccagccaagacgggtgtgcggcaggcccagtggcccattgtgccattcttcggcgaggttcggcatcaggcgaaacctggatcctccagctaa

SEQ ID NO: 25574 - DNA, 984 bp, Oryza sativa
  Clone ID: PAT_MRT4530_30448C.1
ccaaacaacggtcttgctttcgtattcgttacgcgtaaaattttcgagttcgacttctaaacagttttagttcgtaccactagtacagaaaagatttttccatacaggcattttgatttctctgggcggttatccggcaccctgtagccggctgtctgcgaaaattaatattttcgcgtgcgggggggtcgaccgcacgggataatcgattatcccatacggttgtgttatactgcccgcacggaccaaaaaaaccaaaaataaaaaacaaaaggaaaaatcgctcgagcgccaccgcctcgctccaaaaaaaccaaaaataaaaaaaggaaaaatcgctcgagcgccaccgcctcgccgctccccgccgcgcccggccaccccggcgttgccggccgagttgccgtcgtcctcctccgcttcgccttcctcctcgaccaccgtgactagcttggcaccgagcgtggccatgccggacaggaaagacgccaccgacaggaaagacgccaccgagccggtggagcgtctgatggtggtggtggccgcggcttggtggagaacgtagttggcgacgagcggggtgggagcgttgaggagccccaggccgccgccgcgcccggccgccgccgcctcggcctggccgccgatgtcagctgcatattctcttttctcttctcttctttggagaggcgggcagatgcgggtgcggcgaccggcggcggtgcgggcgtggcggggcgtgggaaagaagcaggagaagaggagaggaggcgggcccggagcgggcgcggtaggcggcgagcggcgcggagcgaggtcggcgaacatgttgccgttgaggaatatctcagccaaggtgttgcagttggtcaggttgtccaagaactcccaggcgccgccatcatcggtcggcgtacggctccgacgagatggacgccccgctcctgtgaagcctcccctccctggggcgggggctcctctcat

SEQ ID NO: 25575 - DNA, 426 bp, Oryza sativa
  unsure (1)..(426): unsure at all n locations
  Clone ID: PAT_MRT4530_30449C.1
ggnaaagggggagaaacngttcntcctnanaaaaaagatggntcgacgcactctctgacccnccacgaagatcaggaacatctgggctctcccnnntgggtcnnggggggnacaggtctcttggttcaaaaantggcaaacccgcctcaaccgccaaaccnaagcntgttttggagatngatcancgttccatctgcttcnntcacgggaaggggtcngncncaatctntcnggataataattgcnnctcctacnctagcaagggcccatcgatnnagtnttttttgganagaaganatatatnatttcnatccccggccaattcntnttnnncnacnnngnggggggggtgtttnctganaaaactttccccngtncctccncnnnttttgtttgcgancctttatcannnttccnaagaaaatt

SEQ ID NO: 25576 - DNA, 251 bp, Oryza sativa
  unsure (1)..(251): unsure at all n locations
  Clone ID: PAT_MRT4530_3044C.1
atagacggcccatcaatactactacgagagtatagatcagatctaactagctctggctagctgacaaaaaccaaccccaagtcgcagtacctgaaatgaaacggggagtctgggattttgtcccctgtttgattgactcattttggatatgatgttttatctttacatttttttcaataaacttgtacttgtgtgtcttatgacataaagccagatatataatntattttcattaaaaaaaaaaaaaaaaa

SEQ ID NO: 25577 - DNA, 1959 bp, Oryza sativa
  Clone ID: PAT_MRT4530_30450C.1
cttttttttttttttttttttgaatcaccaaattattagctttctcagttaataaatcactggagaacagtcaaatgaattctgcgaaaattatccgatgcacatacagaatacctgttatagagagagctatgggtcaaaaagaaataaagataacattcaattacaaagcaaaatcagaataaataagctaaatgctaaaataacaatttgccttttgtggcttgggtgtttctgagttaacacatcatcagtaacatacaacagaacggcgtcccaggctaaacttggggatggtcagctccatccaggggcatgccctcagggcgtcaaataagaagcatccatgatgtttctggcctgcctggaagttctattcgcaggccagcttggtgtcgaaactactcagggagatagcaaatgcctggaaggctgagagcgggtagtggtaatccatggtgaacatgtccttggcaaccttcccgaattgcagtatgaccttatcatgctctggtgggggtggtggaacaggctgtgatggagttggggctcccgcagcaggctgcgtggctgcgatgagctggaagttcttgacagaagcaacagttacccggccccggaagtttaagcaccagcactgtagctgctcatgccatcttggagccttgttttggagaatcaaaggtgtctccttgcactcctcatcatcgctcaatacccggcccccaatccttgggccatctccaattgagatgtcagagaactgagcactgctgaaatgcatggaatggtccataacggacgatttcgaaaaggagacactcctaaaggaggattcattgagggaatgggcaaggatgctatccggctggctaggaacagtcccaccagcctcaagagatgaggcagggatggagtgcattaaacagcacatccgcctaggaccccgagttccaaagacgtttagctcatatgagatgtttgctatgctatatgtgctgcagggatgctttgctgttcccttgttggagaatcttcggcttgttttccctgactgtgaatcactagttgcattgtacggagtgtgggtatcatatattacaaactttgtgccaaggaagtttgacctcaattttccaatgtttgtgttggtagacctagataaattgttagcattcatagatatcacatattctgtacatgttgcatgccagtttctttttgctgatagaaggaatttgccattgtcaacaagcacagcagagccaagagagaggtacaaatagtaggtctgcgtagacttatccctcctaatgaaacactgcatagttccatctcgtggcccaggctgcctcagagaaatagggaaggtgatcttcccacacaactctggattcttgacgatctctttacacatctccctccatgttctgcagacacccgcacaagcaaccacatgcttcctagaaggccatgtagcctcactttcttccaacctctcaatgatatcacgaagcaattccggaggcaagctagcccagcagctgctctggattacaggcaccgggtcatgcaactcatggacagcaccatgagacttccccctgcgatgccccagaatcctgacctcaaatcccctcctcgataggctcccaaatccatccctcacatcgcgcacgatgctgcgaaacgacatctactctctgaaaaaattgagatctctcctcagctaccaaaagggatctatacttttcgccaatgataacatcccagagtaattccagaccaactcaaattctcctcattattgttgaccccgcaaaaagaacctgcagcacaaatgaattgaattggtcaagattaatcttcgattattctttcttgaaaaagatgggagactagacgacggtgccgcgcacgatggcgacgttgcccctgccctgcgggaatgcaggtcac

SEQ ID NO: 25578 - DNA, 264 bp, Oryza sativa
  Clone ID: PAT_MRT4530_30451C.1
atggcaaggcaaataggcaacgtggtgttggtggcttgtcttgctgctatctgctccgatcatcacctgatcacctcctcttcacatgcagataagcaagagcagatcgatcatcgatcgactgcatgctcgtcttgcagttgcatgcggtcacggactcacagcagccggcgggccggcagcgatgggggtgacgacggcgcgaggcagccgttgcaacggagaggcaaggcggcggcgagccgggttcatctagactgctag

SEQ ID NO: 25579 - DNA, 274 bp, Oryza sativa
  Clone ID: PAT_MRT4530_30452C.1
ttagagggatatgacatattctagtgctacgaactgggatagagatgtgtcacattctttcaaaattctataaagtctatcaccggtctctaacttgtaccgctgtgtcatcctggtccctaaactcgcaaatcgatcgtttaggtcctcaaacttgttcgactgtgttatcccggtccctaaacttacagaactctcgttcaggtcctccaacttgttcagttgtgtcaccccggtccctaaacaggacggtctaaaatctttatatcaaaaa

SEQ ID NO: 25580 - DNA, 393 bp, Oryza sativa
  Clone ID: PAT_MRT4530_30453C.1
ctgtggggcggggtgtggttttttaatttttttttttggggtttttttttttttaaagggagaaaatattttactgcccgaatacgggtataatggactttgtttttacaattgatcgggccctcttcgttccaaacacatatacccccggtccccgttgaagacggcgatccatattttttttcatcccctcccacccaaccctttcataaattgggggggggccgccctgggctgaccctttgtgttggctgccggcgacaaacgttgacaaaggacctgtcgaggatccccttccaggggccccctcccccctggcataatcttctcatgttcttttctagttcccctcgggatgggcctccccctgcaagagtgccccctggaaatgct

SEQ ID NO: 25581 - DNA, 436 bp, Oryza sativa
  unsure (1)..(436): unsure at all n locations
  Clone ID: PAT_MRT4530_30454C.1
ggaggatgcccacacatatttttttttatttatttacactcctaagtggaaaagaatgccacagacacggtattaaaaagggcgggggttccataggaaatattttatttacggggggggggaggggcttccctcgtttttnctcggggtttaaaggggaaaaaaagcaggcggaaggctggctcatcacttttttccagaatcgggccaggggaggggctcgctcgctcctccctctggggattttttggcggcaatgcctcaatcgggcggctgctggggctcggtctccggtgttcgccgtncctggtcggtcgctggcggtttgtgcgggggcttgggctttttcgggggggcttcagggtttggctccggcttagggttaggtttcgggtccggctttggctctgggtttggttttggctccggtttgggg

SEQ ID NO: 25582 - DNA, 915 bp, Oryza sativa
  unsure (1)..(915): unsure at all n locations
  Clone ID: PAT_MRT4530_30455C.1
tttgtttgaatcttccactaacaagataatcattataatcatcattataatcaaagagttaggcggaacacggtaacgagaatttggcctcatcagggtgacgccagacatgcgtaggagtacaatacaactcaactgtacacaagtctctgtcaaggtcctgcagagaattgttgtttgtactataaaacggccgcccgtggccaattgggaagaaagaacaggcaaaggattttgttctcatctgaacatataaaatgatctgttcatcctgggtcaagtcatttcgtcacgcgctaacatatgaaatgaatccacgatgcagacagcaaggacagaaaaaattgcaacaccaattttgctgcagattacggtattccgttcgtgttcagcaaaatttctgaagacgtatcgttgctgcgacgtgcatgggttttggattcagagaatagatcagcataaaaaaaaagagaggaaaaattatggttacaaacttctctatctgagtctgaccgactgtcggttcactgaccagctgattgatcaacggccatcgccgctgctgagctgcgagaaggccttgctgttggcgatccccgagtcggtcacgctgtcatccatgaggaagctcgtggacgacgtgcacccaagcgctgggaccgaccacgtcggcggggaactgcgtggctgacgtgcgccgttatacctacgaacgcgtccctgttgacgtgcgtctacctgcagctgcnggcagtactcgaggttaccacagangttcgcccatggacgggcggtaccaagccgtataccgccaggcactatactctgcgggctcggcgaacttgcgccagacgagatagcccggatcaccatgncncggngaaacacatcngcggatcgaggaaactagggnga

SEQ ID NO: 25583 - DNA, 876 bp, Oryza sativa
  Clone ID: PAT_MRT4530_30456C.1
acctaagctaccacgacggagcccatcgtgagacatcggcaccaggcatgccatagaagcgacacggcaactcacatgtgttattgttaccgagcttgtcactagcgacacgacagttccaacttcaccttaaggaagcctcaacgccaaaaaaaaaaacaaaacaggttggactactcacaaaggacagcagcacaagctaccaaggagccgcttcctacacacggctagcactaacaacccaagatagagattgtagtgagtcatcgttgccaagcttcattgcaacccaacaacaaagcagctccgactttacccagcaaaaactaaaaagaaatgatggttactcgccagtttcggagccgttgcaggaatccattaatgaccatcattgcacgcggttggtgttggaagagagtggtcagcatcataatgatgcctccaaggagaggaacgacgcctaatggcgtcgccgtcgtcaagccggcccaaggcccaagcaaggctttcgccaacgattcccaatcaaaaccccacacaaccatcttgtacaatgaccatcgccggaccaccacaccacgcagccgccgcccgttgaggccgaaccacgcgcgacggcacgagtgcctcagtctccctctatcgccgcgtcgcttccgcctccgttcatcgaggggctgccaccacctccacctccgcttacgccagatccggtgcaccctctctgcttgcatggaggccggctcctcgcgcgcgccgacagtcactgatgccctctctgaggctgccccgcaggcttttcctgtgccgcagcggctgccactgttgtggagggtcctgagcaggagagggaaggccccgccgctgttgtccttg

SEQ ID NO: 25584 - DNA, 249 bp, Oryza sativa
  Clone ID: PAT_MRT4530_30457C.1
atgggattggccgatgaagttacatccaatccggaaggcgttgatggtgttggaccagaaataggtggctgcagacatcaggggttcgtccttagcagaattggctatggttggacagatgctacagacgcaaatgagggtagagaagaagaaagagatctagccgatgggtacttacctctgcgtattcggacaatggcgcggcggatggattggcggaagtcgacattgccacgggcggagatctaa

SEQ ID NO: 25585 - DNA, 1207 bp, Oryza sativa
  Clone ID: PAT_MRT4530_30458C.1
ccacgcgtccgccgtccgccatcgataaattaattttcagaattgatccggcagctcgatcgccatgttgcggtgcgacggcgaccgcgtggtcatcgtcggcggcggcatcgccggcgccctcctcgccaagacgctccagaaccacgccgacgtcgtgctcatcgacccgaaggagtacttcgagatcccgtgggcgaacctgcgcgcgaagatggatccggcggcggtggcgcgcacggtgatcccgcactcggagtacctgacgcaggcgaaggtggtgacggcggcggcggtcggcgtggacgactccgtggtgctcacctccgccggcggcgccgtcggctacgacttcctcgtcgtcgccacgggccgcgagtgcagccgcccccagaagcgggaggaccggctgcagatgttcgagcacgacaaggcgcggatcgcatcggcggggtccgtccttgtcgtcggcggcgggcccatcggcgtggagctcgcggcggagatcgtcatggcgagccccgagaagcgcgtcaccctcgtccacggcgggcctcgcctgctcatggtgatgggcgagaaggcgtccgccaaggccctcgagtggctccgctccaagaacgtcaccgtcctgctcgaccagaccgtcgacctcgcagccgccgccgccggcgccaacacggacgacaaggtgttcacgacgtccgccggcgagacggtcgccgccgactgccacttcgtgtgcacgggtcgccccgtggcgtccgggtggctgcgggagtcgttcctcggcgagcacgtcggcggggacgggaaggtggcggtggacgagcacctgcgggtgggcgggctgaggaacgtgttcgccatcggcgacatcacggacgtgccggaggcgaagcaggggtacctggcgcagcggcacgccatggtggtgtcgcgcaacctgcggctgctggtgaaggccggcggcggcgacggcggcggcagcagcaaggagcggaagctgcaccggtacaaggcgtccaaggcggccatcaccgtcacgctcggccgccgcgacgcgctcgccgagctgccgttcatgacggtgatcggccacctccccggcgtgatcaagccccgggattacttcatcgcgcggacgcgaaggatgatggggctcaggacgggcgcgcgctatgatcaatccatgtttcgcatctga

SEQ ID NO: 25586 - DNA, 456 bp, Oryza sativa
  Clone ID: PAT_MRT4530_30459C.1
caagaatcatccgggagagcgacatggccccggttgccgtgggcgacaccctccccgacggccagctggggtggttcgacggggaggacaagctgcagcaggtctccgtccacggcctcgccgccggcaagaaggtcgtcctcttcggcgtccccggtgccttcaccccgacctgcaggtctcttcctccttttttcgatttcctctcccccctctttcttggagacgttatatttccctgaaaaaaaaattccttaaaaaatgggacttctttttatcagatcgagaaattttactgcaaaactgaaatgtgtactagctgatgtccggaccaaatccaagattactgctttattatacagatactcacaatttatgggattgatttgacgagctctgaagtcactcccacttccttgggtgtcagagttagggttaaaaatcttgatgtgggtt

SEQ ID NO: 25587 - DNA, 562 bp, Oryza sativa
  Clone ID: PAT_MRT4530_3045C.1
ccccccccccttttttttttttttttttttttttttttttttcaatggttttcttcgtgtcaaaatctattattgaatctcatcgattattcatagaaaaacttcgaattcttctgtttttaagattaaagtcaaatgttggttatttatgtgtgcacaaaatatttatataacaagaaataaaagagagcaaaaaaaaagaagaaaaaaccaatacacgaaagaagaaaaaaaatggttccgattacctaacaaacagagaattgggctaatctagtaatctccatttttggtttagttggtattcataaatataaaataattttgacgaaattaatcaaattcgaaaaagaaaacgaaaaaccaagaaaatcgtattttccaagaaaaatgaaaatacgatcgactctatactgtgaaaagagacaaaaaaacgaaatcaaagatctgatggttatacaggagatggagaactatcatgatcattatggtgactaccgtgagtgaaaccttcgctttcatcatatttagatagataagtacgtcgcttatcgtcacgccc

SEQ ID NO: 25588 - DNA, 1155 bp, Oryza sativa
  Clone ID: PAT_MRT4530_30460C.1
atggacgccaagaagccatatgtcatcgtcatcgtcatacagctgatcaacacaggcctgtttgttatctccaaggcagccttcaaccatgggatgaacaccttcgtcttcatcttctaccgccaggcagctgcctctctcttgctgctgcctctcgccatcgttcttgagaggagaaatgcaccaccgatgtcgctccggttgttcactaagcttttcttgtatgctctgcttgggaacacactgagcttaaacatgtacaacctgggcctcaagtacacctccccgacggtggcctcggcgacaaccaattcgattcccgtggtgaccttcttctttgcactcctattaaggcgagctcaatcaatcatccatctctgggtggaagtgatccggctgaagagcttgtcgggcgcggcgaagatggccggcgtggtgctgtgcgtgggcggcgtgctggcgatcgcgctgtacgccgggccggcgataagccccgtgaaccaccatcgcgcgttcggcggcggcggcggcggcggccatgaatcagcatcggcgacgacgaggacgaggtgggtgaaaggcacgttgctgatgctgctgtcgaacgcgacgtggtcgctctggaccgtgctgatggcgtcgctgctcagggagtaccccagcaagctgctggccacggcggcgcagtgcgcgctcagcgcggcgcagtcgctcgcgctggcggcggcggcggcggggcgcgacccggccgcgtggaggctgcggcccgacgccggcctcctcgccgtcgcctactccgccgtcgccgtcacgggcgcctccctgtacatgcaggcgtggtgcatcgagaagaagggacccgtgttcctggccatgtccaacccgctcagcttcgtcttcaccatcttctgcgcgctcttcgtcctcggcgaggtcgtccacctcggcagcgtcgtcggcggggtcctcatggtggttggcctctacagcgtgctgtggggcaagagcaaggagcacgacacgctcacgctcgccaccgccatgcccacgcccgcctccgtgcaacagcaagaaaagaaggtcgctgcagtaccagctcctgcagacagcagcagcagtgacagcgaacaggagagattggcctcgatcgcctga

SEQ ID NO: 25589 - DNA, 1730 bp, Oryza sativa
  Clone ID: PAT_MRT4530_30461C.1
atggcttccaacgccgaccagcacgcggcggcgaacggtggtggggggacgacgccggctgcgaccggtagcccccctgccgggaagaaggcggcggccgctgcagcgtggaagaggccggggaacggggcggcggtgccggtcgtggtggcgcctgggagccccatcatggacgccgactcatggccggcgctgcccgggctggcgtctccgccgccgacgacgctgacgccgacgccgatgccgcccaaggcatcgcccaaggtggctcctctaccgccacccgctaggggcaatggtggaggtggaggtggaggtcgccgtggacaggagcaccatggtggttttgatgggcaacgccgtggcggtggccgcagggacggccatgggcctggacaccagcagcgcggccaccatccatcttacataagggctcctctggctgttgtgactgcggcgcctcctccaccaccaccatttgttaaccctgctactccacaaacaccaccttatggagctcccataggcttccctgagatagcacctcatgtctactattttacgtctcccctggaaggtgttcaagcactgccttttgtgcctcacccagcaagccctccagctatgttaattcctcaatttgatcctcttcgagcggagctgctgaagcagatagagtactactttgggtacttttttgtctacatttacgtgaaatatttgttccatatcattgccgaggtaaatttactgagccacttccgcccgggctgcagtgatgacaatttgtgcaaagacatattcttgaggcggcatatggatgaccagggttgggtgccattacccctgattgcaggatttaatcaggtaaaaaagctgactaataacgtgcagtttatcttggaaacagttctgcaatctaccgtggttgaagtacagggtgacaaattgcggaagcgtgaaagatgggagatctggttgcttccaaaacaaggttattctgctggaaattcttctggttcgctgtcccctgtgacatccaacattgattcactggcatctcagtttcaatctgttggacttgagggggcaggctaccatgcaagtcaaggaatgcccggtgaagctctccttactaggtcagcaacttcagttagtctaggttatcaggcaccccccttgggaggattatacagcaacgggagtggaccactttttgggcagaagtctgcaagaagtttactccggagcgataccttttgaggttttacacaagaaagattacaacggcatgccgagttttctctggttacggcacgcgtacctcatctactggggtgaggagtgaggactaaaatccagttgatttggaagaaaacaaccaaaaaaaggaaataaaacatacaaaaaagagagatagaaatacccaaaaaaatataaaaatataaaaaccaaaaaaatcgaaaaacttaaaaacaagaggaaaaaacatagtaggtagtattatgtgcaggacttatgtattttgtggttgtgctcttgctgggacgtgagtacgtgacattacctgttaagtactcgtttgattgttgctcttttgcagactgagttgttatggatgttgtcagtcggaagctgttaaagacgagacaaacttatttcaaaaaactgatgacattattatcagttgtgcatcttctgctgcccaaattgtgcataaaaaaaaaaaa

SEQ ID NO: 25590 - DNA, 3039 bp, Oryza sativa
  Clone ID: PAT_MRT4530_30462C.1
tcagaacagaaaaataaaataaaaattctgcatcttccccgaagggcgcgaggcggcgagcctcacgccctctcccgagtcccgagtgaggacacgccggcggaggccgatggccctagccgctctacctctacctctacgggctcctgaaccgtgtcggcgttcacgaggcaggcggtgcctaggtgatgcaggcgagctccccctcctctcctccgctggttgcttctgcgggccgtctctttgcccaggtgagtggtgctcgccacttgctcgacgaaatgcgcacttctccctgactccgctcttcgctttgtttgcctccttggggtgggtgaggtgtgggcccgaactagttggggtgaaaatgaagccaagggggtagtcgatagctttgaaaccttttttgcattcctcatagaccactaattgtcttaaaaactcggttgacgccaacaaatggtttgggagatcaatcatgattgccaaacaatcatgaacttttaaacatgtcatgttttcctcctcggcttcttctgttcttacaattctaccagttcgtgggatcctcctccaattttccatgtcacggaacgtcagttcttcaagggatggaaataccctgtcataactgccataaaattcctttccgatatcttttatttgttccaagccttgtagaattagaaccgcaaggtgagaaagatttccaagaggtggaagttctaccaattttttacagccactgaatttaatgtatcgcagtgtggtgaagtgctggtcatctgctatccatcctggaaacttcactcccatgtagcagtggatctcgagatccttaagttgtccatttggttttaggtgtgaaacagtttccgtgcaaccatcaagtgttgctggctgtgaattccactttagagccaacttctggaggtacatttttttagacagctcagcatgacgcgcgtcacacacctcattcacacatgccactttctcaagattcgtaatacaaagatggccaccaaggtaattcaaatccttcagttctgttatcctatacccctccttttcactgacagcaaattcttccaagtattgaagcttggatagctggcctatactatgtatcaaagagagtgtgcaagcttctgcatataaatatcgcaggttgactagcttattcatatccctaggtaactctgtgaatctacatcctcgcatacctagaacttgtaaaaggagtagcttacagaatgagtctggaaacattgtgatcccagtgaaggataggtccaagtaccttaggtgagagcatgtactgatgacatcagggggcctttccatcttagtttcaatgcaagacaggtctaacaccctcagggaacttgaaacaggcaatatgctattaagggctgtattcagcatggttgttctctggccatcaaaaaataaaatgctccgtaccttgctttgttttcttaggtccaatgacacttcgaaatcatatttgtcaactgccatgtggatgatattggaaaggttttgtctgggactgtgtaaatcgtctattgtgtaacatcctgtttgatttatggaggccacaacttttttgatcatttcattcactgtatatttacccttccatacagttgactggataagtgacctgttcaagagctcatcaagccatcgaatgtctgtgatctcatatgcggattcttgatgttgttgcatagaattacacacccacatttgagtcatttttcttttgtcaaataaataactggatgggaacatggaacagtaacccaaacatttctttaggtcatttctgaggaattccagtgcaatcgttactgaaggtaaagcaggattagtgatgaccagatcttcatagtcattccaccaattgctttcacaaacatttcgccagtggtcttcatctaacttcgttctgagaagcctcccgattacctctgccgataagggcaggccatgcaacttaccagctattttgtcaccaattgattccagagaatcttttctggtgagtccaaacgcgtggtgcttcagaatcatcgagagaacagatgttggaattttatccaaagttataactatacctcctggaatggcatgagtcacttctgatctagttgtcaccagtactatgctccctgctgctgctccagttaattttgctctcacagtcttccattcacgttgcaggttatcctttgcattgtcaaggacaaggaagaatctcttgttctgtatggtcctggagagatcatgttccgaactagcttggagtgtttccagacccatttcagaatcaaaaggatgctgttctgctgcaaaagaacaaaatattttcttgatgaaatcctctgagtcagacctttgagagagagagacccatcctctctgattgaaggccttcttgacattagggtggttatagattacttgagcaagtgctgttttgcctaccccagcctcgcctacgatacatacaactttcacagttgcagttccccgtgtctcttcctgcattctggatgctggaaaatgttcagcttgtgcttcatttggaaatatgatgctcattaattggtccttctctttctcacgaccatggaacactacttgtatttctggaagaaaccctaccatatcctctttagaatcattcaattttaacaagtcaaaaaaatttccagacttactggcaatcttgtcgagccttgccaggagagtcttcagtctgtatatgtcatcatcaacaaaacccagattcttcatcatgtatgccagaaaaccgctaaccttgttctgttggctcttttgtattctcttgatctcaaagtcatccagcagctcttccgcctcagaagcaattttcttgatcaactccagccagccggtgaaattatcatcgacgacgggccttcgctccgcgacatcaagcactgcttgcagatgaacaagggaagcctccacgttaaacacccgcaacgtcaccatgcagctcat

SEQ ID NO: 25591 - DNA, 530 bp, Oryza sativa
  unsure (1)..(530): unsure at all n locations
  Clone ID: PAT_MRT4530_30463C.1
gacaggtagaacagtaatcgcctgaaatatccactgccgttgattctttgaacattacaagactaaatgttaatagtgccaaagtagataaattcattacaatgcctgcagttattctcgtaattacacatatgtcgtggtcgtcttgtgtacaatgctaataataccattttcccgctcttaatttagataccaactcttaatttagcagatctcctacatggatagcattacaaaacagtaccatctacatataaactgctaattgtgagtactgatgctgatgcttctaaaattcaaaaaggaaattgtgatgcttcttaaccaatcatgtcacatgacgcattaattcttcctttgctctggcgacaagattagagagtggtatgctgtattccattagtcctgcatcccccatgaagagcctgtacttttcaacctttgaagtgtctcttctaccaccatgagtgcttncatcatctggcattcattgaaacagttcgcataactagaatngtttccatcatata

SEQ ID NO: 25592 - DNA, 925 bp, Oryza sativa
  Clone ID: PAT_MRT4530_30464C.1
attcccgggtcgaccccgcgtccggaaaagctcgactcgagctcgccgcgattgaatcgcgcatgggcacggcggcgggcgacgcggcggagcagccaccggcggcgccggaggcgaagagggcggcggctccacggacgctggtgttcacgtacggcacgctgaagaggggcttctccaaccacggcctcctccaggacctggcccgggacggcgacgcctccttcgtgggcgccgccaccaccgcgccgcgcctcccgctcgtctgcgggccctaccgcgtccccttcctcctcaacctccccggcgccggacaccgcgtctccggcgagctctacgccgtcacgccgcgcgggctcgaccgcctcgacgagctggagggcgtctcccgcgcgcactacgagcgcctccccatctccgtcctcctcgccgagggcgcccaggtcgacgccgtcgcctactacgcgcaccgcggctacgccgacgacctgtgggcgcgcagcggcaagaaggggtacccggagtactcgccggccgtcgccgacggctacatccgccgcaaggatcggccgcagcagctcaccttcctggagcagattcgggtgttcgtctcatcgcagtcatcgtagaacccatcaattaatctcttttcttttcttaatctatttttcttctctttgcaatcactcctcctatttgtgcgatagcgtgcatgggccatgtgacaatctcttgtgatgaatggatgatcacgcgtgctacctaacctaccagatcgccatatcaggctatcgctgatcgcgtgatctgtagtatcacatccgtttgtgtgggggtaaaatcagccatcttcctgtaataaaatagaatgattttccattagactcactgatcattggctgtgaaatttgccggccgcctgttc

SEQ ID NO: 25593 - DNA, 4139 bp, Oryza sativa
  Clone ID: PAT_MRT4530_30465C.1
gcttgtaagcatgttatatgccattatgccattatgcacatactgtaaaacatctatgataaccaatatttgatcaaagtctgaaactcgacatggtcttccttactttatctcttctggaagttgaatagcctaagtgagagtccaaaaaggaaggcaaagagaatagcaaaggagacaactgccacagcggccacccacaacaagtcctgcttgtaaccaaagtagctctcgataaagtcagatacactcacgccattattaaacttgtcatttacatccccaaactgtgatgtaagcaatccattgagtgtccaagcaacagggcacatccaatagtaccacctccaccatactggaattctaatccgtggtattagaaatcctgagaaaaggttccatatgttatagaatgccgtggaaacaacagcagacatggcattgtttggagtcaaacccgccatcatcatgccataaaatgtgaagtatgatagtgtgaagaacatgaagaagaggtaccaaagaaatttggcacatgtccactcataccctgtcccaaggcgtacgacaaagcagagtacatgtgtgatgctctttccctgtaaaagatcgtgcgcctcaacaaagatagctggctgaacagaactagagttctgcacccccattgccatacatgccgaatacatggcacccatgatactgaacaaggtttgttgattttgtctttttttgccaataccccagaacatggttccgaacaagagtgcaactacaatagtgaagaggtacctcacaacaatataaggaggatttctccaatacgatagatgttgcttccataggcaagccaaccattgtgtaagaaaaagctgtgaatattgagttggaaatgataagtcgcttgaaccttcaggaggtgcacttaactccttaatcaaatttttgttcctcctatatagctcagaattcttgtatatttgagaaaagtccacgcaagttctttgttcctgcgttgtactagtcacttccaacatccatgttgaaggattgtagccatcttttatcttgctgacaccttgaatagcctcaaaatatttaattaattcacatgattgtcgtcctataggacctacataaatctcttcacctccttgtttcattaggaagagctcatcaaaagattcaaatatctcaatgcttggttggtgaattgtgcaaacaacggttcttcctgtgtccaccgtatttcttattgctctcatcacaatggctgctgctcgtgcatcaagtccagatgttggttcgtccataaatataatggatgggtttgcaactagttccactgctattgttagtcttttccttcgttcagatgataatccactaacgccaggtaatccaaccagtgcatcttttaaggagagaatctccaccagctccatgacttcataaacaaacatctttcttgtcgcagaatcaatttcaacaggtaatctaagccatgcggagaacataagggactcatagacagttacatttggtgaatggatgtcattttgttcacaatatcctgaaattcgggcaaaagtttcttgcttttttgggtagccagagatggtaatactaccctgtacatatccactagtttttctcccagccaacacatccagcagtgttgtctttcccgcaccactgacacccataagagctgtaagtactccttgcctaaaagaaccactgatatctttcaatagttccagtcgaccctctgtcataccttttgctttaaatgcctctggcgtgtctacactatatcttatgtcttcaaaggtgatggaaagaggtacaaaagggagaaccattcctttatttccagcactagaatgtcttgttgcatggtacgaatttgcttcatcattgatgatttccttagcatgtgtgagaaatgtgagacatatggtgtagaggacattgaataaaagcacatatccgagcaaggcgccaatactaatccaataccatttggtctcaggaagaaaactactagatcctaaaactagccttccaagtggtcctttgtaaccaagtattgacttgttccagatttgacctaggaattcatttacggctaaagcgtttaaggcatacattaggggtgatatccaatacaaccatatccaccatttcttgacatcatctctagtcaagatgaatccacatgaaagcataaaaatgaggatgcagaatgggcccatgttgcttgcaataaccggatgccttgtaagggcaacaatgaagcggaaaagtgcatatattacctcacacaaaacaaaaagtacaaggaactgtctgaaaaatctcagtacatttggatcaaatccaatgacgtagtatgttaggaagacccaaactgttgtgttgaggaaggagatagggatcttaatgatccaagatggcaaggaatatgtccatgatgggtagtataatagatctctttgcttgaacaaaactgggagcttcgcaatagctggtcccatttctgccaaagcactgtacacaatcatcatcattccatagaatagtgctcccatgtatgacctcccattttctatcgagtcacgatacatattggttcggataaacacagtcattgcatttattgcgaccagttttagctgaattgccttgaatatatacaaaaacgaatttcttttcattagcaatatctctctataaatgtttgctttgagtagttctttcatgctaacaccatacttagatgttgccagcgcagcggggtgattcttgctcttctcaaatgggattgccaactcacttctgattgcttgaccgacatggaaagactgaaatgcctcagcaatcatcgtaacaggaacatattggtatgtgtcatcactacctatccagtattgtttctgatctttcctagatgtaacttcctgcaagaagtcagctacgcattttctctcagggcatttgaatccaaccgatttaaagaactcaagcacatgatcacgagggccattgtagacaacttgaccatctgatagtagaattatatcatcaaacaattcatatgtctcaggtgcgggctgtagcaaagcaataactgctgttccaccaagaatgcgaatggtttgtcggatggtgttaactatctggaatgttgtcgagctatcaagtccagttgatatctcatccatgaaaagtgctcgtcctggtgtaacaatcatctcagctgtggcatcaatattagggagtggatcagaaattgtaaccatcatgcactctaataactccaatgatacattacctgtcgttagtcgctttttttgccctcctgatatgcctctcagcatattgttccctactattgtgtcggcacagatatccaatcccaaaatctttagtatgtgatttgtgaccacctcagctttctgctctcctgttgtagctgccataatgatggccaaccccttgacactttgcagcgaaattgactgtctcccgaactttaaggttgatgttccagccaaggccaataatagtgatgtttttcctgaacctggagggcctaacaacaaggtcattctgtgaggcttgataatcccactcacattgtgaaggattggtattttgtgtgttatcttttttgtaatgcaaagagcatttgtcaggccctccattatgatggtatatgtattgagaatggtgggaagtcccctcctgcccacatacgactctgcttcaatgttcagattctcataccgcacttcaaccgtcggtagcttaattccaacccaggtaccttgaggtaccacttcaatcccaccgttgatttcacaggggtaagattggtatggggacatttgttgacacaacaagtccccatgactttttacccctttcccaagtcttcgtcctcgtatttctctccgggtcatgtcgatacagccagccctgctccgctcaagatccctgccctctctcttgcagggccatcggaggccattcgatggagtgattggagaaacacagcatttgggaggagcttgtaggagaagaaagagacgtctccagggtgaccttcctttggcgtgatggaactccctgtgcat

SEQ ID NO: 25594 - DNA, 700 bp, Oryza sativa
  unsure (1)..(700): unsure at all n locations
  Clone ID: PAT_MRT4530_30466C.1
gagatggnattatagaatactcatgcttgcatgcctgcaggtcgactctagaggatccccgtatggcaatgggggtgcagaactctagttctgttcagccagctatctttggtgaggcgcacgatcttttacagggaaagagcatcacacatgtactctgctttgtcggacgccttgggacaggttgcaattgaatttccatacatttttcttcagaccataatatattgggtgctagtgtatgccatggtagggtatgagtggacatgtgccaaatttctttggtacctcttcttcatgttcttcacactatcatacttcacattttatggcatgatgatggcgggtttgactccaaacaatgccatgtctgctgttgtttccacggcattctataacatatggaaccttttctcaggatttctaataccacggattagaattccagtatggtggaggtggtactattggatgtgccctgttgcttggacactcaatggattgcttacatcacagtttggggatgtaaatgacaagtttaataaggggatcctctagagtcgacctgcaggcatgcaagcttgagtattctatagtgtcacctaaatagcttggcgtaatcatggtcatagctgttttctgtgtgaaattgttatccgctcacaattccacacaacatacgagccggaagcataaagtg

SEQ ID NO: 25595 - DNA, 327 bp, Oryza sativa
  Clone ID: PAT_MRT4530_30467C.1
catcgcagctcatcgcaaagaacgatacagtactatagcgtgtgtgaaaagtccttgcaaatggaattgaagtacagcagcaacgccgacgtacgaggccatcagaatcagatcagtgctcactccaaagagatgaacattaactctgcgtccgtgaatgaatttctcgttctaaaaaaagaagtaaatgaatttctcggccgacccggtgatggagagatgttacatctggattgggttggtctccacgtgcatcgtttcggcgagaccaaactccagctgcctgcgaccaaaaccgatcacacgcagcgaatgcgagccaagggc

SEQ ID NO: 25596 - DNA, 1513 bp, Oryza sativa
  Clone ID: PAT_MRT4530_30468C.1
tagaaccatttctacacatacatcccggatatctgtaccagttctttgttcctgcgttgtactagtcacttcaacatccatgttgaaggattgtagcctcttttatcttgctgacacctggatagccctaaaaatatttatttaattcacatgattgtcgtcctataggacctacataaatctcttcacctccttgtttcattaggaagagctcatcaaaagattcaaatatctcaatgcttggttggtgaattgtgcaaacaagggtttttcttgtgtccaccgtattttttattgctctcatcacaatggctgctgctcgtgcatcaagtccagatgttggttcgtccataaatataatggatgggtttgcaactagttccactgctattgttagtcttttccttcgttcagatgataatccactaacgccaggtaatccaaccagtgcatcttttaaggagagaatctccaccagctccatgacttcataaacaaacatctttcttgtcgcagaatcaatttcaacaggtaatctaagccatgcggagaacataagggactcatagacagttacatttggtgaatggatgtcattttgttcacaatatcctgaaattcgggcaaaagtttcttgcttttttgggtagccagagatggtaatactaccctgtacatatccactagtttttctcccagccaacacatccagcagtgttgtctttcccgcaccactgacacccataagagctgtaagtactccttgcctaaaagaaccactgatatctttcaatagttccagtcgaccctctgtcataccttttgctttaaatgcctctggcgtgtctacactatatcttatgtcttcaaaggtgatggaaagaggtacaaaagggagaaccattcctttatttccagcactagaatgtcttgttgcatggtacgaatttgcttcatcattgatgatttccttagcatatattgtattgcaggcagcacgccctccagacgatgcttccaaaacttcattagttaaattatgttgttttatctgcaacatttcctgaggctttgttcggacgcgtgggtcaaatgctgcagtgaaagaatgcataaaattgagaatttataaaaatgagaatttataagctctggcattccaaatataatttatttctgactcacgattgaggaatgtgaggcagattgtgtagaggatattgaatagcaggacgtatccgagcaatgcaccaacaccaatccaataccatttggcctcagggaaaactccacgggattcaagaactagttttccaagtggctccctgaaaccaggtattgtctgcagtacagcaagaacagaacactttagccagacattcatataatggctgttaatcgatttccatgagtattttttttaccttgttccagctgtgacctagaaattcgtttactgatatggcattttgtgcatacatcaggggtgacatccagtatccccatatccacc

SEQ ID NO: 25597 - DNA, 356 bp, Oryza sativa
  Clone ID: PAT_MRT4530_30469C.1
gatgccctcctgcatcattttgccatgtagccgtgtgtctattttccagaaatatcaccactggagctccagaagtcatggttaattttgtcacatcatgttataagccagagctattggagcctcttgttaacaatatcacaaaaataccagaagtggtcagtatcatgaataatgtgaatacgtctgttggcaatacatctgtgggggaagaagaatataccttgtatgggaaaccaaccattacagagatgttgagaggacttacattccagatatctgccaactcctttttccagactcatacaaaacagttccagttcatgtatcagttatttccacgttatgctaaaatt

SEQ ID NO: 25598 - DNA, 525 bp, Oryza sativa
  Clone ID: PAT_MRT4530_3046C.1
aatgagaaaagaaaatgccgagtccgggaagatatctgtgcttcaattgtcaaggaatgggtcatttcgccgacaagtgcccaaaaccgagaaacatagctgccggcacgtcagtccacgcaactccctgcaatcagaagcttgctcctcaacgaatggtcatccatgcatcccgaagcagtcctatagcccgcgttgcaacagctccaattccaatgagtgcactaccacaaggtgtcaatgctcaatttcagccccagccaccagttgacaagacagatgccagtatctgcgttgtacctttggaagctccaatacagcagctgagaaatcaagtacaagatgaagaacccgagtgtaagaaagttattgtttgtcacaactgcagtggagaagggcattactccaaaaaactgtccccgacctccacattttcgccaatttacacgaagcagacattccaatcgtattgtggtcactggagcaaacgccgtacccgtaaggcctcgtgttaatcagaaccca

SEQ ID NO: 25599 - DNA, 235 bp, Oryza sativa
  Clone ID: PAT_MRT4530_30470C.1
aaccttaacttcgcatgcacccttacttaagcttgaatctctttaaatggccgcccttttttttttttttttttatttaaacacttcacaattcataacatcattatttttacatctttatttattaatcattattaactctacattaattgtttacataacaatccttaataatgctataaccacaatcaaattattatataatactcacatcagaacataataattttttttt

SEQ ID NO: 25600 - DNA, 1014 bp, Oryza sativa
  Clone ID: PAT_MRT4530_30471C.1
atggcagtggaagaaaacgcccatgcgataaatcaatctctctggttcctgaagatgaacagcatcaggaggttttctgggatgcgcaagcctaacgccccatctgcaatacataaagacaaagacgagagcgtagttttcttcagggagatgtacaagcgtgaaaaagatagggacatcaacctcctggaacccatgcaatccgttgagtttgatgctatccaaggtggccgcacgagcaaagctccgtcagggaagacagatttcctcatagcagtggacgagaagcatgactacgactggctgaagacgcctccagctacaccactgtttccttccatagagatggaaaccaactcatctcaaatggttttccagaaggagctaccaattcatcagcaagttaaaccttcagcttccaggctatcaggaaagacagaggcaacgaaaacatcggcaagatcaatgtttcctgcacctaactcttcatcagagaagagcatattcagagtgtccacacaatccatctccaatgagaagaaccaaattgaaaggagatcaacttctgcagccataacgagcaggaagcagaaggtagttgctgcaattacacctacagctcctaccgcaacttgcaatgcaaccaagaaacactctgaaagatgctatgcaagccaaggtagcagtacaaatggactcaagagagtgacgaaccctgagctcccctactgtgcaccgaagaatctgatcacaacgccattgacagcgaaagcatggcgtagtgatctagcatttggtgtgcatgacacagcagaaattggcaggataagaaggcagtcatgcctaccagttactgtcatggatggcaagcagaaaggcttacctgataaggtgaaggctgtgactgtcagcaataaccgtggtcgtgcaggcgatgccacattgatcaagggaatgagaagaacagacgggaagaaagagcagaggccaaagcatggaaatcaagcgaagtga

SEQ ID NO: 25601 - DNA, 226 bp, Oryza sativa
  Clone ID: PAT_MRT4530_30472C.1
agacatgaagctgtttaacattctttcaccaagggacatatcaaacaaaaatgcaataattaggctagtttccttaatataagtttagaaaaggaagggggggggctcatcaaacaaaaaaaaggtggaagctttcaagccccaagcatataacttgcaggaaaagggaactgggcagctaaccaaaacatttctatgggacaatgaaaacccacacaaccggggg

SEQ ID NO: 25602 - DNA, 2623 bp, Oryza sativa
  Clone ID: PAT_MRT4530_30473C.1
gcacgaggcggcccccggcctcctgccgccgaccggcctccgcatctccagcgcccccaaaccctagctctctcctcctccgccgccgcgccgatcgatcaggagtagcaatggccaggttctccgcagccgccgtgatcgccttcgccgtggtggccgcggccgcgctggccaccgtggcgtccgccgccgacgcgccggcacccgccccgacctccggcgcggtggcggccgtctcggcgcctctctccgtgtgctgcgtcgccggcctcctcctcgccttgctccgccactgaagcgttcttcttcctctgaatgcttttgcttcagatctagcagtacagtggtcgtgcgagtcttacttagcatttagtattagagcttagtagcgatgatgacgtgtgcgtgtggaggcattgttttttggttggatctatggggttttacgggttggtttggagtgaggaggatttgagatggggattattagtatctgttagactgttactactactggtttatttattttggtagtcttttggtgtgataggtttgggtttgttgtgtttcaccttggcaatgctgattagatcaccaaatagtgaatcttctggccttgatgctattgctccaccatgtgaattaccttcctgaaccgaaaccgcattcatcctctgggtaagctcattcgcgctaacataagcatacgccgcattcgggatgtagtaagctccaggttgctggccaaatccatagccagccatctgaacagcatacatctgatgatgatggctcatgccatagaactgtcccccaaacatcggttgggagtacattccagctccctgattgacttgcatcgaattggggtacatcatcatccctccgtattggagattcggtgcggactgcggttgtggtgattgtcgcggctgtgttcctcctagctgaccatttgccatttgttgtggtgacatgaatgatccttggccaaactgaccagaatgtggtgattgggggtgcatccctactggttgccctggttgcagtggcatctggccaagttgggtgggttggggtgggttgtccatggattgctgaatctcccatggtggtggtggaaggcctccattttgatcatcatagtaaggtacgatggcattggatgaaaccccatttgaataagcaacaggatgctgaggcagagcaggttgcactggagcaggatatgcttgtgatgcagggaaatttgaatttggtgccgatgtattaaaagagttagtaaggttattgttgcttctgttggcattattttgctcaaacatgtctgcaagagctagcacattctgatcagctgctgaatattctgtgacaggaacaagtgcaagggagtttgcaggttcaggtttgatgtaatcatctccactaagaaggtcgataaccggtactggtgctgcaggagcttttggactactggatgatgctggagcaggaagtgctaaggtagattggttgctggcacttgcagtccctgaagaactttgaactggtgcttttgaagtcccaggatttgcgggtggagaactatcaattttggtttggagagattttgttttctccaacctaactgcaacgcctgcagcaatagcatcatgttttgctagaactctctgcaaatcatcattcaaagaaaggccctggctgagcaactcctcattcgaggtagtgtttactagctctaccactctctgcttgtatgaacggcattgatccaccaggtcaacaatgacctcttgcctaagcccctctctgttactaggatccaaagcattcaacatctcggaaagaacatccatgatgcctcgtgcattctgaatttctgctaggctcaatgaaggcaaatctggcactgatgatccaggtggctcttgctgagcactgcgtaaagatgcaggatagttttgcagaggttgagtctgtggaggagtaaatattggaacagaaccatttgatctttgaggaaatacggccccagcacgcccgccaaaaacttcttgccaagtgtctatcagagtgaggatcttctctttcacatgaaaatcaggccttttcttgactattttcaccatttcatgaagtatgtctttctcagcaacttgcatatggacaatgtccccacagtttttgatcatcgtctccagtaacgtgagagcaagaagctggaccttcgcattcctgtgtgcaattcgtttcttgatagacttcacgacatcttttgcttgccctgggtctcgattgagggtgtcgcagatctccaggttcatggcccagtccgggccgatgagcatgtcgttcgtcgcgcggtcgaccagcacggacggcatcctgctccccccctcgccggaaaccaaccaactctcctaccaaaaaatccgaaaccggagccgcctttggcgggctcaaatggcggaggaaattaaggtcgtcgaagggaggaaggattcgcggttcttggatggtctcaaagcggccggctttcggcgagcacgataattttctttcgatgaattccgtggcgctgttcgtctgcttctgattgtttttgtttgggttggcctcgtgc

SEQ ID NO: 25603 - DNA, 493 bp, Oryza sativa
  Clone ID: PAT_MRT4530_30474C.1
atggacgctggcaaggccttctgttacggcctacgacgggccaaattgggccctcctgaagttcactcccgatctgatcctgtaactgcatatgcagctgcccttgctgcgtcttcagactcttcagagttcagtgtacgcgggcgcgtccggccacgcacgccggagatagtctcaagtccgcgacacaccgacgaaaccagtggtggtggtggactggcgcgcgattgccgatcgacgcacgccggcacgcgacgcgagcctcgcgcgggacgacacagccgtgccggcgatctcaagctcgtccaatccactattgagcttctcccgtggtcactggcaagctctccccatggtcgcggcactggcgaggttgagcttctccctgtggtcgccagctaatttctctcctgtccgtgctgctgccagcgattgcagagcagagcgcccggtacttgtgcccattcactgcaccactgcgcgtctgcgccat

SEQ ID NO: 25604 - DNA, 429 bp, Oryza sativa
  unsure (1)..(429): unsure at all n locations
  Clone ID: PAT_MRT4530_30475C.1
gaattgttgngaatacagnaaactatgtacatatatatatacatgagatcgatttgctaaaaaaaaaaaaaaaaaaaaaaaaaaaaaaaaaaaaaaaaaaaaaaaaaaaaaaaaaaaaaaaaaaaaaaaaaaaaaaaaggagagnagntaagagagatataaagtttaaagaaaannatntaagtggagggggggagggggataaattacaatnaaaanttcatgttaaaaaacaaangttttacacaacctaatcactgtcgaaaacccggcccttccccactgcaaggggtttgcccgatatccgccctcccccgggtggagttctaggcacggttgcctggccgttccgccgtccttgcctacgacctgcgtatgcggcctatggcttccgccgcgtccgccccgggggagggggtggccggcctg

SEQ ID NO: 25605 - DNA, 468 bp, Oryza sativa
  Clone ID: PAT_MRT4530_30476C.1
acggccgggatcctcctctcaatattgtctacaccatctgcaatcttgtttaacactacaattgcacaatcatcaatggcagaatacacccacaagatctttgccctgcttgacttaattgctctttctgcgagtgtcactactgcaatcaccactatgcactgtttcccaccaccattacccatgggcacactggatccgcgtggacagaacatcatgaagacgtgtgcgcatgcctagttccacagccatgttcatgtcgcagccaatggagctcctgcatcagcaatgttgaatgcagctaccacgcatgatgcctcaccgccactgtgacaccagctgccagatgatgcataacatgtaacaagttatttgtgctggactccgacagcagcagatgatgaacatgaccactgaaatgccatacatgcgcgacatgccccatgccaacctccaactcgcttcctg

SEQ ID NO: 25606 - DNA, 1335 bp, Oryza sativa
  Clone ID: PAT_MRT4530_30477C.1
cttcctcctcccccctccccggttcgacgcgcacatcgaaccccgacgaccaccaccgcccggccgccgccgccgccgacgcggtcgtcctctccggctaggatctggtgcatctaactattcaagaaatagaaaagcatgagctacttcacttgcaagccgaacagtgggcttattgtggataggcccgtcgctggtcttgggaggacaggcagattactatctcatcctcaatattccctaacgacacattctgttcgatttcccaagcttcaaaagcaggtgtacccgcgacttgttcttgttgctgctagccagaaaaagcttcctcctctatgtgcctcgagtggaaaggtgaacccagaggcagaaaatgatccctttatggaatctttgaagaaggccatggatgatgccaaaaagccacggcctattcaagacttgctgaaagaacagatagctaagctgagagaacaaggatctggtggaggtggaggaaaccgaaatcgtcgtggaggcagtggtgattctggtggcccagaagatgaatcattcaaggaatcattggatgaactagtccaagttatcttagcaaccgttgcattcattcttgtgtacatccatataatcagaggtgaggagctgtatcgcctcgccagggactacaccagatatcttgttactggcaagcgtactgcgcggttgaaacgtgccatgcaaaaatggcgcaatttctcagagagctttatgcaaagtgaaggctcacaagaagaccagtatgaaagagcagccacctccaaaccaacttggtggcaacagcctcaaaagtttgttcatcttatggaggaactctgccgaggaaattggcgcccgcatgcgcaggagtcttagttcaggtgctcccttgttcctttttggccttctgaagcacatggatgtggcgatgagcagtactgttttcatggctggtgcaatgacctggaatctggatagcgttccttgcccggggcagtgatttgttcttctttgttcgttaatgcgtattttctacgttttgttaagcactaaccaagtgagtaacttcctggcaattttgtagttgatgagatcgcatatataagctagccggcgtctcatgtcatatgcggcaaattgtagattatgttgaagttgaaccggtgtagcttggtttcactgcattttggtttggtttccttagcgttggaatgtaatgggtcacccttgacaacgtggctccaaatgtataatcttcaatggaaaacgagtagtaagtaccgaagcgcttcttcgctgaaaaaaaaaaaaaaaaacgaa

SEQ ID NO: 25607 - DNA, 383 bp, Oryza sativa
  Clone ID: PAT_MRT4530_30478C.1
acttcgcaacattcatccattggtagcctgagacagttagtagtacgatctaagcctcggtaccttctaattaagcaacactagacgatagatagcataatagcatccctaagcaaacattgactataggcatcagtgatcagtggagttggccgttgacgtagtggcggtgggggtcatcggcgcggacacggtcatggagtcgcgggcgaggtcgtcgacgcggcgggggcgggggcggtcgatggggcgagggcggcgccgatcgtcgcaggggcgggcggcggcggggcgtcgtcggcggctggcgtgtcggtgggcatttttgccttgaccttggcgaagatcttagccatcgcagccttcctcttctcggaaaaaca

SEQ ID NO: 25608 - DNA, 954 bp, Oryza sativa
  Clone ID: PAT_MRT4530_30479C.1
gccgaggactcgatttcgtgcccccacaccctcgacgagcgagccttgccctcttctcttcccttctctcctaccggcggcaactaccgggaagccgccgccgaccgccggagcggagtcgtcgcggcggcgagggcgaatcggtaaccccccccccccctccggagttccgggatggggacgccggagttccccaacctgggcaagcactgcagcgtcggcgactgcaaccagatcgacttcctgcccttcacctgcgaccgctgcgaccaccaccgaagttatacatcgcatcagtgtccaaatgcaaatcagaaggatgtgactgtcctcatctgcccactctgtgctaaaggagttcgcctgaacccgaacgaagatccaaacatcacctgggacacccatgtcaatagtgactgtgatccatcaaattaccagaaagtaacaaagaaaaagaaatgcccagtgcctgggtgcagagagacactgacattttcaaacacaattagatgcaaagattgcaccaaagaacactgcctgaagcatagatttggacctgatcacaagtgtccagggccaagaaaaccggaatctacattccccttcggaaatatgcttaggagaagtcagaaagcagaatcatgttcaaattcaaacagcagtagcactagttcatcctggtggagctctagtcttcttaccgcagcaacgagtttcaaatcatctgctgaagctgggatgcagaaattgagcacagcaactacccaagccatccagaaggctaaggatgggatctcgacaagcagcagtaacagcgttgtgagggtgacgcgcgccgatactggcggcaagctagcaaatcagaagtccggcgatggcatccaagcgggaaatcaatgtccaaaatccggcaacaaggacaatagaaaggtcttggttagtgtgcttgactag

SEQ ID NO: 25609 - DNA, 3390 bp, Oryza sativa
  Clone ID: PAT_MRT4530_3047C.1
atggcatcgaaaaaaggcaagcgagtacgcgtggttgagaaggacgctgaggcgcctactcaggaatcggagtcagcatacccagattccgatctccatgtctcacacattttcggaggttccacggcatactcctcaaagcgagaatacaagaaagtggaacgtgaagtctgttcgacgtggcagggggccgcgcccaagatgaagtggtccgagcagaagatagaattctcagaagaggaccaccccaagactgctgtcatcctagggcgatatccgatcgtggtcgaacccactattcgtaatatcaaggttgcccgagtactgatcgacgacaggagctcaatcaaccttctcttcgccagcgccttggacgcgatggggattccacgaagcgagttgacacctaccgatcaacccttccatggaatcactcctcagtcatcatccaaaccattgggcaaaattacgttgcctgtgactttcgaccaagcaaacaacttccgaacggaacagatcacctttgatgtcgctgaattcgatacagcatacaatgcaatcattgggagaactgcactcgcgaagttcatggccgcatctcactatgcgtatcaagtgctcaagatgccaggaccgaagggaacaatcactattcaagggtacactaagctggcagtacaatgcgacaagcggagcctcgacttggtcgagcacacgcccagcccgcctgccacaacagagccaccaaagaaaccgtccgacatgccgggggtacccagggaggtgattgagcacaaactcatggtgcgacccgatgccaagccagtaaagcaaaaaccgcggagatttgcactagatcgaaaacaagccatacgagaagagctcgacaagcttctcaaagccggtttcatcagagaggtactccatccagagtggctagccaacccagttatggtacggaaggccaacgagaagtggagaatttgtgtcgatttcaccgacctcaacaaggcgtgccccaaggatcattttcctcttcctcgaatagaccaactggtggactcaactatgccgtttggactaataactgcaggaaacactttccagcgcacggtccaaggtgcacttagcgaccagctcggaaacaatgtcgaggcctacgtcgatgacattgttgtcaagaccaagacaagcaactcattgattgacgatctgcgagaaacgttcgactacctccgacgatatcgcctcatgctcaatccagagaagtgcacgttcggagtaccatcgggcaaactactcggcttcctcgtctctggcagaggaatagaagcaaatcctgagaagatcaaggcaatcgagaacatgaagtcacctacaagactcaaggaagaggccgaagaggcattcattgcactcaagctctacctatcaaatccacctgtatttgttgccccccaacctaatgaagaattatttatctatattgccgccacaccatattccgttcgcactgtcattgttgtcgagagagagaaggtgcaacgaccagtctactatgtcaacgaagctctccacgacgcaaagacaagatatccacaaatccaaaaactgctctacgcagtaatcatgacatcaagaaagctacgccactacttccaagcccacaaggtcacagttgtctcctccttccctctcggtgaagtcgtgagaaacaaagacgttgtcagccgcattgccaaatggatagtcgagctaagccaatttgatatccacttcgtgccacgaacagccatcaagtcccaggtacttgccgatttcgtagctgattggaccatacctgataataggtcagacaaccaaatcgacaacgaaacgtggacaatggcattcgacggtgcactcaacagccagggagcaggggcaggatttatcttgacatcaccttcgggagatcaattcaagcatgcaattcacctcaacttcagggcaaccaataacacagccgaataccaagcactactcgttgggataagagttgcagctgcactcggagtcaggcaactgatcgtgaaaggggattccgaactagttgcgaaccaggtgcataaagattacaagtgctctagccccgagttatccaagtatctcgcagaagtcaggaagctagaaaaaaggttcgatgggatcgaggtccgacatgtataccgcaaagacaacatcgaaccggatgatctagcacgacgtgcgtccagacgagaaccacttgaacctggcacctttctggacgtcctgacgaggccatcagtgaaagaggcaaccggcacagacagcccggtcgcccccaacatcggctcgggggctacagaggcagagcgagccgttgccgatattgagaccacagacaactggcgtaccccactcattaaattcataggcagcgaagagttgcccgaggatgacgtagaggccgagaaaatatcccgtaaagcaaaagtctactgtatgatcggcaacgatctatacaagaaggcaccaaacggggtactcctaaaatgcgtctcgtccgacgacggcagacacctcctcctcgacatacatgaagggatctgtaggtcacatgccgccggtcagacattagtcggaaaagcttttcgacaagggtttttctggccaaccggcctcaaagacgcctgcgacatgattcggattgccccacggtatcataacagacaacggctccagttcatcagtgccgatttccaggattactgcatcaggctgggagtcaagatctgcttcgcctcggtttctcaccctcagagcaatggacaagtcgagagggcaaacggcatagtactacaaggaatcaagacccacgtctacgacaggctcatgtcacatgacaagaagtgggtcgaggaacttccatcaatactatgggccgtgcgtaccacaccgacaacgtccaacaaggaaacacccttcttcctcatttacggctcagaggccatgctccccaccgagctacgacatcaaagtacacgagtacagaagtattccgatgagtatcaggaggaacagcgatacgacgatgtgaatctactcgaagaacatcgcgaacgagttgccgttcgagcagccagctaccaacaagcccttcgacgttaccacgagaagcgcatccaagcacgcacgctttcgatcggcgactacgtcctccgacgggttcaaagccaagcagggcgcaacaagctctcacccaaatgggaaggaccgtacacgatcacacaagttctgcggccaggcgcattcaaaatcgcaagcggcgatggtcgcgagttggcaaattcctggaacattgatcaattacgtaaattctatgtataa

SEQ ID NO: 25610 - DNA, 195 bp, Oryza sativa
  Clone ID: PAT_MRT4530_30480C.1
atggcggagcaggggcgagcgttgcggcacggcaacgccatggccgagctcggctgcaagcagctacggcgaacgggatgggagatcccccgggatagcatgtccacggtgacctccatgggtggagctttggagctcggactcggcatggttatggccatgatcggcgacattgatggggaagttagttcctag

SEQ ID NO: 25611 - DNA, 417 bp, Oryza sativa
  Clone ID: PAT_MRT4530_30481C.1
atgaccaacatgaagatgatatcacccatcaaagctgacgaagatgttggtggtggtaaagacaatgacaccaatcaaagtggcggcgtcgtggccagccatgaagacaaaaacaccagttggcgtcatacgaggcagccggtcggtgaagatgtagacgcccagcaacggcgacctaataggccaaccatgcaggcgaggacaccagtcggtagcgacgaaggcgagccggtcggtgaagacatagacgcccagcaacagcgcataatagaccagctgtgcaggcgaggacaccagtcggtggcgacgaaggcgagccggtcggtgaagacgtggacgtccaacaacggtggcacaataagccagccgtgtaggcggaaacaccagtgggcggcagacgaggtggccggtcggtga

SEQ ID NO: 25612 - DNA, 289 bp, Oryza sativa
  unsure (1)..(289): unsure at all n locations
  Clone ID: PAT_MRT4530_30482C.1
aaaatatattgcaaattgattgatattttcattcacgaaaatactaatcaacctgtttttagactacggcgcattctaacagctggacggttggatagattatagttttatgtaaaattgattataggatgaattaaatattataaaaccaatagattgctttagaaaatgttatctaagcaaaattctgatatagaaagttttcaaaaaaaaatcaaaatttgagaagcgcggcataataattcatacttccattagctaacaaactctancacacatatataactga

SEQ ID NO: 25613 - DNA, 817 bp, Oryza sativa
  Clone ID: PAT_MRT4530_30483C.1
ttggccattcattttatttgaaagatttagaagatcttttttgtggaaaggcgaagatctagaccactctaactcgggagatagcctgattaactggcaaactgtctgcaaaccgaaggttctgggaggggctggtctcttggaattagaacacttttctagggcattacatcttcgttggttatggcttaattggaaagaggaagaaaagccttgggtgggcatgaacctgccctgtgacgaatccggcaatagactcttccaagctgcaacaactatttaggttgtaaatggcgccaaaacaagattctggcatgatagttggctacaaaatcgcttcccaaaagacattgcaccaagatgttttagcttggcgaagagaaaacaaagatctgtgcaacttgaacttacagacaacaaatggctagcctcttttagacaatttacttccgtggaggaaattcatgagctcgtacagctaggaggcttaattcaattggcctcgctatcccaagaaccggatgacattacctggaactggactgattacggttcctacacagccaagagtgcgtatctctaccaatttgaaggttcttttgcaaaacttgactttctttcactttggaaggctccagcggagcccaaaatgagattctttggatggcttgtccttcatcaaaaaaccctcactgcacaaaatatacttcgaagacattggccgtgcacttggatttgccgcctttgcacttgttcttttgaagacacaaaccacctgctcaatgagtgtatttttactagacaaacttggagttta

SEQ ID NO: 25614 - DNA, 475 bp, Oryza sativa
  Clone ID: PAT_MRT4530_30484C.1
cccacgcgtccggtgctccatcactggagctctatcgacgattaatcctctagctagctaattaagagatcgaatatattacacatatactaatatagataattaattaaatggagatgaagccattagtagtagcgctgttggctgtggtggtggcagcaatggcggtggcggccgtgcaggacgacgacgacgacgtcccattcaccgacaaggatctggagtcggaggagagcatgtggagcctctaccagaggtggagccgcgtgcacggcttgacatcgcgggacctggccgagaagcagggcaggttcgaggcgttcaaggcgaacgccatgcacgtcaacgagttcaacaagaaggagggcatgacctacaagctcgccctcaacaggttcgccgacatgacgctgcaggagttcggcgccaagtctgccggcgccaaggtgagatgcctcgtcgccagcttggcttg

SEQ ID NO: 25615 - DNA, 744 bp, Oryza sativa
  Clone ID: PAT_MRT4530_30485C.1
atggccagccgggccggctttgtgccgtgcccgagcatgactgccagtacctgcaccgtccgatcgtcattgggccgatctggaccgatggtcctgtggaccggcgcgtggagcgcgggcgtggaccgagttcacaaggccatcggctcatcgtggaccgagaccacatatgtggtccacgggacggctacgagcagccgggcgcggtgcacgggtgaaccgggaggccaactccggcccaaccgccggcgccggcggcgcgggaatgcatcggaggaggcggggagagggagaggggtgctcacgaagcggcgtaacaacgtgaaaggtgacgcgtggagctctgccggcaaggatttcgaggaagaggatgccgaggttctccgggagcccgtgaaggcgaagggagctgtggagcagcgtgaggtggcctcaaccggcggcaagaagtggtcgaaggcgtcattggtggtagtggttcgggttgcgcggagaaacggtgccccaatggtgggcacggatggagaggcggttgctggggcgctgcttggcacggcggaactgatggaggtggcggcgtggcttggggtggttgggaacgacagcaagaggcggccagagttagtaaaggtgatggtggctcaggttggtggtggaggtggcggcttggtggtggtttgcggtcctggagtggtggccggggtgcgatgctgcaaggtgatgctgacggtgcaagtggcgtag

SEQ ID NO: 25616 - DNA, 1362 bp, Oryza sativa
  Clone ID: PAT_MRT4530_30486C.1
atggaggcggctcggggcgatggagggggagctgagggtggcgatgggcagatggcggtagtgcagcagagcctcgcagtggtgggacgcgccggtgacagggtgttcgtgtgggtgtcattccaagatgagtccgaaaacatgctagctcacagtacggagaccaataagaaaggccaagaatattcaactcttcttgatcctaagtttgccccggtgctactatttgttgattacaacttagatgatacacacgatgaggtcaactccgaggatgaagactactccatagaagatgaagatgaagagttagatcacgaggatgataattcatttgacgaggatattagtgacaacgataaggatgatgataaacttggagaggcggcaaatgacatttgtaaaggagattataatgaaaacaatgaggatgctgggacagaggaaagtgacgacaccgatgaccaagaggaagatgtcaccatattcttctacagtatagccagaaaagaactattatgcaaaagaggtgatatattcaattgccactcatactggagaacaccacagggctggttgcttatggtacaccttgaatcacatgaaacattcttatggagtcctttcacagatcaaaggatcaatctacccttggatgaagatagtttccttacaaataatgaggtcgtttgtttgctatcacataaacccacttatccaaattgtgttgtgctagtggtaaattgtaggaacacatcattttggtattgctatcctcaagggcacacatggttcaagcatgagtaccagtcaagtatgatcactactcatgaaaaccgtagaaacgtcattctaacaatgaaagatctcactgcagttggagggaggttttgcacatatttaagtaaggagaaggcaattgtgacacttgagttcttgccaaatccaacatttacaactacgccagttaaggatgcatcagatccaatttattggtacaccacttttactaattgcttgttagaatcttgtggagagttgttcatgttatcatttaaacatccagtggtatgtgctcagaaggttgtgcagattgaagttcataaactcgatttatctagaagaatttgggtgaaagttaacacaattggtaacaaggcatttttggttgagtgtattggctttggatcatcgctcactgcagaagatgttggattgaagagaaactgcatttattttgtgagacctaatgataagggtttgtatgtttatgacatggaacgaggaactactgtaatgcataatccaggggcagacctaccggataacatgacacttcagatcgtggtgcctccattttga

SEQ ID NO: 25617 - DNA, 463 bp, Oryza sativa
  Clone ID: PAT_MRT4530_30487C.1
tcatggattcttctgaagtttctggtgctagtggtactagttggactgacgaagagacattgcttcttttagaagctttggaaatttttggtggaaaatggactgagatagctgaacatgttgctacaaaaacaaaagctcagtgcatgctgcacttccttcaaatgcaaattgaggaccgctttcatggcgatgaagatattaatcaaaatatccaggaaaacacagagcaagcttcagcagaaaaaggcgctgctgaaatacctgataaaatggaagttgaagagaaagcagaaggaaaagatactgcaggtgagaaaactccagagaaagcagagggcaatagtgtagaagcacaaacggaagatggaaatgctattgaaaataaagatgccaataattcaggtggcacagattcagttaaatctctaaacactgatgagccaaaaaaatcttctgatgc

SEQ ID NO: 25618 - DNA, 786 bp, Oryza sativa
  Clone ID: PAT_MRT4530_30488C.1
atggcggcgggcgcggaggcggcggcggagtccatgttcttgccgttcttggcgatgttcgcggctatatacctcgtcgggtacctcgtcgtgttccggcggtggggcggcgcgcagagggcggaggcgtcgagctgcttcgcgtcgctgttccacggcacgccggcggcggcgctcgcgctccgcgccgtgctgtccaacccgcgcggctgctgcgtcggcgtcgccggcgacctcgcggcgcccaacacgcgcgccgacgagctcgccctcgacttcagcacggcctacttcgccgtcgacctggcgcactacctcgtcctcctcccgggcgagcgcctcttcgtggcgcaccacctcgccacgctctacgtgctcgccacctgccgcgccgcggcgcgccgcggcgcctgcgcgctgctcgtcatggaggtgctcgccgaggccaccagcctcgcgcagaacctgtggacgctcgccggcatgcggcgcgccggctcgcccgcggcggccgcggcgcacgcgcggctgtcgctcccgttctacgccgcgtacaccgccatgagggcggtgctcgggccggcgtggttcgtgaggatggtgcggttctactacgcgtcggacggcggcggcggcgccggcggcgaggcgttgccggcgtgggcgcgggcgtcgtggacggtggtgatcggcgccgggatcgtggtgagcgtgctctgggtgagcaacctgtggctggaattcttcagagaaaacaaaagaaaagagagcagcaaggagcagtga

SEQ ID NO: 25619 - DNA, 179 bp, Oryza sativa
  Clone ID: PAT_MRT4530_30489C.1
ccaaaaactgctctgatgccttaaaagatgcaagagcaggatctttaaaacatgatttgctcccacaaacattcaatcaactctgttcaccagatttattactactaacccagaaaacttctttaggggggggggggcgatttgctaatgagcgatagagatttacatacgggagaggg

SEQ ID NO: 25620 - DNA, 655 bp, Oryza sativa
  unsure (1)..(655): unsure at all n locations
  Clone ID: PAT_MRT4530_3048C.1
gaaaacggtgcattctcccctcccaccgtcccaactcccacgtccggctcggctcgggcctctccgtgccagagagtttcactcctcgcggagaaggaaaaaccggaggcgcgcgcgcagtcgtggccggggttgggaagatccgagaggcaaggggcaagggcggcgtgcgggtctgcaggatcaggatcccgaaaagctagcccgcggcgaagtaataataactgctcctctgaatctctccgatcctctcgaaccacgagaagctcagcagtttcggctccgcgcgccgcctgcctctcggtcgacagcacagtaaattccgcctccaaccaggtggcgcaggtgctcctgacgctgccgtactccttctcgcagctcgggatgctctcgggcctgctgctgcaggtgttctacggcctcatgggcagctggaccgcctacctcatcagcgtcctctacgtcgagtaccgcgcccgcaaggagaaggaaggcgtcagcttcaagaaccacgtcatccagtggttcgaagttcttgatgggctcttgggcccgtactggaaggcggncggcctcgccttcaactgcaccttcctgctcttcggctccgtcatccagctgatcgcctgtgcaagtaacatatactacattaacg

SEQ ID NO: 25621 - DNA, 1401 bp, Oryza sativa
  Clone ID: PAT_MRT4530_30490C.1
atgggggaggaggtggcaccggccaggctcggctcggcttcaagtcggccgcccgatgatggcgatgcggtggtggcgggtggttgccggcgacggcaaccggcgcgagaagcggcggtgggtggtgcgaaaagcagcggtggcgccgaaggcgacgccacgcatgcggaggacagcggcgcacacaggagagagggaaagagggaggagaaggagttttcaccggcgggcacggcggccggcgcgaaggatgaaggcggcggcgacgacccgacgagcggaggggcagacgggcggcggttgcacctacggaggaaaatagagaggagtggcggctgtgatatcggtggttgtgatggagttgctggaggtggaggtggcatggtttgtgttggtggcggcggaacactgtgcggtggtggcacccgcggcggtgtacgtgatggtgttggagctggagcgggcattggagttggttcctcgctaacaggagttggcggtggaaccctttgtggtggtggtgcatgtggaggtgcacgtgatggtgtcggagtaaggttaataggtgttggtgctggagcgggtgccggtgttggttgttcattaaccggaggtggtgatggaatcctttgtggtggtggtgcgcgtggaggtgcacgtgatggtgtcggagtaacagtaacaggggttggtgctggagcgggtgccggtgttggttcttcactaaccggagatggcggtggaaccctttgtggtggtggtgcacggggaggtgcacgtgatggtgtcggagtaaggttaacaggtgtaggtgcaggagagggttccgcagttggttcttcgttaaccggaggtggtggtggaaccctttgtggtgccggtgcacgtgatggtgttggtgtcacattggtcggtgttggtgcttggccgggtgccgatgttggctcttcgctaaccgaaggtggcggtggaaccctttgcggtggtgatgcacgaggaggtgcacgtgatggtgttggagaaacatttataggggttggcgctggagcaggtgccggtgttggttcttcactaaccggagatggcggtggaaccctttgcggtggtggcgcacgcggaggtgcgcctggtggggttggttctggtggtggtgtggcacttactggtggtggcggtggtattgtttgtggtggtggtggtagcggcggcgggggtgcacgtggcgggttccttctgggaggtgttgcaggttgctgggccttggcaaaagaagagagcgtgagaatcacgacggcgaacaggatggcattggggactgccatggctactcgccgtggtgctcggctctttcctgcctttgaactgatgaagtatatgaagctatttataggctaccgctag

SEQ ID NO: 25622 - DNA, 1562 bp, Oryza sativa
  Clone ID: PAT_MRT4530_30491C.1
atctagcttatagattataatccgccaccgccctccccccccccacccaccccccggcctaatcaacctgcaacacctcccagaaggaacccgccacgtgcacccccgccgccgctaccaccaccaccacaaacaataccaccgccaccaccagtaagtgccacaccaccaccagaaccaaccccaccaggcgcacctccgcgtgcgccaccaccgcaaagggttccaccgccatctccggttagtgaagaaccaacaccggcacctgctccagcgccaacccctataaatgtttctccaacaccatcacgtgcacctcctcgtgcatcaccaccgcaaagggttccaccgccaccttcggttagcgaagagccaacatcggcacccggccaagcaccaacaccgaccaatgtgacaccaacaccatcacgtgcaccggcaccacaaagggttccaccaccacctccggttaacgaagaaccaactgcggaaccctctcctgcacctacacctgttaaccttactccgacaccatcacgtgcacctccccgtgcaccaccaccacaaagggttccaccgccatctccggttagtgaagaaccaacaccggcacccgctccagcaccaacccctgttactgttactccgacaccatcacgtgcacctccacgcgcaccaccaccacaaaggattccatcaccacctccggttaatgaacaaccaacaccggcacccgctccagcaccaacacctattaaccttactccgacaccatcacgtgcacctccacatgcaccaccaccacaaagggttccaccgccaactcctgttagcgaggaaccaactccaatgcccgctccagctccaacaccatcacgtacaccgccgcgggtgccaccaccgcacagtgttccgccgccaccaacacaaaccatgccacctccacctccagcaactccatcacaaccaccgatatcacagccgccacctccatcccaaccgccgcccacgctgccacttcctccgcatccgtgcccacacgcccccccaagtcgccgcccacgtcgcccgcccccttcaccgccgccgctcccgagctctccaccgctcccgcaccgtgcacccatccatcgccgccatctccacttctccggccaccgctcgtcgccgctagagccgccgcagaatcaagctgccgccgcggttagcttcgccgccgccaaagctaccccggccgccgcatccccatccaatcccgccgccgccgccgtgggcttcctcccaaccactaactcctctctattttcctccgtaggtgcaaccgccgcccgtctgcccctccgctcgtcgggtcgtcgccgccgccttcatccttcgcgccggccgccgtgcccgccggtgaaaactccttctcctccctctttccctccgagccgagcctggccggtgccacctcctcccccatgaaccgccgcccggtgggccccgcctgccagtaccccctccctctcccttgtgcctctgacccatgggtcccgcatgtcggcgccgccccctccttg

SEQ ID NO: 25623 - DNA, 269 bp, Oryza sativa
  Clone ID: PAT_MRT4530_30492C.1
gttcgaatctggaattttcaccggtgttcatgaaatttacaacacaacaccttggtgaactttcttcagcacacgcgtctttacgtttttgggccttttctttttcttcatgaatcgatgatgtttcctctttctcttttacaatggtttttttttgggaaacctaatgaatacaaatgtcaatagtcaaaaaggccccaaaaaccaagcactatcgctattcgctaggtccattgcagtccacgacgttgccgctgaagagcttgagc

SEQ ID NO: 25624 - DNA, 769 bp, Oryza sativa
  Clone ID: PAT_MRT4530_30493C.1
agaacaaataccctcttatccataaattaaagttgcagcatacaacaagacattctgtaaacaccaatgttattggcatggcagtaacatgtcaaacaaatgtctaataatgtccaaaagtctaatgcttaaacatcggggtaataatcaacaacattcagtattcgtactcttgtcgacacacacacaccaacacgttacaaatcttccaaacaggagcacctggcagttacattggtgactcctggcttcaactgatctttgaaaagtttacaatggtaattaacctcggttggcttcaatgtgcatgccaaaaggatggaaaatacaacgaaaaagggatggtgttttaatctccagacaagcaccgttggcagcggcattcgaagccaaatccttcggcgagaatcctctgacgggcatcgacgtccatgctcgcgtcaatgtagcagatgcgcagctcttcaccttcttcgatgttgcggagggcctttaatctcgcgtctgcgctggccaaccaaactatgtgagtatttggatcacagtcatggttatagaaagagggaagcatatagacagcattgccaactgccgcatcacaagatactgaggctactgctgaggatagaaggttctcatatgaacttgcaaccagttcaatgcggaatgcatttatgcgtatccttgccagcacattgatgtaccactctttggtcaaaactgcagtggtcatcaaacaaagaccaatccgctttcttttcaacgccat

SEQ ID NO: 25625 - DNA, 489 bp, Oryza sativa
  Clone ID: PAT_MRT4530_30494C.1
atggggcaccggcgtgaccgcctcgaggtcagcggcatggaggaggagacggcgacaatgatagcagcggagagtcggccaaaggcgagacggcgagccgacaccagccctggtgatgacgacgacgacgacgacgacgagtggccgcggcgagttcttgtcctctcctccacgtatccaccacagggagaggtggcgaaaggcgagacggcgctggccctggtgacgacgacgacgaggagtggcggcggtgagtctgggcggtggagctcgagctgcgccgccgttgcccctcagccgtcgtggatcttctccctccacacccctcagccgccgccgccgctgcttccctcatcccgcgccggcgccgcctcagccgacaccgctccctccctccgcgcccctcagtcgtcgccgccgccactccctccctccgccccctcagtcgccgccgccgccccctcagcgccgccgccacaagtcgagtga

SEQ ID NO: 25626 - DNA, 3465 bp, Oryza sativa
  Clone ID: PAT_MRT4530_30495C.1
atggacctcctcatcgcgcagatcaacaccgacctccgctcgtcggacgcgctgcggcagtcgtccgcgctcctgcaggcgctgcagcagtgcgccgccggccgcgacgtctccgcgctcgcccgcaccgtcgccaccgagatcctgtcggcgccctcctccgccgtgtgcaagcgcctcgcgctcgacctcctgcgcgcgctgccgctgccccccgacctcctcgacccgctcctcctctcctccctccgctccgacctctccttccccgaccccgacgtcgccgcctcctccattgcctcgttcccctcgctcccttcccaccttctcccctccctcctctcctccgcccacgccgacatcgccgccgctctctcgtcgtccgccgagtcactccgtctcgccgccgtcacctcgttatcctctctcctcccgcgtgatgacctcgcgctcatgtgctccactaatccctcgctcatggggcacgctaccacttggtgggggcggctggcggagcttgcattggaccctgcggatgctgtggctgccacagcgtttgaggcgcttgctcggctcttccaggagctggatgcccggcggatgagccggcttgccggggacaagcttgttgatggagagggcgcgcttgccgtgcgtgctcagtgggcagctgaagccatcaatttcatttggtcccggcgaaacatgctcattgcacgctccatggttatgccagtagagcgcttccgggtcaccgtgtaccctattgtgcacgcagcgaaaatggttgcttctggcatggtgaacacattgcggcagattgccaagccaggggacactacaatagatgacagtgtggagtcgagcgcggagaagctggttggggtgtcggatatcatctcgcacttgctgcctttcctcagctcactggatccaccattggttttcgaggtggggataaatatgttggcacttgcagatgtgcctggaggcaagccggagtgggcttcagctgccactactgcaattttgacactttgggaccggcaagagttctcatcgatgagggaaaccattgtcagagccgtcgtgactaatctccatttactcgatcttggaatgcaggtgtctctgttcaaaaggctgcttcaaatggtgaggaatttgagagcagaatcagatcgtatgcatgcattggcatgtatttgtcggactgctctttgtgttgatctttttgcaaaagagagtgttagaagaggtcagaagcctgttccaggaacagatgtgatctcactatttgaggatgcaaatgtgaagggtgatctaaacagcataacgagcaagagcttgttcagagaggagctagtcgcttccctagtcgaaagttgtttccagctatcactccccctacctgagcagaagaattctggcacagagagcagagttataggagcattagcttatggaactggatatggtgcattgaattggacagaacctgctttggatgtggtggaagtttgcaggccttgtgttctttgggactgtggtgggcgtacctatgcaattgattgctatctgaagttgcttgtacggctttgccatatatatgatactagaggtggtgtaaagacaatcaaagctggtgcatctcaagatcagattctaaatgagacaaggcttagaaatttgcagctacagcttatcaaggatcttcgtgaggttcatacaccaagaatttcaggacgattgatatgggcaatttctgaacattttgatcttgaaggtctggatcctcttttagctgatgacccagaggatccattgaatatcatcatatctaacatgcataagattctattcaagatcgattcatctacaactacctcaagtaggatacaagatgtgcagtctgtcctcatatgcgctcaacgtttgggatcgagaaatgcaagagcaggccagctcctcactaaagaattggaggagttcagggcaagtacttcagctgattctgtcaccaagcatcagtcgcgttatgtcttgcaaataataaaatatctaacgaaccatcctgataacaggtgggttggtgtaggtgatgctacaggggattatccatttagccaccacaaacttactgttcagtttttagaggcatctgcagcacaagataggaaattggaaggattagttcacaaggccatcgaagagctttggaggccaaatcccactcagttgactctcctacaaatgaaggggattggtgctttgcacaaagagcttccaaaaacactttctttgactggcagcagtgatccatgctatattgaggcatatcatctggcagatccaactgatgggagaatcaccttacatctaaagattttaaatttgactgagctggaactccacagggttgatatcagagttggtctctctggagcactgtattatatggatggattctcccgcacagttcggcacctacgtaatcttgtttcccaggatccagtccaaagtagtgtaactgttggagtttcgcactttgagagatgctccctctgggttcaagtcttgtattacccattttatggaagtggagggtctgcagactatgaaggagattatgcagaggaggactcacaaacagttaggcagaaacgctcacttaggccggagcttggtgagccagttgttttgcggtgccagccctacaagatcccccttgctgaacttctcttgccatatgagtgctccccagttgagtatttccggctatggccaagcttgccagccatggtggagtgcactggcacatacacatatgaaggtagtggtttcaaggccactgctgctcagcagtacgacagctctcctttcctcagtgggttgaagtcgatttcttctaagcccttccatcaagtctgctctcatttcatccgaacagtagccgggttccagttatgttatgccgcgaagacatggtttggtgggtttgtgggcatgatgatctttggcgcaagcgaggtcagccggaatgttgatcttggcgatgacacggccacaatgatctgcaaattcgtcgtgcgtgcctccgatgaatccatcacaagagagatccaatcagacctccagggctggctggatgacatcaccgacggcgccgtggaatacatgccggaggaagaggtgaagagcgcggcggctgagcggctgaaggtttccatggagagaatagccctgctcaaggcggccaagccgaaggtgccaccggcgaaaaccaaggaagaagaggaagaggagaagaaggagcaagaggacctggacgagtttgggaaccccaagggcccctcgacgctttccaagctgacggcggaggaggccgagcaccgtgcgctccaggccgccgtgctgcaggagtggcaccagctgtgcaaggagaaagccttgaaagcacagtga

SEQ ID NO: 25627 - DNA, 645 bp, Oryza sativa
  Clone ID: PAT_MRT4530_30496C.1
atgaacgctctactattgacaaagaattctgtgcgcaatgtatgtgctgagattgcacaggacaacctgcaagatgatgtaaaaaagaccatggaactattccaaaagctttcaaagtcagaccctgacttcaaattttcagtacagcttgatgaggagaacaagataaaatcattgatgtggtgcagtggccgaagtcggaggatgtatagccatttcggtgatgcagttacgtttgacactacacaccaaacaaacttctatgacatgacttttggtatttgctggtgttttgctgacaacgaagacaaagaaagctttgagtgggcattttcagagtttattaacctaatgggtggccctccgcccatgaccatcctgactgatcaagctcccgctatggcagctgcaataaggaaggtatatccccatccacagacagtgcacaggtggtgcaaatggcatgtactgaaggacacacaaacggggattgatcaagtgtacgtgaacgacaaggaattcaaaaatgagttccagaagatagtaaacgaaatgatgactattgaagagttcaatgaaggatggaacatcactaattttgagatacaatctctagaagaatcctttcctgagtcgtgcctttga

SEQ ID NO: 25628 - DNA, 320 bp, Oryza sativa
  Clone ID: PAT_MRT4530_30497C.1
ttgcttttggggactttgcttttaactgcacggcctgcggaagatgaaacaatcgatggcctaactaaccaccagcattattgtgaaggacggcttcatgagacatatgattcactgctggacgataaggacatacaagcaatcataaatgtattggctacaggatgggataggtcattatctgcaaaggcggatggacacgaacaaagcgggaagagattatgttaagaacacctgaatggtagacaatagaaatttataccatgaacagcctgctggtatcacggataaaagtcaatccaataatgcagaggactggc

SEQ ID NO: 25629 - DNA, 449 bp, Oryza sativa
  Clone ID: PAT_MRT4530_30498C.1
accggcgcaacggttcccctccctaagaagacgcatggcggaagcggtgtggtagaagaggcggcgcggcctcctcctcccacgccgcggcggcacggcctcctccccgtcgaccgtgccgctgatcctgaccccaccggcgccgccgcggtcagctccgtcatcgatcgacgcggcggcggacggatccgcctttcccgacggcgggggcggcgagggcggcgggaacagacggcagcgagggcgaagcgggtacgggaacagtggactcttgtgtgattcctctcctgtgttcttgtgtgattcctctcctctttgtgttcttgggtgattcatacttgtgtgatttctcttgtgttcttgtgtgattcctctcgtgttcttgtgtgattggcaacgaaatcggtggcgggaagaggagatttgggcgtgaaaaaaaaaaaaaaaaa

SEQ ID NO: 25630 - DNA, 558 bp, Oryza sativa
  Clone ID: PAT_MRT4530_30499C.1
caaacaagagtgtatgtatagctaattaagtgaaggtttcaccaagtatgaacagccagaaactgggtgcggcagcatagtggagtaatcgggtaggtagctttatgtggtactgaaggaatgcactgatcaggcatgtacagaagcagcagcagctgggattgggctggtaaaatttaggcgaatggtcgtgaaagtaaatgaatcagaaggttcctagccttgttaagcaaggcttccccacctaaattttaaaacgacatggcagctaaaaacccaacaccgcccattccctcctatctagccagtgcgccattataagcattcgttacctccgtatttccatgcactgcactgcactctcaccagctcttagttctccttcccctgccgctggtcacgcagcaaacatggccgtcctgccggagtcacgccggctctccctgctcctcatggccgcctgcttcctgcttcaggctctcagcgcccacgccatcacccggcattacaagttcaatgtgaggatatatcgtcatcaaactttgccgcatgataaca

SEQ ID NO: 25631 - DNA, 2016 bp, Oryza sativa
  Clone ID: PAT_MRT4530_3049C.1
ccttcgtggcaacatgactttgccactgttcctgggcgacatcgccttatcaccgaccggctcgccttcgccgccaccgactggggtcttcgcctacacggttggttggtcatatcgtcgttgttggacgtctatgtcttcaccgccggcttgccttcgctaccgctgactggtgtctccgcctgcacggctggcctactttgctgccattgatgggcgtccacgtcttcgtcaccgaccggccgtctcgtctactaccgacggctggcctattatgccaccgttgttgggcatctacatcttcaccaccggcctgccttcatcgccgccgactggtatatctgcctacacggttggttggtcacaccaccattgttgggtgtctacatcttcatcgctggcctgccttcatcgctgccgactagtgtctccgtctacacggttggttggtcacaccaccgttgttgagtgtcttcgtcttcaccaccagcatgcctttgtcgccactgactgctgttctcgcctacacggttggctggtcacaccaccgttgttgcgcgtttatgtcatcaccactggccgtcgccgactggcgttttcgcctacacggttggttggtcacaccaccgttgttgggcgtctataacatcaccaccggcttgctgtcgtcgccgccgactggtatcctcgcctacacggtcgggtggtcacaccgctgttgttgggcgtcgttgtcttcaccgaccggccaccttgttcgccgactggtgtcttcgcctatatggttggttggtcacaccaccgttgttgggcgtctacgtcttcaccgctggcttgccttcgccgccaccgactggtgtcgccgcctgcatggctggcctattatgccaccgttgttgggcgtctatgtcttcaccatcggcttgccttcgttgccgccgactggtgtcttcgcctgcatggctggcctattctgctgccattgttgggcgtctacgccttcaccaaccgaccgcctcatacaccaccgactggtgttttcgcctatatggttggttggtcacaccaccgttgttgggcatttacgtcttcaccgccggcttgccttcgccgccgccgactgatgtctccgcctgcacgcctggcctattatgctgccgttgttggacgtctacatcttcaccaaccggccgcttcgtatgacgccaactggtgctatcgtcttcacggctggccacgtcaccgccaccgctaataggcgtcatcatattcaacgcaagctgtctacgtctgctgtcgactgctgcgcgtcttcgtcatcattgactagcgtcatcgtcatcgccggcttgccttcgccgccggccatggtgtcttcactttcatggctggcatattttgccaccgttagaggacatcttcgttttcgttatcattctacttcttccagtgacttcatctttattatctttggcaccggcaaactctattgccgctactttgcaagttttgctacttcaccaaccacgacgtctacatgagcctcgacatctcggcatgcgtcatgaaatttgacgtcgtgctaatctactactacaagtggttctctaattttcaagaattctactcggacatcttcaacacgtatcttcattcaagcaatggctactcgacgacaagctacagtctttgactctatgttcagttgtttcccaactaaccaaagagtcgggggctacgcaaatacaagactctcaaaattcgacaagctttatgtcaagatgaagcaatcaactaatcagccaacgagttctatggaatctacttcgggagtcataagttttgtctttgctccagagcaagctttctacttcatcaactccaattatttcaccgattcaacgagttggacaacatcatctactttcctctaagtgaagcatatgcaacagctataacaccaagttctactgtcatcttcataaatcaagaggcgttccatcaatttacattatg

SEQ ID NO: 25632 - DNA, 421 bp, Oryza sativa
  unsure (1)..(421): unsure at all n locations
  Clone ID: PAT_MRT4530_304C.1
ccgaggtgtgctctgtgtgacaccactgggacccggagtgtgcgagagggagatgcccacaggcctgaaactgtggccacaccaccctgattgtgtgtgagctgcgggcactgagaganggctgtgatcctgggtgtggccccacagatgagtgcaacagacccactgatgataatataaggacccactgtgtgtgaccccttggctgagatgtgctgatggtgtgtgtgtgtgggtggtgacctgcgatnggtgtgncgtgtgtcgtgccctcgagtgtgcacgtgagtgtaccctctggtggtgaagcgtggctgtggtgaatggtgaaatgaacaccggagtgtgggtgggatgtgggggatgatgattgcgccaaaggaaccgatgctgtattgaatgccccataaaaaaaaaaaaa

SEQ ID NO: 25633 - DNA, 528 bp, Oryza sativa
  Clone ID: PAT_MRT4530_30500C.1
atgggaagtcgcggcgaggaggcgtccctggcggcggcggctagcgcggtggcggaggctcgaccaggggacgcctccaccgcggcgacctcgccgagggagacctcgagcagccgccaccgccgcgaggaggagcgggtgggctgggccagcggcggatctagcggacgcggcgctcgtcagcgcgaggaggagcggcgagcgattcgaggtggcggcgaggaggagaaggaggaggaggaggagtccccgggaaggcgccggcgcaacggttcccctccccaagaagaggcacagcggaggcggtgtggtagaagaggcggcgcggcctcctcctcgcctcccacgccgcggcggcgtggcctcctccccgtcgaccgcgccgctgatcctgaccccaccagcgccgccgcggtcagctctgtcatcgatcgacgcggcgacggacggatccgcctttcccgacggcggggacggcaagggcggcgggaacagacggcagcgaggacgaagtgggtgcgggaatag

SEQ ID NO: 25634 - DNA, 279 bp, Oryza sativa
  Clone ID: PAT_MRT4530_30501C.1
atgcggacggatttcacggaggggacggtttccggcggtgttgggaagctgcggaatcggacggagtgggcctacttcctccccctcatctcctccaggcctccacttctctctcccatccccttctccagtgctctcatccccctcatccacatgaccacacggcgaaggatggtggcgtggcccacggcggcgacggaggaggcagccgatggagagaagcagaacgttgagggaggacgactgctgccgcatgcctcgctgtcttgtgactactag

SEQ ID NO: 25635 - DNA, 662 bp, Oryza sativa
  unsure (1)..(662): unsure at all n locations
  Clone ID: PAT_MRT4530_30502C.1
ctaccccttccaccccttcctctctcgcgtgagacttctcctctcctcgagtactactcttctcctctcacgccgggaggcgacggcgctagcagttgccgcctcgttgtcgtggtggcggcgccgccgccttgcctccttcccctccctctctatccctcgccgcacctccttctcctccctcaccgcgacgccgacgggaagccgcggcgaggaggcgtccccggcggcggcggctggcgcggtggcggaggctcgaccgggggacgcctccaccgcggcgacctcgccgagggagacctcgagcagccgccgttgccgcgaggaggagcgagtgggctgggccggcggcggatctggcggacgcggcgctcgtcggcgtgaggagcggcgagtgattcgagacagcggcgaggaggagtccccgagaaggcaccggcgcaacggttcccctccctaagaagaggcatggcggaagcggtgtggtagaagaggcggcgcggcctcctcctcccacgcgggggcggggnnacggcctcctccccgtagaccgtgccgttgatcctgacccccccggcgccgccgcggncngctccggcctcgntcggcgcggcggcggccggntccgcctttcccgncggcgggggcggcgggggcggcgg

SEQ ID NO: 25636 - DNA, 204 bp, Oryza sativa
  Clone ID: PAT_MRT4530_30503C.1
atgtctcgtcaaatgttgccattatacacttctacggcccgtccactgtctcttttctctattgtcattgagattttaaaaattgaacataattatcgattgggttcatttttactttctggaagtcccaccaaatcaagtcccggcaatcaccttacccgtttgcttcacgggcggcctgtcatccctccttttaatcgtcat

SEQ ID NO: 25637 - DNA, 2356 bp, Oryza sativa
  Clone ID: PAT_MRT4530_30504C.1
gctgccttgccttccctgccatggccgcgatgtatcgtcccgatccggcgaaccccgccgcccgccgcccgcgcctcgtcgtgctcctcctcgttgccttcttcgccctccagctgctcgtcttcctcgccttccgcggcgcgccctccccgagctcccccgatgccgccgttgaccgcgtgccggtgtcggcgcgccgtgacggggaggactccggctgcgtgggcgggctagtgtacgtctacgacctcccgccggtcttcaacgaggatctgctcgccctgtgcgaagtgctcgcgccgatgtactcgctgtgcccgtacctcgccaacgacgggctcgggttcccggcgaaggggggcaaccagtcggagttcccgccggccgagctggttgggtcgtggtactcctccgaccagttcgcgctcgagcacatcgtccaccgccgcctgctctcgcaccggtgccgcaccaccgatccggcccgcgccacggcgttcttcgtgccattctacgcggggctggccgtcgggcgccacctgtgggcgaccaacgccaccgacgccgaccgcgacagggactgcctcgcgctgctgtcgtggctccacgcgcagccgtactacaagcggtctaatggctgggaccacttcatcgcgctcggccgcatcacctgggacttccgccgctcgccggacggcgggtggggcggaagcttcctcctcatgcccgggctggccaacaccacccgcctggtcatcgagcgcgatccctgggacgccatggacgtcggcatcccttacccgaccagcttccacccgcgcaccgccgccgacgtgcgcgcgtggcagcagtacgcctcgtcccgctctcgccccaagctcttcgccttcgccggcgccccgcgatcggcaatcaagggggatttccgcgggctgctgctcgaggagtgccaggcggccggggacgcgtgcggcgcgctggactgcggcgagggcaggtgcatcaagcaaaacgagctcgtcatggagctgttcctgggcgcgcgcttctgcctgcagccgcgcggggacagcttcacccggcggtcgctgttcgactgcatggtgggcggcgccgtgccggtgctcttctggcggcggagcgcgtaccggcagtacgggtggtacgtgccggtgggcaacagtcaggaggaagaatggtccgtgttcatcgaccgcgacgagctgcgcgccggcaatgtcaccgttcgtggcgttcttgcggccatcccggaagcgaaggtgcgggagatgaggaatcgcgtggtggagatgatacccaagctggtgtactccgctgcagacaaggaggggctcggcgacggcatgaaggacgccgtggacgtcatgatcgacggcatgctgcggcgagcggctgagcagcgccggagttggaggaaagtgtgtgaattacgagtttacgacacagttgccgcctcgtcgtcatggtggcggcgccgccgcctcgcctccttcccctccctctctatccctcgccgcgcctccttctccttcctcgccacgacgccgacgggaagccgccgccgaggaggcgtccccggcggcggcggctggcgccggtggcggaggctcgacccgagggacgcctccaccgcgggcgacctcgccgagggagacctcgagcagccgccgccaccgtgaggaggagcgggtaggctgggccggcggcggatctggcggacgcggcgctcgtcggcgcgaggaggagcggcgagcgattcgaggcagcggcgaggaggaggaggagtccccgggaaggcaccggcgcaacggttcccctccccaagaagaggcacggcggaggcggtgtggtagaagaggcggcgcggcctcctcctcgcctcccacgccgccgcggcgcggcctcctccctgtcgaccgcgccgctgatcctgaccccaccggcgccgccgcagtcagctccgtcatcaatcgacgcggcggcggatggatccgcctttcccgacggcgggggcggcgagggcggcgggaacagacggcggcgaggacgaagcggtacgatttcggcccgtttcagtaccctgtttgtactgggcttcaagcctacgagattaagctcctcttcctgggcctaaagcctacaactccctttgacccaaacttatagccggaccagatcaagttgatcaatgtgtttaacacacaatttttgatcctttttcagaaggaaagaaaaggagtccctaccgcttggtacattttgtattgtcgtgagagtaggtgttaattaggagttttcgacacaggtgattaatggatgaatttgtgcaattccc

SEQ ID NO: 25638 - DNA, 463 bp, Oryza sativa
  Clone ID: PAT_MRT4530_30505C.1
gccccaccacatcccccggtatggttgaggactacgaggagaccatcccagatccccctggaccaagcctggtcgtcgtcgtcgtcggagtactacgcggccgagggttcgtcgtcggaccaggggtactacggcgagggttcagtcggaggagggctactacggcgagcaagcaacaccaacccggggatgacccgcgtgaggctgaccagggcgagccaagtacgcggcgcagcatccgtcgaatgtccgggtttgagccccacagtcagcatcttcccaccgccaagtactaggctagctggcttccctcatagctagtaggatcacaccgttgctgtgttgcatgcaacgagatagtgattcaaacaaaataatgaataatgaaatggttttgaaaacaaaaatagctggtgataaagtacatatatatgattttgtggcgttctggacaaaaaaaaaa

SEQ ID NO: 25639 - DNA, 197 bp, Oryza sativa
  Clone ID: PAT_MRT4530_30506C.1
tgttgttgaggggggggagggcgaatcagtcacagggtggtttttgagccagcgccaggcgtatccatgagcccatacactagtgcagcagaatggatggcgatcaatcgctggaagaagtacctagtgacgacatggcagtaagactggccacacatacgctgtggagtaccggacgcatcgctcaaaggggcgat

SEQ ID NO: 25640 - DNA, 154 bp, Oryza sativa
  Clone ID: PAT_MRT4530_30507C.1
ccacgcacaaattaaatttcttcgctttcctttcacctggttaacacatatatccatttgcggctagcatgaccataatcggttcgacccagatttgcggtagccacgcttcatgcatgtaagagagccttaatattttcgctgctgggttggg

SEQ ID NO: 25641 - DNA, 153 bp, Oryza sativa
  Clone ID: PAT_MRT4530_30508C.1
ttcggcacgaggcaagcacaccgaaattccaacgagaaccccacgcattattccgcgacgcgaccacgggaagacacgggacacggaagaggggagagagcgagagcgagatagagttcgagttctacgcccaaaaccctagcaagctccccc

SEQ ID NO: 25642 - DNA, 393 bp, Oryza sativa
  Clone ID: PAT_MRT4530_30509C.1
atggaggatttctgcaaatcggtgctggctttggtgacccaggaggggagttcgtcggggcggggagctgtgactgctgcggattcacggcggattgcacggccccatatcgctagcattcgggcgcggtacgaggggaggtatgtctgcgggctttgcacggacactatcaacgaggagcttggctgtgcctcttcgtccattttaccggcggaggcggtcgatcaccacgccttcgtctgcgacatcggacgagtctccaccgtgccaccgtcggtggacgagagcgtggacgggatgtttgtcgccgttcttctcttgctccgccgtaggctgggatccctaccgtcggctcgctggcaccgttaccggaaaagggaggcgtcgagatga

SEQ ID NO: 25643 - DNA, 708 bp, Oryza sativa
  Clone ID: PAT_MRT4530_3050C.1
atggagccgagatctccgcggccgattcctccctctccggccgccctctctccctcccgacgctatataatcgctcctcgtgcttcgctcctccgtttccgccgctcgccgctcactctccccgtcggaatcgtgctcgcgccgtcgcaccttctctccgccgtcgccgccgagctccggttcgccgccgtcgtcgctccggacctcctcccgtctcggcgtcacctccatcggcttcgccgcgtcctcgtcgacctcgtccgcgcctccgtttcgcccgccgaccgtcggagcgccgtcgtcctcgtcgtcccgaaccgcgccgccgccttcctccgctccggtcgtcgtttccgccgtcctcgtctacccggggtgagccgtggaccgctccgttcgcttcccccttccctcctctctctcgggtgccgctccgccgcgccgttgggtcgccggcggcgaccatcgggggcgcggggcgcgccgcctcccttcgggccgtgccgggcgaggccgccttcgggcgcgccccgcggctgccaagtgggcccggccgtcagccgcccgcggccgcgggtgcggctgacgcgcgggacccacggcgccggccgccgccagccgcgtgctcccggtccaccgtggaccgagaggctgacgcgtgggccccactcccgtggacccggtccgcgcgccctctccctcggctga

SEQ ID NO: 25644 - DNA, 256 bp, Oryza sativa
  Clone ID: PAT_MRT4530_30510C.1
cggacgcgtgggcggacgcgtgggctgttcgcgaatcttctcgtcggcgtcgtcgtcgtcgttctcttctctccgccgggagaagcgcatggcggagcgcggaggcggtggtcatgggggaccacgaggcccgcggttttgacttggggggaatgtggagaaaaatctctcccggggggggatattcggctttaaggaccaggagaccggcgacctttcttacatggggggcaactctttccagctctgcgagaac

SEQ ID NO: 25645 - DNA, 388 bp, Oryza sativa
  Clone ID: PAT_MRT4530_30511C.1
gaaaatgaaatagcaaacagcccggccgttgctttttatttaaggggggggaaaatccaaaaaataaagaaagaagaagaagaagagaagagaagaggggaaaatgaaaggggagaagatcgatcgggggcccgaagtatccatggcatgtatgcaatcggccccctagagatgtgatgtgactggatcggagctagacaagggggggcttgccccggcccatggtgaaaccccgggtgccgccgggcatcccggggccccgggcctgaggaggccgcttgcctggcctggaggggcccttggggcgggggctcgccggcagcttgagaccagggctcgccggcttaaagtgccccacactgcccgcgggggcccactgcgggctgtg

SEQ ID NO: 25646 - DNA, 530 bp, Oryza sativa
  Clone ID: PAT_MRT4530_30512C.1
gggacggcggcgcgtggggacgccgcagcgaggtcactgtcgccctcgccgtcgcttggtccatacccagtcttcctcccacgtctacagcatcgtcagcccaatcgagcggcgtcggcgcgcggcgcttgacggagcccacggggatggggtggtcgccgtcgtcgcagacctccaccggcgcagcagcccccggcgagctaagccgccttccctaactgcgtcggtgctgccctcggccgccatcacgagctctgtggcgactagtcctcgattccgcaggcggcgcgcagctcctcctccgcatataccggcgtgcatggtcttcgccggcgagcacgtctcctcttgccatccccgtcatccccggctccccgttgccgcgccgcatctggctctgcgccacgccgcgcccgcgacatcaaaggagagagagtttagtactacgtgtactccatatgacatgtggggcccatgttatttttttattttttctcggattggaatgccaaaaaaaaaaaaaaaaaaaa

SEQ ID NO: 25647 - DNA, 525 bp, Oryza sativa
  Clone ID: PAT_MRT4530_30513C.1
cgccagcctggggctgccggccggccgtcgtcctcgccgtgagaaggcacatctgctgtcgccggttgtagagtccggctcccctgcgccctgcgtcggccagaagcgtggtggagaacactgtccgcaggcgccatattggagcggatggctcggtgctcgactcctacgtaggcaagcgcaagattgcgctgccctcgaagccgcctgcgccggccgacgatgaaaggcggcgctcggcctaccggattgctgccgctgaagtgagggctactgccgacgtgcccacactgtgcagatgggaggaggcgaaccactgggctgtcggaggaggccaatgcgctgcggtgcgcctatcgaggaacaggaacaggtgtgccgtcgctctaggggtggcctctgcgatcggcatcctttgtgaagagcgtggctaccacctcctgactgtcgtgggacgtgaggtgatattcactgtgagccttctctttttctggtctaatgcctcgtgatttatgaacatgcctc

SEQ ID NO: 25648 - DNA, 901 bp, Oryza sativa
  Clone ID: PAT_MRT4530_30514C.1
ccacgcgtccggcctctttctcttgaagatgcagtgaactgcatctacgactctgttatatatgtcaatgaggttgcaaattcatagtaggaaaatgcatttggctatagctatattttgcatctttatttatgccaattcaaatgctatataagatatatattgcacacctatagaagtattgcttgcgtcaatagtactatacaataatcaatacaacacatatctttttctttaaaacttccattgattaaaacaatctaatcggctgcgagtggtataggcagtctgcatgcgttgctcgtgcgctatgcagactgattgttcttgcaggtgagcagcacattttctgaaagcttcatccagggtcccaactgaatcgaagtacgctacgctgctcacaacagtcacagcagatgcatggtcctggcatggtggcgtacgtgtggccacccaatcatatatatctatcaacctgtcaagagagtatatatatgaggcaaatcacatttgaagacaaatttgctggatttggagcatctcaagccataaccgatgcccagctcggcagctctccaggcctccacgttgcatgaagagtgccacctatttcgacggatcaaagaatacatcaccagcccgtcaacacgcgcacctcggatttggtgtttttacttaaagtgagttaagctgcatgcttcttgcagtcgcagatccgggtccggcctgcccagaacctgtctctccgctgcgttaaaggagtaattagcatactccctccgtgttcgtaaataaagtcgtttagaacaatatttaagttaaatcttgataatataaatcataaataactctcaagttgttgagtttgaaaatataaaaattatatgaatagatttgtctt

SEQ ID NO: 25649 - DNA, 1761 bp, Oryza sativa
  Clone ID: PAT_MRT4530_30515C.1
atgaagccatttgcaggaatgtccctctcgtcgttcgctcggttgctgttgctgctgatcgtgctgcaccaccaaccccgtctgcttgaagcggataacctcaacctcacggccggatccactctgaggcctcctcagtacatcaccagctcgtccgacgacttcgccttcggcttccgcgccatcgacgccggcctgttcctcctcgccgtatggttcaataacgacgacgacgagcacaaggcggtggtggtatggtacgcgacggatccgagctctgcgtcggcagtgacagccacggcgcagtccgtgttcagcgtcaccctcggccagctcctcctcgcggacaccaccaccggcggcggcgtgggcggcaacgtttggacgagctcgaatccaggacagccgaacgggttcttgctcgtgctgctggactcgggcaacctccagttcctcgccgccggcgacaactccgtggtgtgggagagcttccggcacccgaccgacacgctcctccctggtcagtccatgggcgctggagcaatccttcggtccaagcgcttggatgcggatttctccgctggctgcttcggcctcttcgtgcaggccgacggcaacatcgtcctgtacctcataaacctcgccggcggcggcaatgccgactccagcaaagcgtactgggcaacccggacccaacagcccggcaacaccccggacggcaacacgactctcttcttcgcctcgacggggagcatccaataccagatcaagaatggctcgttgtacgacctgacacctcccgtggcgatctccaccgccggcggcagctaccggcgcgcaacgctcgacctggacggcatcgtccgcgtgtacatccggccgaggagctccgccaacgcgtcgtggaccgtcgccgatctgttccctgccgtaggttgtggcatgtcaacccgtgccctggacggcttctgcggccccaactcgtactgcgtgtccggcgacgacggccggctcgactgcgcgtgcccgaccggctactcctccgtcgacacgaagctacggtacatgggttgccggccgctgttcgcgccacagagctgcgacgtggtgagcagcacggccgaattcgggattaccaagctgcccaacaccacctggacggcctcgccgtacgtgatgtatgagcgcacggcggaggagcggtgcgccgacatgtgcttgagcgactgcttctgcgtggcggcgctgttcgagcccgacgcaacgcgctgcaccaagatggcgtcgctcacgggctccggacagcaagggagaaacgttatgacgaaagcgctgatcaaggtctaccatggcatggccaagtcactgcaaccacctgacatcgcggtgaagaagctcatcacctccaacgagtacagcgagagggaattcctgaacgaggtgcagtccatcgggcggatccaccaccggaacctagtccgcatggttggatactgcaaggagcgggagcagcggatgctggtattcgagttcatgccgggtggttccctccgaagcatcctcttccagactccacgtccaccatggagctggcgcaccgaggccgcacttggcattgccaaggggattgagtacctgcacgaagggtgcacctctcctatcatccactgtgacatcaagcccgacaacatactgttggatgacaagaacaaccccaagatcaccgactttgggatcgccaagctacttggcgaccaatag

SEQ ID NO: 25650 - DNA, 2010 bp, Oryza sativa
  Clone ID: PAT_MRT4530_30516C.1
atgaagccatttgcaggaatgtccctctcgtcgttcgctcggttgctgttgctgctgatcgtgctgcaccaccaaccccgtctgcttgaagcggataacctcaacctcacggccggatccactctgaggcctcctcagtacatcaccagctcgtccgacgacttcgccttcggcttccgcgccatcgacgccggcctgttcctcctcgccgtatggttcaataacgacgacgacgagcacaaggcggtggtggtatggtacgcgacggatccgagctctgcgtcggcagtgacagccacggcgcagtccgtgttcagcgtcaccctcggccagctcctcctcgcggacaccaccaccggcggcggcgtgggcggcaacgtttggacgagctcgaatccaggacagccgaacgggttcttgctcgtgctgctggactcgggcaacctccagttcctcgccgccggcgacaactccgtggtgtgggagagcttccggcacccgaccgacacgctcctccctggtcagtccatgggcgctggagcaatccttcggtccaagcgcttggatgcggatttctccgctggctgcttcggcctcttcgtgcaggccgacggcaacatcgtcctgtacctcataaacctcgccggcggcggcaatgccgactccagcaaagcgtactgggcaacccggacccaacagcccggcaacaccccggacggcaacacgactctcttcttcgcctcgacggggagcatccaataccagatcaagaatggctcgttgtacgacctgacacctcccgtggcgatctccaccgccggcggcagctaccggcgcgcaacgctcgacccggacggcatcgtccgcgtgtacatccgcccgaggagctccgccaacgcgtcgtggaccgtcgccgatctgttcccagccgtaggttgtggcatgtcaacccgtgccttggacggcttctgcggccccaactcgtactgcgtcgtgtccggcgccgacagcaggctcgactgtgcgtgcccgagcaactactccttcatcgacaagaatatacgctacgagggctgccgcccagcgttcgcaccgcagagctgtgacgtggtgaacagctccgccgaattcgagatcaccaagctgcccaacaccacttggacgacctcaccgtacgtgatctacgaacgcatggcggaggagcagtgcgccgacatttgcttgcgtgactgcttctgcgtggcggcgctgttcgagcccggcgcaacccgctgcaccaagatggcgttgctggcgggctccggacggcaagagagaagcgtcacgcagaaagcgttgatcaaggttcggacgagccgcagtcctccggcgccgccatcacggggaagggtaccgttgctgccgtacataatcctcggttgcttggcgtttctgatcatattggccgccgcgaccagtcttctgctgcactggcacatgagaagaattaacaacaacgaccatgacattgtgagacacttcaccaagaaggagctccaccgagccaccaatggctttcaaaggttgctaggaaggggaggcttcggggaggtctaccatggcatggccaagtcactgcaaccacctgacatcgcggtgaagaagctcatcacctccaacgagtacagcgagagggaattcctgaacgaggtgcagtccatcgggcggatccaccaccggaacctagtccgcatggttggatactgcaaggagcgggagcagcggatgctggtattcgagttcatgccgggtggttccctccgaagcatcctcttccagactccacgtccaccatggagctggcgcaccgaggccgcacttggcattgccaaggggattgagtacctgcacgaagggtgcacctctcctatcatccactgtgacatcaagcccgacaacatactgttggatgacaagaacaaccccaagatcaccgactttgggatcgccaagctacttggcgaccaatag

SEQ ID NO: 25651 - DNA, 558 bp, Oryza sativa
  Clone ID: PAT_MRT4530_30517C.1
cccgcacggccggcgcctcctactactactacccatctctctgcttctcgccagaaagatctagaagtcgaagccctaatcctcttccgagttccgaagacaatggccggtctcaggatgaaggcgctcgcggtcgccgccatcgccgcgtccctcgtctcgtcagcggcagccgcccacgcgccggcaccggcgcccgtctccgacgccgcccccgcggtgcccctcgcggccgcctccctcgcagccgccgcgttcggctacctcttctgctagatcgatccccttcgatctgcctcgggctgatccgtttcgtcgtcgtcgtgtgcgtgtctccgtcgtcgtgtggtcgtcgcgtgggggggatttgtgtatgtaattaatgagtcggcggtggtgtgagggagggagggtgtggtttcgcgccatttctctgtggcggcggccatgtacttactcttcttttttttctctttgtatgaattgagatgatttatttgattcttttcagtttaaagaacatgagtatcgcgtactacatggtgacacttgtatgat

SEQ ID NO: 25652 - DNA, 2496 bp, Oryza sativa
  Clone ID: PAT_MRT4530_30518C.1
atgaagccatttgcaggaatatcagtctcctcgctcgctccgttgctgctgctgctcgtactgcaccaaccccaccagcttgaagcggagaaccgcaacctgacggccggaaattctcttaggcctccggagtacatcaccagcccgtccggcgacttcgcctttggcttccgcgccttggactccggcggcccggacagcttgttgttcctcctcgccgtatggttcaacgacaacacggctgcggccgaccccgtgcagcagaaggcggcggtggtatggcacgcgacggatccggacggatctggatcggcggtgacagccacgacacaatccgtgttcagcgtcaacttcggccaactctccctcgccaacaacggcagcagaaacatatggacgaacgtgaacccggcccagccgaacggatttgtgctcgtgctgctggactcgggcaacctccagttcctcaccggcggcgacaactccgtggtgtgggagagcttccggcacccgaccgacacgctccttcctggtcaatccatgggagctggagaaaaccttcggtccaagcgcacggatgcggatttctccgctggccgcttcggcctctttgtgcaggccgacggcaacatcgtcctgtacatcggcggccatgccgactcgagcagagcgtactgggcaacccggacccaacagcccagcaacacccaagacggcaacacgactctttttttcgcttccacggggagtatctactaccagatcaagaatggctcgttgtacgacctgacacctcccatggcgagctccaccgccggcggcagctaccggcgcgcgacgctcgacccggacggcgtcgtccgcgtgtacatccgcccgaggagctccgccaacgcgtcgtggaccgtcgccgatctgttcccagccgtaggttgtggcatgtcaacccgtgccttggacggcttctgcggccccaactcgtactgcgtcgtgtccggcgccgacagcaggctcgactgtgcgtgcccgagcaactactccttcatcgacaagaatatacgctacgagggctgccgcccagcgttcgcaccgcagagctgtgacgtggtgaacagctccgccgaattcgagatcaccaagctgcccaacaccacttggacgacctcaccgtacgtgatctacgaacgcatggcggaggagcagtgcgccgacatttgcttgcgtgactgcttctgcgtggcggcgctgttcgagcccggcgcaacccgctgcaccaagatggcgttgctggcgggctccggacggcaagagagaagcgtcacgcagaaagcgttgatcaaggttcggacgagccgcagtcctccggcgccgccatcacggggaagggtaccgttgctgccgtacataatcctcggttgcttggcgtttctgatcatattggccgccgcgaccagtcttctgctgcactggcacatgagaagaattaacaacaacgaccatgacattgtgagacacttcaccaagaaggagctccaccgagccaccaatggctttcaaaggttgctaggaagaggaggcttcggggaggtctaccatggggtggccaagtcgctacacccacctgacatcgcggtgaagaagctcgtcacctccaacgagtacagcgagagggagttcgcgaacgaggtgcagtccatcgggcggattcaccaccggaacctggtccgcatgttgggatactgtaaggagagggagcagcggatgctggtattcgagttcatgccgggcggctcccttcggagcttcctcttccagaccccacggccgccgtggagctggcgtgccgaggccgcactcggtatcgccaaggggatcgagtacctacacgaagggtgcaccttaccgatcatccactgcgatatcaagcccgacaacatattgttggatgataggaacaatccaaagattaccgactttgggatcgccaggctcctcggtgaccagcagatgtacacgacggtgaccaatgtgagaggaaccagagggtacattgcccctgagtggttccacagcgagaggcgcatcgacaccaaggtggacgtgtatagcttcggcgtcgtgctgctggagatgatatgctgcaggaggtgccaagacccagtaaccagccgtggcgagggcggtgacgatcatgacaactccgtggtcacactgtttggatgggcaagccagttggtcaaccatggcagagtcgaggttatcctgcatagcgatgacgacgctgtggaggatctggagagagtggagcggttcgttcgtgtggctttcttgtgtatcgagacgaatccgtcgcttcggccgatgatgcatcaggtggtgcagatgctggagggtgtggttgaggtccacgcgatgcctcatcttccgagctctatagatacattaccgtccatctctaaggattcacgtactcccaggttcttcttctccagttga

SEQ ID NO: 25653 - DNA, 393 bp, Oryza sativa
  Clone ID: PAT_MRT4530_30519C.1
ggagcgcaaacatggcggagagaaaccccctcctctcaccgagcgagcaggaaaaaaccgtccgccccaaacgcgaagaccagggagggacccccccaaacaaacatagtctggtttggaccggtaaaatgggctacacacctcgcgcccccggttgacgcggcccagaaaaaaaccccttgagagcgcgcgctgtatcacctttaacggcccccgctacccccgtttctttaaaagaagagggtcgacaccgggcgcctccgcggaagccacccccgccccctgtctgggacttctgatgcttgcgcccacccctcaaaacagggaacggacgccctgcattttaaggtcctggggaaaatatctccgggaagcctttggacttgacaaccc

SEQ ID NO: 25654 - DNA, 2318 bp, Oryza sativa
  Clone ID: PAT_MRT4530_3051C.1
gaacaaatatggcgttttatattggcatgtaacatgaacagaagaacctacaaattacgaccaagttcacatccaactcccaaacaaaagaggacgacgcaaagttgccaacaacacacatgaactgaagactccgtagcatagggaagcccctgcagggcggtaaatctagccagtgacccacgcgctgtcctaccatgtatgctgctgacctgctgtcctactacacaaaggcaagacgcccgcggggaagctagctccttttgtcaccggcccgcgcgcggcgttgcgccgttggagcccgtggctgtgatgccggtggtggcggccgaagaaatgcgccggcgaaggagcaggggccggagcgaggccggcggtggtggcgttgaacggcgtcgccgggaacggcggccaggtggcgttcggagcggcgcccgccggcggcagagggggcggcgggcactggtagcacttggtgaagagcccgaacgtgtcgatctggcggacgaagttggtcatgctggcccagccgccgaacccgaagccgaccaccagcacccacgccaccacgaacgcgttgatgatgaacgtgcccgctccatcgccccacgaaccgcggcggcggctccacggcgttctcacgagcgtgcgcggagcggaaggtgatcatgtgcgcgagggcggggatgatgtagacggtgaagctgacgaggagggagccgacggcggagttgatgggcccgaagaaggggaagatgatggcgaggaaccagatgggcacgacgacggggagcctcgcggcggcgcgcttgaagaggctgcggcagtcgtggagtccgatgagcttctcccagacgaagtagagcggcgtgcaggcgaagccgaaggtgatgaactggtggatgagcatgagcaccacggcggcgtcccggaacgccgtgcgcggcagcagcgccagcgcattcgagtgcgtgagcagctcgtccccgaacgcccagtacacgctcgccgccgacggcagcgtcagcgtcagcacgtacagcgtcgccatcaggtagatcgccttgaacttctgcggcctccacatcgcgtgcatgatctccacagtaacagcgtgcccaccgaaggtgtagagaatgtttgtggccccggtgaagtagaggaccatctttgtagggcccgagtgcttcactccatcgacctggccatggatgagggaggcgacggcgaggtaccaggccgtgtaggtggtcatgacgaggccgaggaatgaccagatccggtagttgtggaacgacgggatgaacaccgtcgtcgcgcagcacgcgccgaagatgtaggtccacgtcctcttgtccagcttgtcgttgatgtagtagatgttgctagcgcaggcgatgagctggatgacggagccgaagagtaggaaggtgcagttgaaggccaggccgacgtttctccaatgcctccccagcaggccgtccagcacctcgaaccactggatgacatggttcctgaagtccaccttctccctctccttcctggtcctgtactccacgtacaggatgctgatgagatacgccgtccagctgcccaacagcccgtagaagagctggaacagtatgccgctgagcatccccagctgggagaacgagtagggcagcgtcaggagcacctgggccacctggttggacgcgcagctgaaccaggcgtcgtaggctgagccgccgtgccagagcaggttcttcatgctgaacttgccgtcctgctcgacgcccatggccgcgcgcacctccgcctcctccttcccggcgtccgccacgatggcctcctccgcctggtcgccggccggcaccatcatcctgtcctccccggtcttcccgtctccagccgcgcgcctgcctcaggagaggaggcgaagtaaatggccgtgggagcggcacgctgccggcaaagctgcaccacgcgccggcggaatttactgtgctgtcgaccgagaggcaggcggcgcgcggagccgaaactgctgagcttctcgtggttcgagaggatcggagagattcagaggagcagttattattacttcgccgcgggctagcttttcgggatcctgatcctgcagacccgcacgccgcccttgccccttgcctctcggatcttcccaaccccggccacgactgcgcgcgcgcctccggtttttccttctccgcgaggagtgaaactctctggcacggagaggcccgagccgagccggacgtgggagttgggacggtgggaggggagaatgcaccgtgtttcacgttgatttgacgtgtgaa

SEQ ID NO: 25655 - DNA, 368 bp, Oryza sativa
  Clone ID: PAT_MRT4530_30520C.1
tgcttttcgacgataccactgacccctccccctcgctggagcgccccgtgagcgctcgcgttcgatcgatggctatcacaaggatcctgagggagccgaaggatctgcacaaggactctcccacctcatgcagatcatgtcctgtgcgctaggacatgttacattgacacgctactatgatgggaccctcacacaggccatttgctggggggggattcatgacgaacattcatttccaaccggattatactttcaaaccaccgaatgtatgtttccggaccaaggttttacacccgaacattactagcattggcaggatttgactctgcatccttaacgaacagttcagaggctgcactcaccatatc

SEQ ID NO: 25656 - DNA, 222 bp, Oryza sativa
  Clone ID: PAT_MRT4530_30521C.1
aggacaaaacacgacggcatgagggcgacgcccggacacggcctcgacggatccacgcacgacggctcaggcacagctgctccggtggcccacgaaggagctccagcatggcggcctactccggcgggcaagcgtctgctcgtcttcctcggcgacagggtaaagaaacgcctagaggaagtgtttgaggccggtggaggtccgaggttcactggacattag

SEQ ID NO: 25657 - DNA, 617 bp, Oryza sativa
  Clone ID: PAT_MRT4530_30522C.1
ggcacgaggcgaaaggaagccagtcatccatctcccccgatttaacccgacgccgtgccgctagtctggtccgccatgcctccgcctcctcctcctcccgtccagcccgtatcgacgagaccagcaaggcgccgccgcgcgcggagctctcgacgcccgccgacgacccgcccgccgtcagatccgcctgctgcatgcttcctccaggatttcagtgtgactgaacatataaattatgatgtggtggagcagtgtgttaaaaacatcctctctctaagtcgaaccagtggaggatgacagacgcaaacgactatctgcaattcaggagttatcaaattccattcctaaagttgcagccttaagaggtgcggtttcccatccttgtggatccttttgttcgtagcttgggctcttttgctgggcttttggtgatatccgttcgcctccctggtcactcatgctcaggcatcctgttggcgccttctgccgtggcccttggtctctgcgcgcgtcatttgtggcgtgttgccggatatgtgcaatttattccttttgcaagagttccagttcttcagtatgtgagcaacaccttcggaatttcctgcgatatatctgtg

SEQ ID NO: 25658 - DNA, 599 bp, Oryza sativa
  Clone ID: PAT_MRT4530_30523C.1
gcggcggcggtggaagggaagggcgctgcggggatgacgcaggcgaaggacgggtcgtcgggggcggcggtgaggtaggtgtcgttataccccacccctcatcagtacattaaacaagtgcctaactcatgtgaatcttatatcgcttgcagcctgcagcaaacacctagtttaatgattttctcttttagtttggatatctgtctgctcaacttatctccttttttgtagcaatgtccaatttggtgatttacatgaggatagttcatcagctgtatgttcagcaattaaataagtcaatacatttgatgttgggattttacattctaggttctctgttgtgattgtaaattagtttttgctatgatactgagcactgatattcagtatgcagcaatcagattgttatcccgttgagccttgagtgcttttcatgaaatttaattaatttgaccattttatgatacacagatactatgatgaagtttgcgtcttttgaaaccgttgttgagatgatatacaaatatgcaatccctgcccccaagagtgagtgcagcaaaccactgcagctccgggtgagcttttgcagtggttacatt

SEQ ID NO: 25659 - DNA, 421 bp, Oryza sativa
  Clone ID: PAT_MRT4530_30524C.1
ttttgtttttttttttttttttgtttttttttttttttttttttagtacaattacaggagataggtgctctgttaggctctacaggcaataaggcagcttacgggttagaaatttcagattaagcggatctacaaaccctaacaaggcaacaaaacacagcgggaacacgagtaacacgaccacaaaagcccaaccaccaccaggtggcttaaccacaccttacaatggtacacacacgacactcaccatagataagggttattacaaactcaggcggcatataaaattgtgggaacacccaaaggcacaaagcgttgcacaaagtgcggcacaaacccacagcctatttgtgggggcccgaatttgccacaaatacacagtggggcagtggcacaaaatcacaaggccaaaagaaacggg

SEQ ID NO: 25660 - DNA, 590 bp, Oryza sativa
  Clone ID: PAT_MRT4530_30525C.1
atggcaattaaggatcggttcgcgggatgccctggaagaacttatcgtacttaccacaagccagccgcatccaggcaagggtgggcgtgatggagtttggatgggtcctgcgacggcctatgcggcttccggattcacctaggcacgagaggggactacccgctgccttgcgaggaatgggggtgaaacctgaggtgtggtgtgcttggttagagggggttatgcgaagggtcctgtcacggcctctatccggtatatcgtgttcaggtggttggttgggcctgttgcaacgtggtgtagcgttgaccagtggatggttaatattgattaattagtacaattgttttaccgctttaaacacctgtttataaatgctcgctttatgcaaaagaacctctctagctatcctttggcaatatcctgcatcataccccgattccggtatgacttgctgagtacagtgggtagtactcagtcttgctctattttcccccaacccaagagtttgagtatgcgtcagatggtggttctccgagaagtaggcttcgtccgtgcttgcaaacggagacgttcctacgacgctttataaa

SEQ ID NO: 25661 - DNA, 429 bp, Oryza sativa
  Clone ID: PAT_MRT4530_30526C.1
atggcaggaatttggtacgacgaagccggtggagcctcgcactacggattttcaagtccctcagaagggcagatcgagatcgggctagccgtgtacttgggtgttgagggcgttcttctatccaagccagctagtttcacatacgccaggatcgcgtggatttccggccccgatcgaggagcattttgcggcgcgccggcagcatcccgcggtggccgcgtcgcgagcgatctgttgctgtcaagcctggaagcagccgtgcactacacatcgatgaatccatcgcattcgcgctgcatgcatggagtcatggggacatctacgctgatcggccactctcaccaggttgatcgatcgatcatcgatccgctctcactgcaccatggtacgtacaccgcgcccttcgccttcagtacgtactactactga

SEQ ID NO: 25662 - DNA, 1888 bp, Oryza sativa
  Clone ID: PAT_MRT4530_30527C.1
gaagcggaggagaaggaagcatcgcatccgcctccgatccggcgatggcgagggcgccgccgccgctgtcgtcgttgccgccgccgccgcgccggcccacggtggtgctgcttctggggctggccctcgccttctgcctcgccgtcctctccatccagtcctcattcttcaccgctccgaggctggcgagtaggctggatctggactccgacgaggtccgcgcgctctcgggcttccagtcccgcgtccagcagtgcgtggcaagaaggggacttggcctcacagcagatattattgatcattgcaagctagtccttagatttcctaaaggaaccaacagcacttggtacaacactcagttcaaatattttgaaccactagaatacaactatgatgtctgtgaaactatccttctgtgggaacagtaccgtaacatgacgactgtgttgacaagggagtacttagatgtgcgacctgatgggtggttggattatgcagccaaaaggattgcacagctcggtgctgacaaatgctacaatcgtactttgtgcgaagagcttcttagtgttttactccctgctaagcctccttttcatcctcgccagtttgcaacatgtgctgttgttggtaactcaggggatctcttgaaaacagagtttggacaagagattgatgcacatgatgctgtgttccgagataatgaagcacctgttaataagaagtatgcaaaatatgttgggttgaaaagggactttcgactggttgtcaggggtgctgctcgaaacatggcgccaatactaaagggctcctctgatgaggttcttattataaaaagtttgacgcacaaagaaatcaatgcggtgataaaggaacttccaaacccagtttatctttttcaaggcatagtcttgagaagaggtgctaaagggactggtatgaagtcaatagaattggccctttccatgtgtgatattatcgacatgtatggattcacagttgaccctaactacacagaatggacaaggtacttctcacccccaaggaaaggacacaatccactgcaagggcgggcttattatcaacttctggagtgccttggagtaattcgaatccattcccccatgagagcaaagagggtagaagattggtcggatatacctagcagggaagagatcagaacagcgcatgctgcggcttttcgtttaaaaaggcatgaaactggtcaatctgatcaaatggggccatttagcaactgcaaggtatggggaacagttgacccagattacggacctgtatcaggaactccagacatgagcgaaacacgaaagagctcaaactacaagaagtgggaggtactcccattcgacagcttacgaatggaggctcaggaacaccatgtccagatgggcggcgtatctctgtacaagatggatggaaacaagctagatgatcttgtttgtgtgagacatgaacgttcatctagttaagtcagcacttaatctttgcctggagatggcatcttgaccctgtggtaatcttcagaggcatatctacttgtcagttgtaagatcacaagaggcaaaggattgaggctattctttagggtttctcacccccctggcggtgctgtttcttgggggggttgctttgcctctttgttcgcgttccggcttaggctggcgcccgcttgtgccgctttgggctctgctccgaccttttgggtgccacttgcaacatgtactagccatcacgcaattctgaactgcagttttgttgttgagctagtaacccacaccctgaattgtagtactatagtttttgttgttgacacatgttttcatttcacaatgccgtgggggggcaattccaaaaaaaaaaaaaaaaaaaa

SEQ ID NO: 25663 - DNA, 485 bp, Oryza sativa
  Clone ID: PAT_MRT4530_30528C.1
aacaaaacaaacatgacttggacttagatggcattgtgaaatgaaaacatgtgtcaacaacaaaaactatagtactacaattcagggtgtaggttactagctcaacaacaaaactgcagttcagaattgcgtgatggctagtacatgttgcaagtggcaccaaaatcgttacagctgtacccatagcggaacattcttccgactgattaagcaaatatccctacaaagtcgctaagaaaccaataaaagaatattttctgtcaggggaatgagaaaccctaaagaatagcctcaatcctttgcctcttgtgatcttacaactgacaagtagatatgcctctgaagattaccacagggtcaagatgccatctccaggcaaagattaagtgctgacttaactagatgaacgttcatgtctcacacaaacaagatcatctagcttgtttccatccatcttgtacagagatacgccggccatctggaca

SEQ ID NO: 25664 - DNA, 696 bp, Oryza sativa
  Clone ID: PAT_MRT4530_30529C.1
ggggacttggcctcacagcagatattattgatcattgcaagctagtccttagatttcctaaaggaaccaacagcacttggtacaacactcagttcaaatattttgaaccactagaatacaactatgatgtctgtgaaactatccttctgtgggaacagtaccgtaacatgacgactgtgttgacaagggagtacttagatgtgcgacctgatgggtggttggattatgcagccaaaaggattgcacagctgtaagtttgatacttgttgcacatttgcactattcttcgtaacgaagtgatattaatccgcatactggttaatgtgctttaaaaaatatgcagcggtgctgacaaatgctacaatcgtactttgtgcgaagagcttcttagtgttttactccctgctaagcctccttttcatcctcgccagtttgcaacatgtgctgttgttggtaactcaggggatctcttgaaaacagagtttggacaagagattgatgcacatgatgctgtgttccgagataatgaagcacctgttaataagaagtatgcaaaatatgttgggttgaaaagggactttcgactggttgtcaggggtgctgctcgaaacatggcgccaatactaaagggctcctgtaatgctgtaatcctggtttcttccagataacttcatccctgatagtgtttaatttact

SEQ ID NO: 25665 - DNA, 285 bp, Oryza sativa
  Clone ID: PAT_MRT4530_3052C.1
atgctggtggtgccgctggacaccgtaatggccttgcatcctcatccttgggttcctgctggtaaccaggcagccctcgctcttgctggtggccattcgtcgagcaggagcggccagacgaagcccactggacaccagcggcagttcgcagcagtgcacgctcgatccggcgatgacgctctcataggaggacctagtgtgaccggtcccacgcgtcaggccctgatccggcgagacgcaaatgagtgggggatggacaggagggaggaggaggcaggggattag

SEQ ID NO: 25666 - DNA, 2061 bp, Oryza sativa
  Clone ID: PAT_MRT4530_30530C.1
atgtccggcaagctctgcttcttggcgtccgtgctcttgtcgatgtccaccgtcgtcgacctagcgatggcggcatcgggcggagtcaacatcgccgtctactggggccagaacggcagcgagggcacgctcggggagacatgcggcaccggcctctacgcgtacgtcaacctcgccttcctctccacgttcggcgccggccgcgccccggtcctcaacctggccgaccactgcgacgccccgtcggggacctgcgcgtccctcgccgccgacatcgcgtcctgccaggccgccggagtcaaggtgctcctcagcatcggcggcggcgcgcttgggtacaacctgtcgtcgccctccgacgcgcgggacctggccgcgtacctctgggacaacttcctcggcggcggcgccaccggcgcgtcccgcccgctcggcgacgccgtgctcgacggcgtcgatttcgacatagagtccccctccaggttctacgacgacctcgccaggaacctggcgtcgctgtacacaagggcgccgcggccgccgcgcgggggcaagacgtacctgctcaccgccgcgccgcagtgcccgtacccggacgcgtccctcgccgcggcgctcgccacggggctgttcgaccacgtgtgggtgcagttctacaacaacccgccgtgccagtacgccgcgccaggggacgcgagcgcgctgcggagcgcgtgggcgcagtggacggccggcttgccggcggcgaccgtgttcctggggctgccggcgtcgctggatgccgcggacagcgggttcgtcgacgcggacacgctcgcgtcgcaggtgctgccggtggtggaaggcgcggccaactacggcgggatcatgctgtggagccgctcctacgacaaggactccagcttcagtgtgaagctgcaggccgccttgcagaacaggaacaagccaactggagccggcgcatcctcacataccaagaggagaatatatataatagcaggagttttcgccggcgtactactactgttcctgcttcttataacctatttcctgtgccataaaaaacaccacgggcagcagcctcctgtacaagaattgacgacccctccaaaggcagagccatctcagaaaaaacagcgagctcaacatctgaaaagatacagctattcggaagttgaaagaatgaccaaaacctttgctcacaagataggccaaggcaactatggtgatgtctacaaagggaacctccgtgatggccgtcagatagtggttaagttactgaagaattgcagaggtaatgacaaggagtttctgaacgaggttgccagcattggcacaatttcgcatgtcaatgttattcctctgctggggttctgcttgcaagggacagcaagagctctaatctacgagtacatgccaaatggttcccttgaaagctatgctttcagcaatgatgactctatagaggagaattattccctttggatatattgggagaaattatatgaaattgcaattggtgttgcgagaggactagagtttctccacggaagcggcaatgcgaacattatgcatctcaaaatcaagccaagaaacattctactggatcaggagctatgtccaaagatatctgattttggagtagcaaacctgtgcttgtggaaagagagcaagaaatccgctcaaaatgcgagggggagagatagctatgatgcacctgaagtagtgtccacgaaattcggagcagtcagcagcaagtctgatgtctacagctatggcgtgatggtccttgagatgattagagcaaaaagacgtattaatgttggtgctgacactaccactaagtattttgctcagtggctgtatgatcacttagatcagttctgcaatagtatttctgacatcagtgatgagacaagagagtctgtaaggaggatcatcatagttggtctgtggtgcatacaagcggcacctgcaaatcgaccttcgatgagcagagtcgtcaagatgttggaaagtagcagcacaaagatggatctgccaagaaaatctatcgagtag

SEQ ID NO: 25667 - DNA, 741 bp, Oryza sativa
  Clone ID: PAT_MRT4530_30531C.1
atactgctcatctcatcgcctatgcttatcagtgaaaatttaaattttcaatcttaaattttgagttgattttaagattttctcatcgaagtttattttttagcctttacttttaagatcactagcaacacatatataaaaattttaaccacaattttttttctgtttgcaagtataccgaaacgatgtggagtccggataagttatatgaaatttatccggttcggttacacggtatggagatcatgcaggcactcttatcacgtgtcctgatatctctatatgaaccgaaccaccaccttctcgcaacgcacgcggaatcaagctaggatttgcctcctcctccgtattgcgtcgtcgctcgttactcgtagtcaactctgtcccactcactggcgtgcgcggttattgggagagcacgcctccagaaccttcgtcttcgatgtcttgcatagggagaaggcaataataagatttttgaaaatcacttcacgtgactacttgcttttcgtccagcacggcttgtcttcctctgcactcaggtgttgcacactatcgttaacgcctggtactgcgagttcttcaccccaggagaagatgaagggggccaccgaaccagccgcggaaggagaggtgggtctcggcgttggaggcggtgggggcaggcgaaaagggggtggtgggctcgtgacgccagcgagcgggggaaggaggtgggtggcgctagtgagataggagatg

SEQ ID NO: 25668 - DNA, 189 bp, Oryza sativa
  unsure (1)..(189): unsure at all n locations
  Clone ID: PAT_MRT4530_30532C.1
tccacacgttcngtaagtgtggatttgtnggancnttatgntttcaancaattanacagaactctgttgtcantgttgcttgcntctgtgganttgancagatgtttcgctaacatnattcgacctgnatggtgaaancctgnagattgnatatgtccaaaaaaaaaaaaaaaaaaaaaaaaaaaaaaa

SEQ ID NO: 25669 - DNA, 114 bp, Oryza sativa
  Clone ID: PAT_MRT4530_30533C.1
atgaggaaaaggaacacattgacaggaagcgaaggacctcgccagaacttatggaggaagtggaggaccatgatagagcttgagaaggaagaggaacacattgatgatgagctt

SEQ ID NO: 25670 - DNA, 610 bp, Oryza sativa
  Clone ID: PAT_MRT4530_30534C.1
atgcgaaatgtcgatgcatgcggcagcatgtttcattcggaaccggactttgtcgacgatctgctcgactgctcgtcttgctacctcgctttcgtctccgttagacctggccctgtgatggtactaggctggtagcaacacagtcaacacgtcgggcaatgtcgaagtaacgcaggctatgctgctgttaagtcatggtctcatggagcagtggagtgctgaaccagctgatccacgagctgatgtatttgggccgtacagctccctatcggctcgatcgattcgagacgcggagaattttcgacatagcctggcgactctaatcctccgatccggcgccgacggcgtccctgagactgacgtatccataatccatgggagcacctcagaaccacagcggacgtgccgagctccgcagctgccagcaaacaagatagatcgattgattcataaattggagaagaaccggaatccggcgtcatcgccggaatcagccgtagtcgccgatgtctcggggttcgtccgcgacggccgccaccccgatcggcacaggcgccggttcgtcggcgtcggccacgaaaacgagaagacggctgcgcggagccgacga

SEQ ID NO: 25671 - DNA, 583 bp, Oryza sativa
  unsure (1)..(583): unsure at all n locations
  Clone ID: PAT_MRT4530_30535C.1
ggattcggccgaggaatggagagataaacaatagacactacacagtacacacacttacatggatgactatgccgaatgtccaccgataacagtgtactcttacatggatgaccatgctcagtgcccaccgatatctcgtgttatcagaaagaacatccattatccaatcctaaganaaccatacagtactcaaattatgttgctcacagtcgcaggtaaacacagtgcccgacaaattaccatggctcgaaatcatgcactaaccatgcctctggagacctgcagcggcagggattcggccgaggaatggagagataaacaatagacactacacagtacacacacttacatggatgactatgccgaatgtccaccgataacagtgtactcttacatggatgaccatgctcagtgcccaccgatatctcgtgttatcagaaagaacatccattatccaatcctaaganaaccatacagtactcaaattatgttgctcacagtcgcaggtaaacacagtgcccgacaaattaccatggctcgaaatcatgcactaaccatgcctctggagacctgcagcggcagg

SEQ ID NO: 25672 - DNA, 1349 bp, Oryza sativa
  Clone ID: PAT_MRT4530_30536C.1
tcaattagtttttttttttgcttttttttttgataaagaagggcaaagattgccactggcacttcatattataaggattattagtacatacactgggaattagcatcttagggaaggggggaaatgctatgtgcatttacagacacttgtagcatttatgtcagacagatactgattgagatacataacagcaatatggatgcaatctgttcatcatgtcaatattttcagctatctccagaaagacgaccctttgtgcaaagcctacattgaattccttatcatgtttctggtcattctaaattccatcagaggttggtggttgttcagccccagaatttggcagaacagtgctagctgacgctttcggtatctggttttgctgtgctacttgaggcccagaagcatatagtcctgagtagtggcgcaggcatgcacgcgagattcctgcgcaggggaattggtggcttgaagaggtgagcacaagggaccatcactggttccattcgagtagtcgtccacatgatctgaatgtacatttggggtgacttcagatactcgattgcttcatctaatatagatgccatgtcggtcttgttgcaatgaggtatgagttcttgcaatgcgcgcatcttctcgttgatccgatcccttcttctcctctctgacaggttatgaacttcagctgcacgagttctcctctttgatccatatcgccgcgacgacgatttggtctcttcggttgcctcgcattcagcatcctcactgcgactgtctgaatcttctctgcctttcctcttgtgggcactggcgctctcgctgggcaagccggaagcgccgaagttgctgccggagccgcccgacgacgacgtgccggcgccgtcgtgggtgctcgaccggcgcggccgctccggcggcaatgccgcgccggcgtcccggcagcgctgcgccgccgtctccgggatgtggttgctgccgcagaaggccgaacagatgtcgccggtccagctcgacccgatgccgctcctcatcggcggcctcgccgccgggggcggcaagtccggcggcggagcgtggtgagagctcggccccgccgccgcggccgccgggaacgcgtcgccggtgacgctgcgccagagctgcgtgtagaggtccttctccagcgcgtcgtcgagggtgtccgggaaccacgcggcggtctccgtgtcgtcgccggtgagcacgctggcgctctggccgcggccggaggaggagacgaccctcgcctgcgccgcctgcggctgcgccacgacgccgccgttgtgccatagcagctccaccagctcgttgtccgtgctgcaaatcgccat

SEQ ID NO: 25673 - DNA, 735 bp, Oryza sativa
  Clone ID: PAT_MRT4530_30537C.1
aaagaagggcaaagattgccactggcactgcatattataaggattattagtacatacactgggaattagcatcttagggaaggggggaaatgctatgtgcatttacagacacttgtagcatttatgtcagacagatactgattgagatacataacagcaatatggatgcaatctgttcatcatgtcaatattttcagctatctccagaaagacgaccctttgtgcaaagcctacattgaattccttatcatgtttctggtcattctaaattccatcagaggttggtggttgttcagccccagaatttggcagaacagtgctagctgacgctttcggtatctggttttgctgtgctacttgaggcccagaagcatatggtcctgatacctgtggtggcactgtttgccagccatctgggtgaaggaagggattgcttgcctctctcagttgaatgttctgcatctggtttgcaacattcattgggttcatagctggagatgaatttagagggatgtgatttggcatagaatggttcatgtatggcaatcttgacatgtgacttaggccttgtgccgcaggcatgcacgcagaattcatgcccacggccattggtggcatgaactggtgagcaccagggaacatcattggtgccatcccagtagtcatccacatgatctgaacttgcatttggagtgacttcagatactcgattgcttcatctaatcggacgcgtgg

SEQ ID NO: 25674 - DNA, 431 bp, Oryza sativa
  unsure (1)..(431): unsure at all n locations
  Clone ID: PAT_MRT4530_30538C.1
cccaacacggagaccgggcccaattcggactctcccccatctcggcggcgacggcggcgatggcgtgcaagcggcgtcaagctcatcgacatcgccgtcaacttcaccgatggcatgttcaggggcatctaccacggcaagcaatgccacgccgncgacatccccgccgtgctcgcccgtgcgcgggcggccggcgtcgaccgcatcatcatacgctgctttgctgcctgccattccccctttcgcttcttatttcttgcttatggctcagatttggtgtgcttaatctctcgctttcttgggttggtccggcggaaggtcaccggaggttcgctgaaggagtccagggaagcgctcgagatcgccgagaccgatgggaggctgttctgcatggagggcgggcaccccacaagaagccgggaggttgaaga

SEQ ID NO: 25675 - DNA, 249 bp, Oryza sativa
  Clone ID: PAT_MRT4530_30539C.1
atggggatggagatcgggggaatcgatggaggtggagaatggggaaatttgcctctagattcaatagttaaaagccatagcccggagctgggggtagcgggcaatgaggtatggcgagcgccacatctcgccctaccgagtcctccatcactgatcatggaccaacttagtaaaacgttcgattggactgaaggcttatttgatgttgttgtgcactacattgtgctgaagcacccatcggacctgtag

SEQ ID NO: 25676 - DNA, 6092 bp, Oryza sativa
  Clone ID: PAT_MRT4530_3053C.1
tcaatgttccaggaatttgccaactcgcgaccatcgccgtctgcaatcttgaatgcgcctggcctcaagacttgtgtgatcgtgtacggtccttcccatttgggtgagagcttgtttcgccctgcttggctttgaacctgtcggaggacatagtcgccgatcgacaacgtgcgtgctcggatgcgcttcttgtggtaacagcgaagggcctgttggtagcttggctgctcgaacggcaactcgttcgtgatgttcctcgagtagattcacatcgtcgtttcgctgctcctcctgatcctcatcggagtacttctgtactcgtgtactttgatgtcgtagctcggtggggagcatggcctctgagccgtacacgaggaagaatggtgtctccttgttagacgttgtcggtgtggtacgcacggcccatagtactgatgggagttcttcgacccacttcttgtcgtgtgacatgagcctgtcgtagacgcgggtcttgattccttgtagtactatgctgtttgccctctcgacctgtccattgctctgagggtgagaaaccgaggcgaagcagatcttgactcccagcctaatgcagtgatcctggaaatcggcactgataaactgggagccgttgtccgttatgatacggtgaggcaatccgaatctgtggaattgacaggcttcacaccgctgaaccatgtcgcatgcatctttgagggcggttggccagaaaaacccttgtcgaaaagcttttccgactaatgtccgaccggcggcatgtgacccacagatctcttcatgtatgtcgaggaggagatgtctgccgtcgtcggacgagacgcattttaggagtaccccgtttagcgccttcttgtatagatcgtagccgatcatacagtagatttttgctttatgggttattttctcggcttctgcgtcgtcctcgggcaactcttcgctgcctatgaatttaatgagtggggtgcgccagtcgtctgtggtctcgatatcggcaatgacgcgctctgcctctgtagcccccgagctgttgctgagggcgaccgggctatcttcgccgcttgcctctttcactgatgtccttgtcaggacgtccagaaaggtgccaagttcgagtggctctcgtctggacgcacaccgtgctagatcatctggctcgatgttgtccttgcaatatacgtgtcgaacctcgatcccattgaaccttttttccagcttcctgacttctgcgagatacttggataactcgggcctagagcacttgtaatctttatgcacctggttcgcgactagttcggaatcccctttcacgaccagtcgcctaactccgagtgcagctgcagctcttatcccggcgagtattccttcgtactcggctgtgttattggtcgccctgaagttgaggtgaattgcatgcttgaattgatctcccgaagatgatgtcaagatgaatcctgtccctgctccttggctgttgagtgcgccgtcgaacgccattgtccacgtttcgttgtcgatttggttgtctgacctgttattaggcatggtccaatcggctacgaagtcggcgagtacctgggacttgatggatgttcgtggcacaaagtggacatcaaattggcttagctcgactacccattttgcaatgcggccgacaacgtctttgtttctcacgacttcaccgagagggaaggaggatacaactgtgaccctatgggcttggaagtagtggcgtagctttcttgatgtcatgattaccgcgtagagcagtttttgaatctgtggatatcttgtctttgcgtcgtggagagcttcgctgacgtagtagactggttgttgcaccttctctctctcaacaacaatgataatgctaacggaatatggcgtggcggcgatatagagaaataattcttcattaggttggggggcaacaagtacagggggatttgataggtagcgcttgagtgcaatgaatgcctcttcggcttcctgtgtccatacaaatttgtcttgcttcttcagcggagcgaagaaaggttgtcctcgctctcccatcctagcgacgaacctgcttagtgccgccatgcattcggttagcttttgtacttccttgagtcttgtaggtgacttcatgttctcgattgccttgatcttctcgggatttgcttctattcctgtttctcgcagatcgtcaatcaatgagtcgcttgtcttggtcttgacaacaatttcatcgacgtaggcctcgacattgtttccaagttggtcgctaagtgcgccctgaaccgtgcgctggaaagtgtttcctgcggttattagtccaaacggcatcttcacgtagcagaataccctaaacggtatgatgaatgctgtcttctcctcgtcctctttcaccatgctgatttggtggtagccagagtaagcgtcgaggaagctcaacaactcacaaccggttgttgagtccaccagttggtctattcgaggaagaggaaagtgatccttgggacacgccttgttgaggtcggtgaaatcgacacacattctccatttcccgttggccttccgcaccatgactgggttggctagccactctggatggaatacctctttgatgaaaccagctttgagaagcttgtcgagctcttctcgtatggcttgttttcgatctggtgcaaatctccgcagtttttgctttactggtttggcgtcgggtcgcaccatgagtttgtgctcaatcacctccctgggtacccccggcatgtcggacggtttattgggtggctcagctgtggcaagtggactgggcgtgtgctcgaccatgtcgaggctccgcttgtcgcattgcactgctagcttagcattcccttgaatagtgattgttcctttcggtcccgacatcttgagcacttgatacgcgtagtgagatgcggtcatgaacttcgcgagtgcagttctcccaatgatggcattgtatgttgtattgaattcagcgacatcaaaggtgatctgcttcattcggaagttatttgcttggccgaaagttacaggcaacgtaattttacccaatggtttggacgatgactgaggagtgattccatggaagggttgatcggtgggtgtcaactcgcttcgtgggatccccatcgcgtccaaggtgctgccgaagaggaggttaattgagctgccgccgtcgatcagaactcgcgcgaccttgatattctgaatagtgggttcgaccacgatcggatatcgccctgggatgacagcagtcttggggtggtcctcttctgagaattctatcttctgttcagaccacttcatcttgggtgcagctccctgccacgtcgaacagacttcacgttccactttcttgtattctcgctttgaggagtatgtcgtggaacctccgaagatgtgcaagacatggagatcagagtctgggtatgctgagtccgattcctgagtagccgcctcagcgtccttctcgaccacacgtactcgcttgcctttttccaatgccatgtgttttgcgagcgactttttgaagacgaggcaatcttctagagagtgtttgtccgacttgtgtatagggcaccatgttttcttcatgtcgctgccttgtgggtctgggcgcttgggagggtctgcgtattcagttgtgagaacttccgcttgagctttccttttcccactcttgcgatttttcttcttgcttgactcaggtgcgtccttggctagtttcttctctcctccggtcttcagtttgtcgttcttgcgtctcagtgcgtcgtccgcgtgagcgcattgattgacaattttgaataatttgaaggcgcggattacagaagcgtcggtgatttcggggattgtatttctgcactcactaaagcgccgaacataatccctcaaggattcacccgggttctgtgtcaacgcatgtaggtcgtcttcgatcgcgtgacgcttgtaagctccttggaagttggcgacgaactgctgccacaggtctgcccacgaagaaatcgagtagggcgggagatgcatcagccatgaacgtgcagagcctttcaatgcagttggcaaataattcgccaatgcgttgttgtctgctccagcagcgtagagtactgtggagtaaacctgaaggaattcttctgggtcggtactcccatcgtacttctctattgctcctggtcggaatctctcaggccatcggacatcacgcagcgaacgactgaaagctctacacccagcactgggggcagtgggttgtcggcgatcgtacgtccttcgtggatgtctatctgatgatgaggatgaggaagatgacgacgatgacgatgggtcacttggtttcggtgtacgattacgagggcgtcggccaggttctcgagaatcctgtcgtcgtctcctgttgctgtcccggcgccgatctccatcgtcgtcgtcattatggcggcatcctcgactagtatcgcccagcacccgtcgttcgcgatcatcgtgatcgtggcggttatcatggtctcggtcttcgctcgaacggcctcctcgttcttcgttatcgtgacgtcgtgaagagacgcgatgtcgggaatggttctcgttgtctcgtgcgcgtcgcgcctctcggtggccattcaggtgatcgcggagatcgccggtgccacgaggtgaaggggtggctcgatgaggcgattcccgctgttcagggttttcgccatcagcaccgccagttggtggccattccgggtgcgctgcagcagcggcctcttcgaacgcgttgctgaggttagtcactgattcccgtagccgttctgtccaccgtgcgagatcgtcattctgaacgggatcgtagggggtttccctcagtattgcgttgacggccctgatgtgctgggccggtgtagtcacttgattttccgcttccgcgttagcgcgcgctgacgtgccggtcccatcgatagccaatacctcgcgtggcgtacttgtcgagatgagccatagtcttcgagcaggtgcaggactgacggttcgtggggatcgatgtcgattacccccaacgaatcgatctgatatcagcgttgctccttgttccttgtcctcatccctgagggggatacgtgactgctggaccttaggaggtgacgtcttcatggcactgagaaagaccttgcagctcgagaggtcgtgattctttgtcttgtgaataggacaatagacatcacgagttggagaagtacgctgaattccacgctctttgcaggcatgaatttcagcgtggacgttgagaaaaacccagcaggcttgcaaggtgtgttttctggttttgtggataggacaccaggaccttgtcacctcggaagtcatcctcgccggctcgtgattcttgtcggaaagacaaggtttggccgcactaggatccttctcgggctcggatgtcgtcgacgttccgttctccgcttcggcgggaggatccttcgacatggagtcgtcttgggttctagccactgcgttcttgcttccggtcattgatggaccagacgagatcggcaccgtggtgtaaaccgggaagacgatttcgccgacttgagtccacaccagcattgttgaagcaggaactcctttgttgaggttggtgttgacgctgttgtcgacgaagctggatgacatagtagtagaaccttgagcaccaagtccccctacctggcgtgccactatcgacgggggatacccgtagaccggatatagagggtactggggtacgatgataccgacgagatcgtagtcgagttggttcgactagatcacccggcgacttggctcctgtaggttccggcttcgtaggctgtagtggatgtgttggcgataagattcgatgccttaggtcctcccggggggtctcttttataccgtaggtcagttggtctccaagtaggactcggagacatcggaccctacacgatacagtgacgacccagttttatccgagtaggaatctttccatctgtggactccgtgatgaatttccttaacgtgtacaaagaacgtccgtatacgcgtagatataccat

SEQ ID NO: 25677 - DNA, 390 bp, Oryza sativa
  unsure (1)..(390): unsure at all n locations
  Clone ID: PAT_MRT4530_30540C.1
ggcangnncagaaactggggatgtattacatccaaagaatgaatatatggatccatatgccgctgacaagatagtttctgcaggaattaagaaagttaagattagatctgtattcacttgtaagtgtaaagttggtgtatgtgctagatgttatggcatgaatatggcaacagctaaaaagattgatattggagaagctgttggaataatagctgctcaatcaattggagaaccaggaacacagcttacaatgagaacattccatactggtggagttgcaggagcagatattactcaaggtttacctagagttgaggagttatttgaggctagaaaaccgaaggggcttgcaatagtaagtgaaattgctggtactgcgagaacnnnngc

SEQ ID NO: 25678 - DNA, 250 bp, Oryza sativa
  Clone ID: PAT_MRT4530_30541C.1
ttccgcggccaaaccagtctaccgcaaaacggcttagcgcgctgtcgaatactcagaacgcatagtggcctactgcggcgatgtcaaggacaagctcatgaagagcgctgtctacgtcggggctcctggcaagggtatactagctgcaactgagaccaatggcaccatcggcaagcgctatgccaggatcaatgcttggaacgatgaggagaaccgctgctctcttgacgagatgctatttaccacccct

SEQ ID NO: 25679 - DNA, 1086 bp, Oryza sativa
  Clone ID: PAT_MRT4530_30542C.1
atggcatgcctcctcctccacggaggcctcgtctgtgaacgtcaattgaagcttgtaacacttgaccctcatgttcctcgctcgtgtatgggaaatcaaaatcttcttcctgttcgtgattcttcgaccaaaacaattctagaaggagctaaagttgttattagcctttcatcttatgttgatggcacattaatggcacggtcatctggttttttcatcaattgggatgaggagagtaaagtgtgcactgtccttacatctgcacgtctaatctgctcaaagtactcatcgatggaccagtggttaggttcagatgagtattcacctgatgctacggtttacgctcacttgctagataaagatgagacaactgtaccagcagccttgctacattatgacaggcactttaacattgctctgtttaaggttgatgtagactcatgtgctaagattcctagtttcagcagtgaagtgacttgtggtcaggacatatttgcccttggtagagatgatgatttaaatttgactatcaatcatgggcgtgtccaatttaagggtccaagtatgtttgagcgccactactatatgtatactggtttcacgactggtcagtctggcattggagggccaattattaacttcaatgggcaagttttggggatgactaatgttctaggaatgggatttattccttcatctgttatacttcattgcttggatatgtggaaaaagtttggttatatccctcgcttgcatattgggatgaaactttcagccatgaagtttctagatccaattcatgtggagaagatctctcgcaaatgtaatattgattcgggtctaatagttaaagagttggagattgaacttatgcaaatatgcgaggatcatcttgacaaaggaagaggcattggttccagcgtagacatacaagttggtatattccgcatgtgcaaaggttccacgtgcactataagtctgagattaaatatatcaaatgatgtagaggtgtttgcaagaggcaaatacattttctctgcaagagattgtacctgggtgtttgatgatgtgggcacaggtctttaa

SEQ ID NO: 25680 - DNA, 329 bp, Oryza sativa
  Clone ID: PAT_MRT4530_30543C.1
gacaaagtaaagcctagttatttagcaaccccacagagacatacacacagcctagctttagaagcacaagcgaccagcttctcggggctccaaggataacctagccagtagcagacaccacctgccccaaaggggatgcccacggagcagaaccccgggaggctcggcaccgcgcgctccaagtaccctatccgggggccggggaacaccacggacatggggggcccaacatacaaggcgcgcaagcacctgaagaagcctaaaaccatgtggtagagaggcgagcacctgcaccagctaaagatgaccagagcgagctgccggaagaa

SEQ ID NO: 25681 - DNA, 950 bp, Oryza sativa
  Clone ID: PAT_MRT4530_30544C.1
ccgggctgcaggaatcggcacgaggatcttgacaaaggaagaggcattggttccagcgtagacatacaagttggtatattccgcatgtgcaaaggttccacgtgcactataagtctgagattaaatatatcaaatgatgtagaggtgtttgcaagaggcaaatacattttctctgcaagagattgtacctgggtgtttgatgatgtgggcacagatcttcaatcttgaaggaaagtgatgtgaccatgactactacggatacaaccattgctcacatcatggataaacaagaagacattaaggtcaaggcctctaagtgctggaatccgattcggccacctgctgtactgctgatttcaaacggccgccaaatctccatacgagctccgttttcggcccgtgagtacttgatggaaagctctcggagtcgtctttccaacggatctagtatcatcaccaaattccatcccagtcaaccgcagttaaagaaacaagcgccgatgctgccggatccaaccacgtccatgagcgtcaacgccgccaccgattccggccttgcccacgagcaccgtcacctacaccgacggatctggccacgctcgcaagtgccgacgctggatccagttgcgcccgcgagcatcgacgccgctgctggaactgctgcttctcggttctccctgcgcgcacgcccgcggggctgcacgcccctgcaagcgtgcgaggccaccgctcctctccgctgcgcctccctgcacgcgcgaggtcgcctctcctctccgccgaacgtgggccccgctgcagctggcccacggggccgccgcgcctccctgccgctactccgtgctcgcgtgtcgccgccggcgcttgtcgcgtgcgccgccgtcttgtctgccttcggcctccgtactctaggattttggatcggggaaatgctgtttccagcaagtgga

SEQ ID NO: 25682 - DNA, 1737 bp, Oryza sativa
  Clone ID: PAT_MRT4530_30545C.1
ggatccccgggctgcaggaattcggcacgaggcctccgtatctgtatcgccccccacagtcccacatcaccgtcgccgcagcgccgccggttctcccctccgctcgccaccccggcccactccccgctgcatgcggccagtacgccgcgacctgcgctcccacacccccgccgccgacacgtcccttcccctcgccgcccccgatctccacctcgaactccgtcgccggaatatcgtcccgccgttgcgcccgcctcgtcggttttctccgcgcccctgatctcggtctcctccgcgcgcccaccgttgacaccatcctccctgccgtctccacgcgtcccaccgcgccgcccccagtctccgcatagccaactgcttcctctcctctgcgcgtcatcaattgcctccactccacctcgtcaacagcctccgcacgcccactggtcccggcctcttcaacaacgtctcctgcatcaacctgattcaccggaaggatatggcaccgacgaccatggagaaggttggagaggtgtcgggatcccggtcaagggcgtagcggcggcggcggcaacgacaacgacaacggcaacggcgacggcacagcccgaccaaccgggcaggggtagctcaatcggaagctatggcatcatcgcaacaaggcgagaggaaaattcctctggagagaggcacgagcgagccggtggaggcggcggcggcgacttcacttggtgcatggcatgcctcctcctccacggaggcctcgtctgtgaacgtcaattgaagcttgtaacacttgaccctcatgttcctcgctcgtgtatgggaaatcaaaatcttcttcctgttcgtgattcttcgaccaaaacaattctagaaggagctaaagttgttattagcctttcatcttatgttgatggcacattaatggcacggtcatctggttttttcatcaattgggatgaggagagtaaagtgtgcactgtccttacatctgcacgtctaatctgctcaaagtactcatcgatggaccagtggttaggttcagatgagtattcacctgatgctacggtttacgctcacttgctagataaagatgagacaactgtaccagcagccttgctacattatgacaggcactttaacattgctctgtttaaggttgatgtagactcatgtgctaagattcctagtttcagcagtgaagtgacttgtggtcaggacatatttgcccttggtagagatgatgatttaaatttgactatcaatcatgggcgtgtccaatttaagggtccaagtatgtttgagcgccactactatatgtatactggtttcacgactggtcagtctggcattggagggccaattattaacttcaatgggcaagttttggggatgactaatgttctaggaatgggatttattccttcatctgttatacttcattgcttggatatgtggaaaaagtttggttatatccctcgcttgcatattgggatgaaactttcagccatgaagtttctagatccaattcatgtggagaagatctctcgcaaatgtaatattgattcgggtctaatagttaaagaggtgtcctatggatcaaatgctgagaatagaggagttagagctggtgatatcattcaatccatgaattgaaagtgtattgcaacaacagtggagttggagattgaacttatgcaaatatgcgaggatcatcttgacaaaggaagaggcatt

SEQ ID NO: 25683 - DNA, 502 bp, Oryza sativa
  Clone ID: PAT_MRT4530_30546C.1
tccccaatatccccgcttcaccccacgcttttttattgtagatctgtacctagaccccagtgtgcattttaaaaacaagtggtgtttactacaaggctaactactgcacaacactaccggcgacggaacgggctactaccaaggatccctcatcctcgagcgcctttgtgtggactatggcaagaagtccaaacttgggtccactatgtacccatgaccctcatgcctccacctctgtggttgagccatacaacagcgtcctctctacccactgcctactttagcacactgatgttgctcatctgatcgataatgaggacatctatgacatctgccgccgatcccttgacattgagcgcccaacctacaccaacctaaacagggttgtgtctcacgctatctcatccctgaccgcctacctgaggtttgatggtgctctgaacttgtatctcaatgagttccagacccaccttttgccctacccaaggatccacttcatgct

SEQ ID NO: 25684 - DNA, 591 bp, Oryza sativa
  Clone ID: PAT_MRT4530_30547C.1
cagatctgagcggctaattttagagagggaggatcaccggctctcctactatccttatttcaccacccgtgtatctccatccttgtttttgttcattcgttgttccaacaatcgtcatctagaactaagcctatcgaccgaaatagttgtatattagatcattcctgatctagcaagtttgtagctcagaccttaaaggcaccgcggagtttggtcaccactgaagtgaaagtaaatgaaaacgaagagagagagcttaagatggaaggcagcaatgcatggtctatgagtctatcatgatttgggattgagaaagaagatgggaggttgttgggtatggtgcatggtgcattttggtgcctcaattgttgtaacagtaacacccagttgggaggaagatttgaggccagctggccattcaaataggttactactgaatcccaaatattgtaatcctagttgatgttgaagagaacgccgtgtgcaggccatgcctgggcatgatcctggattcatggttagactgtttctcctgaaatatatatcaaattcgcagagttgtttgaccttctccaaaaaaaaaaaaaaaaa

SEQ ID NO: 25685 - DNA, 337 bp, Oryza sativa
  Clone ID: PAT_MRT4530_30548C.1
gggacggagagaaagatgatatatctccccactctcacaaacattacaagagggaggaaggacaaaaaaagaggggggggtaggaaaaaattaaccaaacacgagacgggtaaatgaggcaaaaacaaaacaagaacaaacaaacgccccctattttattaaaatgaagtttcccccaatccgaagccgggggaacgagcccttcccatggaagccggggggggcctccggcgaccgatcaaaaaaacggatgcggggtggttaaaaccccggtcgctccctcagcggggccaaagagagacccggatacgttggcgggggtttcaaggaggggttc

SEQ ID NO: 25686 - DNA, 741 bp, Oryza sativa
  Clone ID: PAT_MRT4530_30549C.1
atgccactgccgtcacattttccatccatctccttccttctccatcttattccttctctcttctcatcttcttgcgttgcgagcgacaatgacggtggtggccgagcccgtgacgatgacaccgtgctctcccaccagcgcccttgccgcgctggccgcatgcctgccgcgtgctcggtgacaccgtcaatgtgccctcgtcctccgcagcaccgccctcgctgtgccggccgcatgctgctgcgtgttcggcggcgttgccctcgtcgcgacggtcgcatgcccaacattgccgccaccacgcccactcctctacggaggaaggagtgctcacgctcggtgaagatgggctgcgtgctcaaggacgtcgacgatgacggcaaggggtgccactccgctgctcctcacatgatgatggcgaggggctcccgctatgcggccgcatgtaggagaacaatgaagatgaggtgcttgtgcgcccaaccacggatgaggatgacgaggggatgtgggtgcttcaccagcgccgcccttctccttgctcacggcgcaatccatttctccggtgtcgtggcgttcgcggccgctgctcctccctcgctcccgctctcgcgcttggcaaggataagtcgtgcatgcttcccatccatgcgcttgggaacagcaacgacaaggtccgtcgtggcatctatggtcgctgagctctgtgctgccctcgtcctagatctgccgtccctttga

SEQ ID NO: 25687 - DNA, 4656 bp, Oryza sativa
  Clone ID: PAT_MRT4530_3054C.1
atgtcgaaaaatccacccgttgaaacggagaacggattaccgactacatccaaacttgggaaggattctgatgcggccaagtcttgtccctccgacgtaaatcacgggccgacaaagatgacttctgaagctatcaggtcttggtgtcctatccacaaaaccaagaaacatacccttcaagattgctgggtattcatcaacgtccgtgctgaaattcgcgcctgcaaagaacgtggaattcaacgtatttctccaactcgggatgtctattgtcctatccacaagacaaagaatcacgatctctcgagctgtaaagttctcctcggcgccatgaaagccccgtctcctaagtcatacgtccccgccagggataacggcaaggaacagggagcgactccagcctcagatcgattcgttggggtaatcgatctcgatcctcacgaaccatcggtcttacatctcctcgaagactacgggtcatcgacaacaagtgcgccgcgggagcacatcagggctattcaagctatactgagggaaactccttacgatcccgttctgaatgacgacctcgagcgttggacagaacaattacgggagtcggtgaccaacctcagcaatgcgttcgaagaggtcgctaccgcagcacaccaagatcagccaccaatcggcaaccccaatggtgaagatccggagcggagggaatcgcctcgacaggctacccctccacctcgtggcactggcgatcttcgagatcaaattaacggtcgccgagaagcacggcgcacacgggacgacgcaaatcgctctcggcgtcatgtttcttcacggcaccatgatcgaggagaccgccaaaacgaggaccgagaatgcaacgatcgcgaacggcgggggccagacaatactggtcatggccatcgccgcaacgacgacgacgaaggagatcggcgccgagataacagcgagagacaacgacaagattcccgggatccaggtcgtcatcctcgtaatcgtacgccggagccaaccgacccatcgtcatcgtcatcatccgtgtcctcttcatcatcagacagacatccacgaaggtcacgcgaccgccggcaacccaccgcccccagtgctgggtgtagggctttcggtcgttccctacgtgatgtccgatggcctgagagattgcgacccggggccattgaaaagtatgatgggagcaccgacccggaagaattccttcaagtctactcgacagtgctttatgctgccggagcagatgacaacgcgttggcgaactatttaccaactgcgttgaagggttctgcacgttcatggctgatgcatcttcctccctactcaatctcctcgtggatagacctgtggcaacagttcgtcgccaatttccaaggaacatacaagcgccacgcgatcgaagacgacttacacacgttaacacagaactcgggggaatcattgagggaatacgttcggcgctttaatgagtgcagaaacactattcctgagattaccgacgcttttgtaattcgtgccttcaagtccggtgtcagagatcgctacactacccaggagttggcaacaagacgcatcacaactactcgaagattattcgagatcgttgagcggtgcgcccacgtggatgacgcgctaagacgcaagaacaacaagccgaagaccgggggagagaagaaaccagccgtagacgcatctgagtcaagcaagaagaaaaatcgcaaaaacgggaaaaggaaagctcaagcggaagtcctcgcagctgagtacgcgaaccctcccaagcgcccagacccacagggcagcgatacaaagaaatcatggtgccccatacacaaaacggacagacattctctggaggattgccttgttttcaaaaagtcgctcgagaagcacatggcgtttgaaaagggcaagcgagtatgcgttgtcgagaagaatgaggagacacctcctcacgaatcagactctgcgtacccggactccgacctccacgtctcacacatcttcggcggctccacaacgtactcctccaagcgagaatacaagaaagtggaacgtgaagtctgttcgacgtggcagggggctgcacccaagatgaagtgctcgatcaatctcctcttcgccagcactctggatgcaatgggaattccgcaaagtgagttaacaccaactgatcaacccttccatggaattactccccaatcatcatccagacctttgggcaagatcacattgcccgtgaccttcggccaagccaacaacttccgaacagagcatatcaccttcgatgtcactgaattcgatacagcttataacgccatcatcgggagaactgcacttgcgaagttaatggccgcatcacactacgcatatcaagtgctcaagatgccaggaccgaagggaacaatcactattcaggggaacgcaaagctggcggtgcagtgcgacaagcggagcctcgacatggtcgagcaaacgcccaccccacccaccacgtttgagccacccaagaaagaagccgaagaggcatttattgcactcaagcgctacctatcaaacccccctgtattcgttgctccccaacctaatgaagaattattcctttatattgccgccacgccatattccgttagcaccgtcattgtcgtcgagagagagaaagtacagcgactagtttattacttcagcgaagctctccatgacgcaaagacaagatatccacagattcaaaaactgctctacgcagtcatcatgacatcaaggaagctacgccactactttcaagcccacagagtcacagttgtctcctccttcccacttggcgaagttgtgagaaacaaagaagttgtcggccgcatcgctaaatgggtagtcgagctaagccagtttgatatccactttgtgccgcgaacagccatcaaatctcaggtactcgccgacttcatggccgattggaccatgccaaataataagtcagataaccaaggcgacaatgagacatggacaatggcgttcgatggcgcactcaacagccaaggagcaggggcaggatttatcttaacatctccctccggagatcaattcaagcacgcaattcacctcaacttcagggcaaccaataacactacagaatacgaaggactactcgccgggatacgagctgcagccgcacttggggccaagcgactaatcgtcaaaggggactctaagctaatcgcaaaccaggtgcacaaagactacaaatgctccaaccccgagttatccaagtatctctcagaagtcaggaagctagagaggaggttcaatgggatcgaggtccggcacgtctatagcaaggacaacgtcgagccagacgacctagcacgacgcgcatccagacgagagctgctcgagcccggcacctttctcgacgtcctgacgaagccatcggtgaaagaagtaagcggcgaagttggcccgaacacccccgacatcagctcggaggtaaccgaggcagaacacgccgttgctgacatcgaaactacagacgactggcgcagcccattaatcaaattcatcagcagtgaggagttacccgaggacgatacagaggctgagaaaataatccgcaaagcaaagatctattgtatggtcggcaacgacttatacaaaaaagcgtcaaacgggatatttctcaaatgcgtctctaccgacgacggcagacaactcctccttgacatacatgaaggcatatgcgggtcacacgccgccggtcggacattggtcggcaaagcctttcgacaagggtttttctggccaaccgcccttaaagatgcatgcgacatgggcggctacagattcctatttgtggcgatcgacaagttcaccaagtggatcgaagcagtacccaccggggaaatcaaggccgataatgctatcaagttcatcagagggatattttgcagatacggactaccgcaccgcatcataacccacaacggctctcaattcatcagcgccgatttccaggattactgcatcggcttgggagtccaaatatgtttcgcctcggtctctcaccctcaaagcaatggacaagtcgaaagggcgaacgacatagtactacaagggataaaaacccacgtctacgacagactcatgtcacacgacaaaaaatgggttgaagaactcccatcagtactatgggccgtgcgcactacaccgacaacatccaataaggaaacacccttcttcctcgtgtacaattctgaagccatgctccccgacgagttacggcatcaaagcacacgagtacagaagcattccgacgagaaccaggagaatcagcgagagatcgatctaaaccttctcgaggagcatcgtgagcgagttgccatccgagcagctagctatcaacaggccctccgccgttatcatgagaagcgcatccgagcacgcatactttcgatcggcgactacgtccttagacgagttcaaacccaagcggggcgaaacaaactctcactaaaatgggaaggaccctacacgatcacacaagtcttgcggccaggcgcattcaaaatcgctgacggcgacgttcgcgaactagcaaattcgtggaacattgaccaactacgtaaattctatgtatga

SEQ ID NO: 25688 - DNA, 124 bp, Oryza sativa
  Clone ID: PAT_MRT4530_30550C.1
atgccgaacgaggcgaggaatgtggcaacgttggcacggagcagcggtgtggccacgctccatgtcaaggaggctggggacgcaggaaagatcacatccatcgccaacaagatcaaccacgttg

SEQ ID NO: 25689 - DNA, 1272 bp, Oryza sativa
  Clone ID: PAT_MRT4530_30551C.1
atggctgaccggaagaagtgcaaggcggcggcggtcgccaccacggatggcggtggcgaggaccgcatcagcgcccttccggacgaggtcctccagcgggcgctctccttcctgccctcccgcgacgtggtgcggacgtgcgtgctctcccgccgctggcgccaccagtggaagtccgtgcccgccctgcgcatctacgcgttcgatgattgccgggacgtccagcacctgagtgatttcgtcaccaactttctgctccggcgcaaccggttggctctacatgaatgcgacatcacatgctttgacgagggagacggttgtgaggtgttcggggagaacgccagacagtggatccggtatgctgtatcgtgccaagttcgggtgcttcgtgtttctgttgaagcgcacacccgtctatttggtgcgcctctcaaagcccagcgtttgaagagattagaacttttcagcgtggagttgggggccttctcccttgatttctctagctgcagggagttggaggagttggagctgggaggttgcatcatcaaagacaaagtaaagcagatcttatcagaatcattaagacgtctgagaatcgaaggatgtgattttttccgaaatcgcactcgcatttcttgcccaaatctcatttccttggagattaccgattttaccttgtacactccagtgctcatgagcatgccttccttggcatcggcatttatcaggtttggtgaacactgtgctgattcttgtgactgctactattacggcgaatttggtcccgattatactggatgccatcacagtacagttaagggcaatggcactgtgcttctcaatggtttatcagatgccatccaattagagttgataagtggtgccggagtgttcattttcagaagggattttagatgttgccctacatttaacaagctgaaaacactgttgctcaatgaatggtgtatggctgctgactccagcgcactaatttacttcctccaacactcaccggttctagagaaacttactcttcaacttcggaagagccaacgtactatggtcaaaagaggtagcacgaacaaaaatcagaatgaaaaattcttggtgtcaaagcatctcaagttagttgaaattaaatactgtgaggatgagatggttcaacaagttttacatgtcctaagtgcttgtggcataccatccgagaaaattatcatccaacggataagctcatgggcttctggaggagcccaggacctcaggagactctga

SEQ ID NO: 25690 - DNA, 773 bp, Oryza sativa
  Clone ID: PAT_MRT4530_30552C.1
attcggctcgagataagaacctacacaaagcagctactacttgttctcgatttcttgcacaaaaatggaatcatgcacagagacattaagggggccaatattcttgtagataataaaggatgcataaaacttgcagactttggggcatccaaacaagtcgttgagctggcaaccatttctggtgccaagtccatgaagggtactccatattggatggctccagaagttattctccagactgggcatagcttctctgctgacatatggagtgtgggttgtactgtgattgagatggccactggaaagcctccctggagtcagcaataccaacaagaggttgctgctctcttccatatagggacaactaagtctcatccgccaattcctgatcatctctcagctgcagcaaaagatcttctgctaaaatgtttgcagaaggaaccaattttgaggtcatcggcatcagaactgctgcagcatccctttgttactggtgaacatatgaattctcttcctctgtcatctaatgtcacggaaaactttgaagcttcttcaccatcatgtgccccaaatgatgatgaatccttccttttccgttcaactgtaaatcctctggactcgggaaataaacagtcgtggggaatgagcaatgatgatgatatgtgtgtgattgatgacaaagaagatttctcgcagagtgattccaaatacaaatcatttatgtcaactaataatattgagaagttcaacccaatgtctgatccctctgatga

SEQ ID NO: 25691 - DNA, 270 bp, Oryza sativa
  Clone ID: PAT_MRT4530_30553C.1
cggccggattcccggtcgaccacgcgtgcgccacgcgtccgctcacgcgagccgtctagctacctcaccgtcgagtacctgggcgactacagccggaacaacgcgcagatcagtgcgtcgcatctagacggtccacgagaacctcaagctcgacgtgatccactaccggatggccatgctgcccgcgctcgagtgcgtctacccggagttcctcggccggaactgcgacaagttcggccaggccgacgacgctaaggcctgctcggagat

SEQ ID NO: 25692 - DNA, 212 bp, Oryza sativa
  Clone ID: PAT_MRT4530_30554C.1
atgttgctgtcgctggattggatgagttcatttgtcaaattgacagtgagatacgtgaaatctttgcagagaatggcgtggacgagcacggcaagccgacgcacaaggtggtgtacagggtgatggacgccgacaacaacctccgtgccggcaacccgttccccggcgcgacggctaacatcatggacgtggtggagagaagtggggaataa

SEQ ID NO: 25693 - DNA, 633 bp, Oryza sativa
  Clone ID: PAT_MRT4530_30555C.1
atggcgtcccggatggggctcgcgggcaacgtgcgcgaccgcgggaagaacgtgctgaggaaggtggaggaggccaaggtttgcgccagggggcggagccgggacgcgctatacgcggcgtgcctccacaccgcgtgccgcatggagggcgcgccgcggacgctcaaggagttcatcgccgcgacgcccgacgcggcggcgacgaagaggaacctgggcaagttcatccacgcgatcaagaggctcctcgggagcaacgatgaggaggccgaggccgggcaggatcaagcgggcagcaaggcgacgaacggctgcggcggtggcggcggcgccggcgcggtggtgcgcgccagcaactacttgctccgatacgggtcggcggtcgggatgagcggccaggaggtgagcgcggcgcagcgcgcggcgagcaggctggacgagagcctcgacgtgcggcgaaacccgcagtccatcgcggccgccatcatatacatggccgtgcagcgcgccggcggcggcggcggcaggagcaagagcgtccgcgaggtgtccgccgccacgggcgtcagcgaatcgaccatcaaggacgcgtacaaggacctgtgccagcacgccgaggtgctcttcggctaa

SEQ ID NO: 25694 - DNA, 729 bp, Oryza sativa
  Clone ID: PAT_MRT4530_30556C.1
atggagttgggggttgtcttgagggagtggagggcgatggcaaggacgtgggatgggtcggggcagcttgaggcatgtgaggcacttgttgaacggtggcaggatggcctcaaggtgggagaaggttgcgaggaggtccttggtcctcttcagcgccttgaaggcctcctccacgacggtcacagcaatagcaacgtcgccaccgccgtcagcacctgccgcgcctgccccgtgtctgccgcccgtgtcgccgctccgctccaaaccgaggagccggtgcgcgctaggacgcggaaggggactccgggcgctcgtcttcttcctcttccccggcccgaggccggagagatcactcccgtgccgtcggcctctcgtcacagcgccctcctctgcagcgtggactcgccggcgtcgccgcccgagtccggtagcaacctctcgtcgccgacctcccacggcgtgtttcctcctaatccggtgctaggaatgctttaccttagctgcgtagatgctctcaccgccgggaatcagcccctcatgacctcgtcgccgtttcccccttttctcgccgccggttgccgccaccgcaatccgccgccgtcgaactccctccggcgaatccgagccgttggctcgctccctctcattctccctcgtcattccgccggcccgcgtggcagccacgtaggcgccacgtcggtgccacctcggcacgaccggatcggctga

SEQ ID NO: 25695 - DNA, 1440 bp, Oryza sativa
  Clone ID: PAT_MRT4530_30557C.1
gcccggccccgctgccctgccacgcctgtagcagcgcagccgctcgaccccgcgagccagcacgcgtgcccgagccgcgccgctcaaatcgccgcgcgccgttgcttcccgcgcgcgctcgccgtggtggccgaccgcctggtcgccgccgccgtcagcatctgccacgcctgcccgcgcctgccgcccgtgtcgctgttccgctccacaccgcccccgccgtcatcgccgtcgtcacgacctggccccgccactccgcacgctagcttccaagggatggaggcagagctcctcctccctctgccgcgtcgccctctctccctcctccttttccccgtttcgctcgccaccaccacaccattgccgcccctctgtctcgcctccgccgttcatcgccaagcatcgggagagccggtgcgtgcaaaggacgcgtgaaggggacttcgggcacatcgtcttcctccgcttcctcggcctgaggccgaagagatcactcccgtgccgtcggcccatcgtcactgcgccccgtcccgcacggtagtgcatctccccgttctccctcctcgatccatctcctcccttgcgccgccccgactgctgccatcactcacagtgggctcgccgccgtcgccgcccgagtccggtaaccacctctcgtcgccggcctcccacggcgtgtttcctcctaatccggtgctaggaatgcattaccgtagccgtgtagatgctctcaccgccgggaatcagcccctcgtgacctcgtcgccgtttcccccttttctcgccgccggttgccgccaccgcaatctgccgccgacgaactccctccggcgaatccaagccgttggctcgctccctctcgttctccctcgtcattccggtgtacaccccgtcgcccctcgtcgtcgcacggcatcccggagaaaccgccgccgcccgccgtctattcgcggccggcgccttcgtcttcctctcgccggcccgcgtggctgccatgaaggcaccacgtcggtgccacctcggccgcgaccgggtcgagccgaccctggtcagccgctccctccggccccgctcacgcgcgcggtccaccgcgagccgtgaggctgcgcgtgggccagccgtatccgcgtcctctgcgaaccgcgcgcgtgcaccgcgtctctttccccgaaccggtgagccgagccaccgaaaagcaggtcccactcgggaccacgcgagatggacccggcccaccagctccctctctcctccccgcccgcgcgcgcgccttgggccgccttctctggccggccgacccgttaagttcggccgagccgcccctttctctcgggccgcgccctagccgcccgagggaagtctaattcccctccctctttattttcttttcttttctcaaaaaggatttaaataaatccttttcctttagatcaaaaatcc

SEQ ID NO: 25696 - DNA, 1487 bp, Oryza sativa
  unsure (1)..(1487): unsure at all n locations
  Clone ID: PAT_MRT4530_30558C.1
ccaggaacatacttatggaagaaattagggctcagcgacctcgctaacagctcagaatcaacaaagggaaagcggaagccaagacttggaccaaacatcacaggcgcgacttgggaactaggccgaaaccctaaaactcatcgtagccgacttgctcctggaagaactcttcgtcagcgggggccacatcatcttcttcagcaactgggggggattatttatatagagcaagggtgattactcagccaggggtgtcccatttcacccatgtggttgcacttgtcttatgttcggatgaaattccaaggaaacggtccttaagtgcaagagcgggaaaccgtacacccgcctcacggctcgcggtggaccgcgcgcgtgagcggggccggagggagcggctgaccagggtcggctcgacccggtcgcggccgaggtggcaccgacgtggtgccttcatggcagccacgcgggccggcgagaggaagacgaaggcgccggccgcgaatagacggcgggcggcggcggtttctccgggatgccgtgcgacgacgaggggcgacggggtgtacaccggaatgacgagggagaacgagagggagcgagccaacggcttggattcgccggagggagttcgtcggcggcagattgcggtggcggcaaccggcggcgagaaaagggggaaacggcgacgaggtcacgaggggctgattcccggcggtgagagcatctacacggctacggtaatgcattcctagcaccggattaggaggaaacacgccgtgggaggccggcgacgagaggtggttaccggactcgggcggcgacggcggcgagcccacggccgaggaagccggagggagacgatgtgcccgaagtccccttcacgcgtcctttgcacgcaccggctctcccgatgcttggcgatgaacggcggaagcgagacagaggggcgggaggnnnnnnnnnnnnnnnnnnnnnnnnnnnnnnnnnnnnnnnnnnnnnnnnnnnnnnnnnnnnnnnnnnnnnnnnnnnnnnnnnnnnnnnnnnnnnnnnnnnnagcttgatggagcgagctagcgctcgtcaggctcgtccaaacggcgacgggggggtgacgccggcggaagagaaaagggaaaaggaggagagaaaggggggcttgcccgttgccactttgggaaaaggaggagggagagagggcgacgcggcagagggaggaggagctctgcctccatcccttggaagctagcgtgcggagtggcggggcgcgagatagggagggagagagagagagagagagagagagagaaagatgggccggagagggaatcggcccatcgaacccgagggaggcaaaatagacttttgcggaggaattcgatttgggaaggaattggattcgggatttgaattcgacgatggatcggggattcgagatccggaatggcacagagactgactgcaagcgaagaaacaattttcgcaat

SEQ ID NO: 25697 - DNA, 945 bp, Oryza sativa
  Clone ID: PAT_MRT4530_30559C.1
atggtgagattgaagatgacccccagagacgactcttacattctagaatactggaacaaaaaactggttgctctgaggagatttttaaaaggctggtggataaatgtacaaagagatgctaggattaagaagtggaggaaactctgttgtgctgaggaagaagggaaactggaacaatttgctgagaagatgaaggagctgacctctaatctgaaaccgagaagaactggagtagggaacggcagtctaaccggcaactcaacggcggtcagaccggcggcagacttgcggcagtcagtccggcgcttttacttcggccagaccgcgattcatcgaatttgggggttcgcaagcaccgacccagagtgcacgattaccgaggcgcaactaggtggttacaagggaacatggtataacaattacaatggaagggtcaagtgcaacaagttaggggggggacggagggagcggctggccgggtcagccgatccggtcgtgccgaggtggctccgccgtggcgcctacgtggctgccacgcgggccggctggaggacgacgaaggtgccgaccgtgaatggatggcgggcggcggcggtttctccgggacgccgtgcaacgacgaggggcgacggggtgtacaccgggatgacgagggagaacgagagggagcaagccaacggcttggattcgccggagggagttcgtcggcggcggattgcggcggcggcaaccggcggagagaaaagggggaaacggcgacgaggtcacgaggggccgattcctggcgatgagagcatctacgcggctacgggaacccatcccttgcgccggattaggaggaaacgcatcgagggaggccggcaacgagagacgcttccgagctcgggcggcgacggcggcgagcacacggcgagcgacggcagcagtcggggcagcgccagctag

SEQ ID NO: 25698 - DNA, 858 bp, Oryza sativa
  Clone ID: PAT_MRT4530_3055C.1
gtgacgtcaccgacagcggcggcggctcggcggagcggacggctcggacggcgcacgcttgccagcgaacggcggcgcgaggacgcaaacggagggcaccagcacgtagaggacgacgcggcgaacacaccggtgaccaaaacggcggcggaagaacaacgaacgacgacggcgacgaggaggaaacggcggaaacctacgggttgtcgacggcgacgaagctccgacgatctccagcgactgcgaaggggcggacgaggacggcggcgacttggcgacgacgacggtggtcttcccgagcgacggcgacggctgaaacgacggcggcgcacggctggagcggcggcggtgacggcaaagctagggcacacggcgctagggctcttccggcgacgagaggcgaaggcgaagggggcgacgagtagaggagacaccgggggtccttttaaaggggctcggaggcgacggcggaggcccacggcgacggcaacggcgaaggaaagctcggcttggagagagggaaaccgatccgaaacgaactcgatttcacgaacttccaaaacgctttagccgaagattccaaaggagaaaaggtagaggagatcccggagattgtttcccctcaaccaattcaaccggagaaggaaaggaacggccggatttggaaaggaaacggcggcggcggcgctagggtttgcgggcgacggcagccggaggaggacgaaggtcctgacgggtgggacccacctgtcagcgacagcgctcgcacgagcgggcggctgcggactgggccggctgggccgaggagagagaagggattttgggccgactttcggcccaaagccaaaagagactttt

SEQ ID NO: 25699 - DNA, 327 bp, Oryza sativa
  Clone ID: PAT_MRT4530_30560C.1
agcttcgctcactcacttgcagtgtcagtgttgctgattaagctatccaagggtatatatattattagattgttaattgattaagaaatggaagggctgataccattggtgtacaaggccatagtggagtacaggaacaaggcaagcagcaggcaggtcactctgagaagcttcttcttcgtcaccgtcgtcgacgaccagctgcacggcggcgactccggccggtggtgctacgcgccgtcgccgccggcgagtgccgcccaccagctggtgtcgccgctgctgcgatcggcgccgcgtcgccaccgtgcagaggacgaggtttaa

SEQ ID NO: 25700 - DNA, 1498 bp, Oryza sativa
  Clone ID: PAT_MRT4530_30561C.1
tacagagtaggagtacagtcatgttgggctgcggacagatcccgagctcacaactgcattacaaaagagaagcggaagccaaaacttggaccaaacatcacaggcgcgacttgggaactaggctgaaaccctaaaactcatcgtagccgacttgctcctggaagaactcctcgtcagcgagatccacttcatcttcttcagcaactgggggggaattatttatatagagcaaggctatttactcagccaggggcgtcccattccacccatgtggtcgcacttgtcttatgttcagatgaaattctaagaaaacggtccttaagtgcaggagcgggaaaccgtacacctgcctcacggcccgcggtggaccgcgctcacggggagggtggaacggagggagcggccgatcgaggtcggctcgacccggtcgcggccgaggtggcaccgacgtggcgccttcgtggcagccacgcgggccggcgagaggaagacgaaggcgccggccgcgaatggacggtgggcggcggcggtttctccgggacgccgtgcgacgacaaggggcgatggggtgtacaccggaatgacgagggagaacgagagggagcgagccaacggcttggattcgccggagggagctcgacggcggcggattgcggcggcggcaaccggtggcgaggaaagggggaaacggcgacgaggtcacgaggggccgattcccggtggtgagagcatctacgcggctacgggaatccatcccttgcgccggattaggcggagctacgcccagcgaggccggcgacgagaggcgctatcgagctcgggcggcgatggcggcgagcacacagcgagcggaggaagaaggcgagcgcccggagtccccacccgcgtcctggcacgcaccggctcctccggcacacgcgacggcggcggtcggcgagagagacaacgggacggcaatggcgcgggctaaaaacggggaagattgggagggaaaaaggaagggagggcacctgggtttatagggcggcaatgtcggtttggaaaccgaccttgggtggtcaaggcgcgagctggcgctcggcgctcgcggccaaaacggcgacagggaggaggggaatgacgccggcgggagagaaaagggaaaaaggaggagagaaagggggcttgccccttgcctctttgagaaaagagggagggagagagggcgatgaggaggagccctgcctcctttccttggaagcacgcgcggggagaggcggggctgacgggggagagagagagagagatggggagggagggagagatgggccgagaggaattcggcccatcgaacccaagggaggcaaaatagacttttgcggagggatttgatttgggaaggataattgagattatggtttggatttggattcgggacttgaacttgacgatagatcggggatttgagatctggaatggcacggagactgactgcaaatgaggaaacaattttcgcaat

SEQ ID NO: 25701 - DNA, 382 bp, Oryza sativa
  Clone ID: PAT_MRT4530_30562C.1
acattacagaaaatttttgacactccaaccacacctacgaacctttagagcggtcgacctttagttttttttttttattttggacttttcaaatattgttttttaatgtaaataatttttgttttcattgtatttttttgggtttttcttttttttttttttttttttcaccaagaatcatccattctttcttggcatttttgcgggatttttaccccccacccctgcttttaacccccaacacaagccccccccaaaattaaataaacttgcccggccagcgaacaaaggaacggaaaaacaaacggaacaaacccccaacaagaaagttttttgggggcccccggcctgaccaattaccactaacccccctccccctccc

SEQ ID NO: 25702 - DNA, 363 bp, Oryza sativa
  Clone ID: PAT_MRT4530_30563C.1
atggcgcgcacaaccccagcggtgacggaggcaagggagaatccgggcgaggctccggcactgctcctgtatggctacaaggtcatcgccgctggcgtccgtctacacctccattgctgttgtgcggcgaggaggtcacaagggcggtcgaggaaggagatgaggttggtacggggcgctagagcaaggcaacgaggcccatctgcatctcccgatggaaaccaatggcctcctccaagcctggcgctgctccctcatggcggcgacgttcgcctgcgcctccattgctgttgcggcggagagatcgggggacgtcaggggcggggcgcggagaggggcggcggcgttgctcccatgcgctga

SEQ ID NO: 25703 - DNA, 1493 bp, Oryza sativa
  Clone ID: PAT_MRT4530_30564C.1
acctatgctgtgctggatgcaaaattatcactgaagaacagttacaacacaactgcattacaaaagggaaagcggaagccaagacttgaatcaaacatcacaggcgcgacttgggaactaggccaaaaccctaaaactcatcgtagccgacttgctcctggaagaactcctcgtcagcgggggccacatcatcttcttcggcaactggggggattatttatatagagcaagggtgattactcagccaggggtgtcccatttcacccatgtggccgcacttgtcttatgtttggatgaaattccaaggaaacggtccttaagtgcaagagcgggaaaccgtactcccgcctcacggctcaccgtggaccatgcgcatggggagggtggaacggagggagtggctgactgggtcagccgatccggtcgtgccgaggtggcaccgacgtggcgcctacgtggctgccacgcgggccggctggaggaagacgaaggcgccggccgcgaatggacggcgggcgacggcggtttctccgggacgccgtgcgacgacgaggggcgacggggtgtacaccggaatgacgagggagaatgagagggagcgagccaacggctcggattcgccggagggagttcgacggcggcggattgcggtggcggcaaccggcggcgagaaaagggggaaacggcgacgaggtcatgaggggctgattcccggcggtgagagcatctacgcagctaaggtaaagcattcctagcaccggattaggaggaaacacgccgtgggaggtcggcgacgagaggttgctaccggactcgggcggcgacgccggcgaggcctcgggccggggaagaggaagaagacgagcgcccggagtccccttccgcgtcctagcgcgcaccggctcctctggcacacgcgacgacggcggtcggtgatagagagacagaggggacggcaatggcgcggtggagcgagggagaatgggggagggaaaggaagggagggcgccttggtttaataggagggcaatgtcggtttgggaaccgacctagggcggtcaaggagcgagttggagctcagcggtcgcggccaaaacggcgacagagggcatgacaccggcagaagaagagaaaagggaaaaaggaaggaagaaagggggcttgccccttgtcgctttgggaaaaggaggagggagagggggggtgacgcggcagagggaggaggagctctgcctccgtcccttggaagctagcgcgcggtgagcgagggagagagggagagggagagagagggagagagagagggagggagagagagatgggccgagaggaaatcggcccaccgaacctgagggaggcaaaatggacttttgcggaggaattgaattgggaaggaaaattgagattagggtttggatttagcgatggatcggggattcgagatccggaatggcacggagactaactgcaagcgaagaaataattttcgcaat

SEQ ID NO: 25704 - DNA, 609 bp, Oryza sativa
  Clone ID: PAT_MRT4530_30565C.1
atggcggtgacgggacaacgaggggagcggtgcggtggcagctgggtggtggagctcggcggaatcggccaacccaccgcccctgaggagggggagatcgaggacgacgacgatgggggccggagggagcggccgaccggggtcggctcgacccggtcgcggccgaggtggcaccgacgtggcgccttcgtggtagccacgtgggccggcgagaggaagacaaaggcgtcggccgcgaatggacggcgggcggcggcggtttctccgggacgccgtgcgacgacgaggggcgacggggtgtacaccggaatgacgagggagaacgagagggagcgagccaacggcttggattcgccggagggagttcgtcggcggcggattgcggcggcggcaaccggcggcgagaaaagggggaaacggcgacgaggtcacgaggggctgatttccggcggtgagagcatctacgcggctacgggaatccatcccttgcgccggattaggaggaaacacaccgagggagaccggcgacgagatacgcttccgagctcgggcggcgacggcggcgagcacgcggcgagtgacggcagcagtcggggcggtgccagctag

SEQ ID NO: 25705 - DNA, 1584 bp, Oryza sativa
  Clone ID: PAT_MRT4530_30566C.1
atgcaaccgcccgaggctcgggcgagccgggcaagcgagttgcgtgactcgcgttacccctcaccaccacgacacgagagaggcgacgagcgcggcggccggcgagagggacgaagagctcggcggccagcgagaaaggcgacgagtgcggcgaccggcgcgagcgacgagcgcggcaaaaagaaaagaaaagaaagagggaggggaattagacttctctcgggcggcgaggacgcggcccgagagaaaggggtggctcggccgaacttaacgggccggccggcccgagaaggcggcccaaggcgcgcgcgcgggtggggaggagagagagggagccggtggaccgggtccatctcgcgtggtcccgagtgggacccgcttgtcggcggcttggctcaccggttcggggagagagacgcggtgcacgcgcgcggttcgcggaggacgcggtgcgcggcgggcccacgcgcagcctcacggctcgcggtggaccgcgcgcgcgagcagggccggagggagcggctgaccgggtcagccgatccggtcgtgccgaggtggcaccgacgtggcgccttcgtggcagccacgcgggccggtgagaggaagatgaaggtgccggccgcgaatggacggcgggcggcggcggtttctccgggacgccgtgcgacggcgaggggcgacggggtgtacaccggaatgacgagggagaacgagagggagcgagccaacggcttggattcgccggagggagttcggcggcgacggattgcggtggtggcaaccggcggcgagaaaagggggaaacggcgacgaggtcacgaggggctgattcccggcggtgagagtatctacgcggctacgggaatccatcccttgcgctggattaagaggaaacgcaccgagggaggccggcgacgagaggcgcttccgagctcgggcggcgacggcggcgagcacacggcgagcgatggcagcagtcggggcggcgccagggaggaggcggaacgaggagggagaacggggagatgcactaccgtgcgggcgggcgcagtgacgatgcccgatggcgcggggcgtgatcactccggcctcgggccggggaagaggaagaagagggagcgcccggagtccccttcacgcgtccttcgcacgctccagctctcccggtgcttggcgatgaacggcggaggcgagacagaggggcggcaatggcgcggtggagaagaaaggaagagggaaaagaaggagggagagagggcgacgcggcagagggaggaggcgctctgcctccgtcccttggaagctagcgcgcggtggcggcggggccgggttgatgacgacggcgatgacggcgggccggtttggagcggagcggcgacacgggcggcagacgcggggcaggcgcggcaggtgctgacggcggcagcgactggccggtcggccaccacggcgtgcgcgcgcgggaagcaacggacggcgcggcgatttgggcggcgtcggcgggaagcggcagcgaaggcggagggcgctcggctcggcgcggctcacgcgcacgcgcgcgcggcacacgggcagagcggggga

SEQ ID NO: 25706 - DNA, 623 bp, Oryza sativa
  unsure (1)..(623): unsure at all n locations
  Clone ID: PAT_MRT4530_30567C.1
gnaattgtaatacnantcactatagggngaattgggtnccgggncccccctcnaattttttttttttttttttttttttttttttggatncaattaaactttttcnttttggaaaatncctaattcactaccgtaaattaagtttcacttggtactactaatntcaatcnattttattacaggantgaatccnaaagggtaaaaatgcaacgtntgttcgtttgttcgggtcacaaacccntcctgcattgcantangtncnccgcggggggatcntcagcggngccntaaccttcntccccgtcgcaatattcctcctcctctgtcttgaaggntgggttgcggcggaaaacctccngggaanaagcgcttcntgccggtggcctccatgatcctcttcccnaacggnggtcgtgcccccttcctggtgccgttaancgcgcngnacnaanaatttcctttgctggccttnaagtgttgttaggnaaatangtccggttcacngatcccanaaattcngttcacancttgtgaaacggtttttggtantccccaaggacaaaagacaanaccggntgggacnantgtcattgccaatnccaanttccaaggcttccaatntt

SEQ ID NO: 25707 - DNA, 1703 bp, Oryza sativa
  Clone ID: PAT_MRT4530_30568C.1
acggccacccgggcctggctgatcccatcagccgccgcagattttccaaacgtcgaacccaatccccaacagcaatttcacaaagcaaaaaagaaaagaaaagaaaagaaagagggacgggaattagatttcgctggcggcttgagcgcggcccgagaggggttggcgcggcccggccttgccattgggccggccggcctgagggacggcccaaggggctcgcggggaggagaggagagagggagcgggtgggccgggttcaccttgcatggtcccgggtgggacccgcttgtcggcggctcggctcaccggtttggggaggggaggcgcggtgcatgcgcgcggtttgcggaggacacggtgcggcgggcccacgcgcagcctcacggctcgcggtggaccgcgcgcgcgagcagggccgaagggagcggccgaccgaggtcggctcgacccggtcgcggctgaggtggcaccgacgtggcgcctacgtggctgccacgcgggccggctggaggaagacgaaggcgccggccgcgaatggacggcgggcggcggcggtttctccgggacgccgtgcgacgacgaggggcgacggggtgtacaccggaatgacgagggagaacgagagggagcgagccaacggcttggattcgccggagggagctcgacggcagcggattgcggcggcggcaaccggcggcgagggaagggggaaacggcgacggcgcgacgggagatcgattcgggcgagctagagcatctacgcgactccgggaatccgtcccttgcgccggattaggaggaaacgcaccgagggaggccggcgacggcggcgggcacgcggcgagcgacggcagcagtcggggcggcgccagggaggagatggatcgaggagggagaacggggagatgcactaccgagacgaggcggggcgctgtgacgagaggccgacggcacgggagtgatctctccggcctcgggccggggaagcggaggaagacgagcgcccagagtccccttccgcgtccttcgcacgctccggctctcccggtgcttggcgatgaatggcggaggcgagacagaggggcggcaatggcgcggtggcggcgagcgaaacgggaggaggaatgatgggagggcgccttggttaaatgggaggcaatgtcggtttgggaaccgacctagggcggtcaagggagagggctagcgctcggcggtcgcggcccaaacggcgacagggggggaggaggatgacgccggcgggagagaaaagggagaaaggggggagagaaagggggcttgcccccttgccactttgggaaaaggaggagggagagagggcgatgaggaggagccctgcctcctttccttggaagcacgcgcggggagaggcggggtcgagtcgatgacgacggcgatgacggccgggcggtgtggagcggagcggcgacacggacggcaggcgcggacaggcgcggcagagggtgacggcggcgacgactaggcggtcggccaccacggcacgcgtgcgcgggaagcaatgggcggcgcggctcgggcagcgagagcggagagggagggctcggctcggcgcggctcacgcgcacgcacgcgcggcgcgcgggcagagcggggagagagagagagggagagatggggagggagggagagatgggccgagaggagttcggcccatcgaaccc

SEQ ID NO: 25708 - DNA, 225 bp, Oryza sativa
  Clone ID: PAT_MRT4530_30569C.1
atggaagcaccactgaagactggcttctccgaccttccacctgatcctgggctgcccaacacatcggtgaaaccggggagagctgaagagaagggaaaccccagaggcattgatcatttggtcaccaaaaagccactccacagtagtaaagtctcatcttttgtattggccgaagtgacaatagtcacattgaaccctcgaatatgctcgaagatctcgaaatga

SEQ ID NO: 25709 - DNA, 306 bp, Oryza sativa
  Clone ID: PAT_MRT4530_3056C.1
atggatcctcttggaattgagagctgcatggtaaaacttggctatagtgctggcaaggaaaagagtcttctacattcaattaaatttctgagaaaaagggtagtggctcaccaagatacgacctacctgaattacaaaggggataagaacgatgttggcgaatgcaaaagattggtggaattacttgtgcacaaatcgaaggcagactacatgatcgagctggtatcgcatatacgccaacttggctgggtgatggagtccccaatcctgagaagtaaagtcttcaaagcagcttcaattagttga

SEQ ID NO: 25710 - DNA, 326 bp, Oryza sativa
  Clone ID: PAT_MRT4530_30570C.1
ccaggtagcatccattaatgactccgcacacattgcaagaattgtgccgcccgaaggcaaaacttgcaaaagtgcggggccctgtaattaaccctcactaaagggagagaattcgagctcggtacccaatcgtttggaacacccatgggcatgttccgtctatgcagcatgtggcctggcgtgggcgtagctgactgggcgtggcaaggccatggaccaggcaagggctccccctatatatgtttgaactgaaatcctcactttgccaccaaattggtccttgcctgtagacaaaatttctagtttgatgacttagcttcgaattt

SEQ ID NO: 25711 - DNA, 661 bp, Oryza sativa
  unsure (1)..(661): unsure at all n locations
  Clone ID: PAT_MRT4530_30571C.1
ccggccgggtctcaccctagccgccgccgcctcctcctcctctcgccttctcccgtcttctcctntcgagttagcntacctccnttattcaaccatgggtaaggaagaagacgcacatcaaacattcgtggtcatttggccacgtcgactccgggaaagtcgaaccaccacgggcccatctgatttacaaattttggagggtatccaaaaggtgggggtccaaaaggttcaaaaagaaaaacccttaaaaaaaaaaaagagccctttaaaaaacccggggggggttttttaaaaatccccaacccccccggggggaaaaattttcccccccccctttttcccccccggcggggaaaaattttgagaacccccccacaaatatttgttgggggggtttttttttggcccccccccggtgggcgccgggtttttttttttttttaaaaaaaagaaaaaggtggggggggcgcgccccccccccccatttttttgtggtgtgggcgcgccccccctcctttctttttccccccccccccccccgcggggggggtggtgggggggggggttcccctccccccccccgcgggaggggcacccccccccccccggggggcccccccnnccctcttctttttttttttttttccagaggggggggggg

SEQ ID NO: 25712 - DNA, 561 bp, Oryza sativa
  Clone ID: PAT_MRT4530_30572C.1
ttttttttttttttttttttacagaaaagatacacacaatctaactaaccactatcatgtacacaagagattacagttgagttcaagcatccgctacaaagattggcttcacaaagttaaaacaggtggggaggaaaaaagagacccacagcccacagcttacccgaaagccaaataccacgtagcattgaaatgatgcggcaaaaaagaggaaaacaaactattggctactatgctcttcacacaaatcaatgaacatctcactcacattcttcactagtcgagggtcgtcaaaacaagatcccgtgacgagtcagatatcctagcagcctcagcaatcctgagggccataacagatttgtatgccaccagctcagcctttgccatgagacgctgagctctactgcgcagacgaacagctgtttctcctgcctgtgttgcagcacgttcggcttccacaactctccgcaaagcctcctcttcagcaccattagcatcttgcaagcatatgtcaggctttccacgggcagcttggcttcttgtgtctcttgaaagatcttt

SEQ ID NO: 25713 - DNA, 327 bp, Oryza sativa
  Clone ID: PAT_MRT4530_30573C.1
cattcccttcttcccgcgttgtgttcgctccttgaaacaacgagtcacatcctcatcgactgtgtgttcgttcgacaggtttggcaccatgtgctgtcttcacttggctggcctgacctcgctccttcccgcggttgcacgctttaggtttggtggccgacttctaggaattgcctgctgaagcatcttcgtaagggcttcgacttcctagtcctcttggtttcttggcaactatggaaggagcagaactccagagtattcaattcctctatctcgtcggttaacattttagcggttctggagtacgccttacaggaagaccgtctg

SEQ ID NO: 25714 - DNA, 453 bp, Oryza sativa
  Clone ID: PAT_MRT4530_30574C.1
aaattcgatgataagctgtcaaacatgagaattggtcgacggcccgggcggccgcaaggggttcgcgttggccgattcattaatgcagctggcacgacaggtttcccgactggaaagcgggcaaatactcaagcttgcatcatcaatgggagcaaactagatgatctggtggaggacaagctattgccagcacaagagatcatcggctggcgcctagccatcacggagctcttccccacccctaatacgagtgagattataggattagagcccttcttccaccatggctttgctcttgcaacctctgatttctatggaatcgagcttattcatgtaaacctaactctattctccagattgctatcttcatcaacctttgtgaagctttcttgggatcccccacacttcgccctcttccgtcacttgttcaacctcaagccccagccttcctga

SEQ ID NO: 25715 - DNA, 518 bp, Oryza sativa
  Clone ID: PAT_MRT4530_30575C.1
gctgaagaaacactagtgaattttcattgaattccaaagttgaaaacacttttggtataacatttgcaaaacaagtatctgtatttttctgacaaaaaaaggctgaaatttcctattgtaacatctccaaacacagcagcaggatagtttcctggcgggaaaagagataacaagagagagcagtagaggtcacttcctctgtgtccttgtgatccaatccaaaacgtggcaacaatcatcatccccacggaacaccctgttctcagaacggtaggtcttgagatcacggctctcgtgcctgcaactctccctcttcatttccagtgaatcaggaaccagccttgcagcacggtcatggtaagcatcacagataaactgcgcaatggcgtcgaaaggctgcgaggcatcaacccactggtaaatcttctcgttgcggaaccatgtcatctgcctctttgagaagtcctggaggcagtctgaaacttggtcaggaactccaagaactcttgtggggagct

SEQ ID NO: 25716 - DNA, 306 bp, Oryza sativa
  Clone ID: PAT_MRT4530_30576C.1
atggcaagggcggcggcggcggacggctccccggcggcggcgacgaccgaaggcgacggcaagtgcgggtggcggcggcgcacggggaaacggggaaggaaaggaaaggggagggagtcctcaccggagggggcggcgacgaccggcgacgagaggcgatggagggaggtcgacaagcggtggacgggtcctcctttcgctggtctcaaggatacgaactgtcttctccacatatatcagatcttgttggatatcgatgtgctccgaattggcttgttcttcgggtaccctcaagcacttctttaa

SEQ ID NO: 25717 - DNA, 549 bp, Oryza sativa
  Clone ID: PAT_MRT4530_30577C.1
atggagtacgcggaaggcatcggaccacggggtctgccggcctcctccgccagccttatctgctcaagccgctcctcctccgtccatatcttcatgtccccccttgctcctccgggagatggcctcacccgctctcgccgctcctcctcctccagcggccgccgcgcctctccatgccacccgctacgtgtcaccctgaacaagaagaggggaagattgaggaagagagactccgcgcgctcacgggcagctgcaacacatcgtgagcctaatacgctcaaagctaggccacgcacgcgtgggccgccaccggagatccccgctgccgcgccgttcccgcccgccaccgttgctgctaccggccacgaccggctcctcctgagcgcgacggcgctggatctaggaggggagggtgccggccgtcgagcccgccgccgtggccgctcccggcccctcccgagcgcgccgccactggatctaggagggggagggcgccggccgtcgagcccgctgctgccgcgctgctcacgcccttgccgttgtcagtga

SEQ ID NO: 25718 - DNA, 346 bp, Oryza sativa
  Clone ID: PAT_MRT4530_30578C.1
gcacgaggcgcgtcgccgccccgagcgccgcacccgcgatctccgcacaaatcccgcaaggccaccaccccttccaggccgctttagaccggcgtcgtcgcccgcatcgccccctccgctccgatccccatatcgcgagttgcaagcagagcatgggaggggcaggggcggggcgccgtcgtcccactgcagaccggcccgttcctcgcgctctcctctcttggccccctctgcggccaggaagacgtcgccaccaccccctctatccgcgacgacgccacaacctccgtccgcgccgaccccacgctgcccatgccgccggtccttcgtccacgcaccgccgccg

SEQ ID NO: 25719 - DNA, 709 bp, Oryza sativa
  Clone ID: PAT_MRT4530_30579C.1
atgaagggcgtcaacttgagggttcagatcatccgtgtagaatccaacgcatcagatcatctccacctcctcacctctgcatcccccagccccacgcacatcgatctccccctcatcccgcaacccgcgcgccgtctcaccttcctccctccctcccctaaccgcatcgctgccctaattgccgcgcccgcgatctccgctcaaatcccgcaaggccgccaccccttccaggctgctgtagaccggcgccgtcacccgcatcgccgcctccgctccgatccccatatcgcgagtcgcaagcagagcatgggagcggaggggaggggcgccgtcgtcccgctgcagaccggcccattcctcgcgctctcctctcttggcccctccgtccgcgacgccgccccctccgcggccgggaagacgtcgccaccaccacctccatccgcgacgacgccacaacctccgtccgcaccgaccccacgctgcgcacgccgccgatccttcgtccacgcgctgccgccgccgctgtcgctgcctccaccgccgtccgcgtcgaccccacgctacccatgctggcggcctgctgccccacatcgtgttaacaccgggatcaggtttctggccatcgtctccacgcagatatgggagttgtgaatcaccgtctgtttccgccatggcagcgtgactccgcccgacggctggaggaggcgag

SEQ ID NO: 25720 - DNA, 3501 bp, Oryza sativa
  Clone ID: PAT_MRT4530_3057C.1
atggcggctgcccacggcgaggtccccgtggaggcggatccccgtgctcttctcttctcgccgccaccctcgccttcgcctctcgtcgccggagtcgtcctagcgccgtgcgccctagcttcgctgtcgccgccgccgctccagccgtgcgccgccgtcgttccagccgtcgccgtcactcgggaaggccgccgtcgtcatcgccaagtcgccgccgtcctcgtccgccccttcgctgccgtcggagaccgccggagcatcgtcgccgtcgtcaagccgaaggtagccgccgcttcctcctcgtcgccgtcgccgtccgttggtcgtccgccgtcgccttggtcgtcggtgagttcgccgtgccgtccgctacccgttggtgtcctccgtttgcgtcctagtgccgccgttcgccggcgagtgtccgccgcccgagccgtcttctttgccgagccgccgccgccgtcggtgacgtcatcgctggcgtcatcaagcccctctcccatgccgtgttacaagcctgagtacctgtttggtgttgagggttttgtccaggagttgcgtacgatgtcctttgtcattggatttgggactgcccctttttatgcccagattcgtcatgatcgtcatgaagagaagtgccgagtcaaagtcaccatgaacagtaatagtgaagatatcccctcagcgatgttcgaagctggaggaagaaactacatccatgcatgtcaggaagtggcaaggatcgccataggagagctccgtgatagctacagtgatcaattggccgacactgagtatcgctaccatcctcgtcaaccacagggaagtgaccgtggcagttaccttgagactgaaggaattgagaatgatgctactacaaggcatttggttgagatgctgtgggctatggatgaaagtcgtgcggagactgtgttagcagctcaagatcgtgaagaccggaatcgtggtaagatttgcaagctagaagacaaggtggatcgtttggagaaggaattagccgcattgaagggagaagcaccgccgcagaaggccaggattcgtctcaccgcaaggaagagagctttgtttgtccctcgttatcaattggcgccaaagatccgcgtggtggagaaagaagttgccccagcaaatcctcccgtcatcattataagtagtgatgaagaagaagaacccaagcgcaacaattccaagtttgagtgggagaaggtctcatttgcatcacatcagttgcatggccctgcctctgaatggtgggatcacttccgccttaacaggactactgctgaacctatcacttggcttgaattcaccgctgctttccggaagacgcatataccatcgggagtagtgtctctcaagaagaaggagttcaggtcgcttactcagggatctcgctctgttacggagtatctgcacgaattcaatcgtcttgctcgttatgctccggaagatgtgcgcaatgatgaagagcgccaggagaagtttttgggaggacttaatgatgagctttcttacccactcatggttggagattatcctgatttccagaaattagtggataaggctattcgtcaggaggacaagtacaatcgcatggagcagaagaaacgtcggattgctcaattcaagacacaacagggaaataatcagaagccgcgtcttactttaggaccccagtctatgccacagggaggttcttcgtctgttgttcgtccgcaacgtcagttcttcaacaacaatgctggcaacaacatccgtaatcaagctccacgtcctgttgcagctccagcacagcaacaacctgccaagagggagcaaggcaacaagcccgtggtgtgtttcaactgtggagatccaggacattatgctgacaagtgtccgaagccccgacgcgtgaaggttgtccctgcccagaataactctgctgtaccagcatccaaggctcgtgtaaatcatgtcgctactgcagaagctcaagatgctccagatgtgattttggtccgggagtatcctgatgtgttcccagatgatttacctgccaatgagttggcagaagttaagaggcaagtagatgatttgcttcagaaaggatacatcagaccgagttcatcaccatggggagctccggttatttttgtggaaaagaaagatcatacccagaggatgtgtgtggactatcgtgcactaaacgatgtgacaatcaagaataagtatccgctgcccagaattgatgatttgtttgatcagcttaaaggagccactgttttctccaagatagatcttcgatcagggtatcatcagttgagaatcaaagaggaagatatacctaagacagcttttaccactaggtatgggttgttcgaatgtactgttatgtcttttggacttaccaatgcccctgctttcttcatgaacttgatgaataaggtgtttatggaatacttagacaagttcgtggtggtctttattgatgatattcttatctactctcgaaccaaagaagagcatgaggaacatcttcgccttgcattggagaagctacgagaacatcaactgtatgctaagtttagcaagtgtgaattttggttgtccgaagtgaaattccttggtcacgtcatctcagccggaggagttgccgtcgatcctagtaacgtggaatccgtaaccaactggaaacaaccaaagacagtttcagagatccgcagtttcctaggccttgcaggatattatcggaggtttatagagaatttttccaagattgctaagcccatgacacgactgcttcagaaagatgtgaagtacaagtggtcggaagaatccttagaagcgaagcccactctaattgatcaggttagagaagcccaaattaatgatcctgatattcaagagatcaagaagaatatgagaagaggaaaagctattggtttcttggaggatgagcacggaactgatccccgtgctcttctcttctcgccgccaccctcgccttcgcttctcgtcgccggagtcgtcctagcgccgtgcgccctagcttcgctgtcgccgccgccgctccagccgtgcgccgtcgccgtcactcgggaaggccgccgtcgtcatcgccaagtcgccgccgtcctcgtccgccccttcgctgccgtcggagaccgccggagcatcgtcgccgtcgtcaagccgaaggtagccgccgcttcctcctcgtcgccgtcgccgtctgttggtcgtccgccgtcgccttggtcgtcggtgagttcgccgtgccgtccgctacccgttggtgtcctccgtttgcgtcctagtgccgccgttcgccggcgagtgtccgccgcccgagccgtcttctttgccgagccgccgccgccgtcggtgacgtcatcgctggcgtcatcaagcccctctcccgtgagccgccgtggactcgttcgatctcggccgtccgatttggatcggatcaatctcggccgtccgttcgcgtga

SEQ ID NO: 25721 - DNA, 281 bp, Oryza sativa
  Clone ID: PAT_MRT4530_30580C.1
ggagtacacttttcaagcaatttattccaaagttaacagccagggttccttttgtttttttataagcacacgtaagggcctgaaaccaacaaaacacaaaaaggggggatcaatggcgggaccgaacgaacccaaaccaaagccggcgagcccccaatggggtcaacgaaattgccaaacttttctgggggggggctcacacagagatgatgagagcccttgacgatgcccgcactggacccgggggcacaagagttatggaacttgggcaaagaccgcag

SEQ ID NO: 25722 - DNA, 794 bp, Oryza sativa
  unsure (1)..(794): unsure at all n locations
  Clone ID: PAT_MRT4530_30581C.1
cccgcttccactcccctcccccattattcccgcgattctcctcccttcctcccgccgcgcgcgccttggccatggggaagtacatgcggaaggggaaggtgtcgggggaggtggcggtgatggaggtgggcggggcgctgctcggcgtccgcacccgctcccgcacgctcgcgctgcagcggacgacctcgtcgcagaagccgccggagaagggggagggggaccccggtgcgggcgcgggcgcgggggcggagtacctcgagctcaggagccggaggctcgagaagccgcctccgcacacgccgccggccaaggagaaggagaccgccaggagggcttccgccgccgccgccgccgccgtgaggatgccggcggcgccgcaagcggccgaggagttcgaggcggaggtcgaggtgtccttcggcgacaacgttcttgacctcgacggcgacngccatggagaggagtaccagggagacaacgccttgcagtttaattaggagctcagaaatgataagcacccctggctccacaactaaaaccaacacctcgatcagttcccggcgcagaatggagacctctgtttgtcgttacgttccgagttctcttgagaggggaagagttctttgcagctgctgaacaacagcaacatcaggctttcagagagaggtataacttctgtcctgtgaacgactgcccacttcctggacggtacgaatggacaggctagactgctagattttcatcttgagagctccattgatctctccacacagttgactagcaccaccatg

SEQ ID NO: 25723 - DNA, 390 bp, Oryza sativa
  Clone ID: PAT_MRT4530_30582C.1
atgttgcatgatgttgaggagacaacttacaatgcaagattgcaagcaatgttgcatgatgttgaggagacaacttacaatgcaagataccatgagttcaccaggttgattcgaagaaggaagaagatcgaagcagatttagtgtggaatctagttgaatttggagtcggactgcgtatcggctggataccatatcagctggaaataaagtgtgagttgatcaaggttgatggagccgatggccgatacagccgatatggtatgacttgggctcgcatgggcctgtattgggataatcgtcattgccaattagagatagagctcaggatcaaatcagttggcacgcccttgatacacttgaggctagccttggacttgcactggagttaa

SEQ ID NO: 25724 - DNA, 773 bp, Oryza sativa
  unsure (1)..(773): unsure at all n locations
  Clone ID: PAT_MRT4530_30583C.1
gaaacttaaacatatatattaagagcaacaggatcaaggggggcannagccccgtaccattcgccaacagaaaagaaccaacaagatgcacattcagaagaaaaaactagactannagagtacaaacatnacctcctggaaactanggcanngcgtaagaaagggcgcggaaatcnngacaggaaagctgcnnggcgaaagccacngnaacgattanngaacctntnngggtctcccttgtgggacatgcaaacnncgcttgacgaaaaccggnntaatcctcttttcggaccgctcttcancgagagtctggcacaaaaatgtggagaatttggcatgttggacgccagtagatttttgggtggtaaggctttcacncnnggacttaaaaccaaacttttcaaaccacggganngttcgcctttttgaaactctggaggaagcgnatgagcttcaaaccccgaaatgggcccaccccgagcgttgggatacatacntgcgccagaaaaacgaaaggagggaagaaagggaaaccccagtatcacagctcactccttgtaagcaggtgaaaagagccacaaaccagtttgacacgaatgaaacctggntctttctagagggggaacgaccgcaacaaacgtttgtggaaaagaagcgggattatgcatgaagggtgaaaggcagaaagcaaccaaactgtggaaccccgaggaagggaaggaggtcgggagaaggggctttcngccaagctcggtgggcagggacaacgaaca

SEQ ID NO: 25725 - DNA, 2207 bp, Oryza sativa
  Clone ID: PAT_MRT4530_30584C.1
aggggcaagacataagtgcaaataattagataaatcctacacaaaccacatgcaggtttatcggtaagttcaacttttcatcatctatgataatgaagacaaaatcaaattctaacaaataagatgaatggttgaaccacttcagtcaaataagattttcagcatgcgcatctcagtcttacctatttgcctgtatttccataaaaaccaccataaatatgctacaggcaaagagatggaacaaaattggaaccggacaagcctaggtcataccccccgcaaagaagaacatcagtatccggtgtgttctaaatttcaacttctatcgaagtcagctggaggaaactgactatatctcactccattcctcatatcagaacatatatatggggacagtagatctgaaaaggactgctgctttctgataaaatctataacattgctcaagttgaagtctcagaagcaagcttgatgcgctgatgatgctcagccactttgtattcaactacctccataagcaactggggatccaacacacagtcagggcggccataaacagcagcttgcacactggccataagcttcgcaatctctctgccagagaatccattgatcttcctggcagcctccctgagcaaatcatcacttatgtccttaacttgtatcttctgccgttgctttttcagcagtgagtcccaaaacgagttttttccatcttccttgagcatatagtggtttaagtataacctgagcagctggaacctctcctcctccccaggtaaagggaactcaataacttcatcaatgcggtccgtaatagcagcatcaagatcactaggtcggtttgttgcaaggacaaggacaatatccctcgactggtctccagttcgaaatagtagtgcattgagagcactccgctgagcttcgctcatgtgggtgctgttgcgctcgcacaagaacgcatcagcctcatcaatgaaaagcagcatgcccttccttgacttcttagcccagtcaaaaatttgatgtattttggtaacagcttctgatcctaagggtgcaacatctcctcccgtcatcatggcataatccaagccagatttgcgtgccatctccctagcaactaatgttttcccagttccagggggaccatagaacagcatgttgcgaaatggtgcatcgtgcgactttgtatttgctgtagctcgtgcaagatgttcaatcctccgtttcagtgaaggatgaagaataacattctcaaagcctgcacctcctgacagagatgctgaagtagatttgagagccttaaaccttgaaagtggaaactttggcatagatgattcacggatcagtgaaggttgacccaagattctattaatgtaaccccatgtaacttttgctccttccctggtagtataaattccagcagcgagcgcagtaactcctccaacacccatcaataatttactcctgtcagtcaacagcatcctaaacccaccttcaatgtgtgaaaaagtagtatttattgcagcaatccacttctctttgtcgccatttatacgttccaggagcatctttctgttgtagtcttctaaagcctttgcttcacgagtaagggcttcaccttttgcttcagcgttagcttggatattttgtttctttaagagagccttttctttctcatcctctagcattttttctaaaatcttcttttctgtggtacgcctaacttcttctttcctaagggcagctgcctcttgcatcttcacaagttctgcatcctgtcgcctttgtgcttcacgctccgtctgcattcttttcctagctaattcatcgtcataacgtaacttttgtgcctctgcttgagcttgctgctgcaaactctctctgaatttttcaccttctttctgttgcctctcaatgtccctgaggtgttgttggatgatgtactgaaccttctcggcctccagctccgcaagccgggtcttctcctgcatgcgcatcagctcaaacagctcgacggccacctccgtgccagagtcctccgaagcagcggcggcggcggcggcggcgggaggtggaggcgggggggagctgcggcggaagaaggagtagccgctgtccgcgtaggcgacgtcggcgagcgacgccgcggacgcggcaatgacggccgccgccgccgccgtccgcgaccggaggcgccacat

SEQ ID NO: 25726 - DNA, 561 bp, Oryza sativa
  unsure (1)..(561): unsure at all n locations
  Clone ID: PAT_MRT4530_30585C.1
ngttttcngggnangncagggcaggccnggcaaatccaatccccagntngggggttttcccncttgaattaatttgactnannaatcccaggggccttttccantgtaattgggggggnangggggngggggtttncgggcccngggggacttcccgngntgganaagaaaanggngaggttggntccgaatttgacgantgggacgnggtgatgngggtgangaanaatanngnggttnagggtttttgcctgggcccctggcnaagcnngannaaaggnggtntccnanaanttntccnggnggggttttntttntcanntngggggtttggttttgnaaaaaanttgntttttgnttangcngggnttggttnnannttttnctgctgggacccgngttgtttannnganccttttttgnggnatttttaanatccnantttgnggttttttnttaaaaaaaaaaaaaaaaaaaaaaaaaaaaaaaaaaaaaaaaaaaaaaaaaaaaaaaaaaaaaaaaaaaaaaaaaaaaaaaaaaaaaaaaaaaaaaaaaaaaaaa

SEQ ID NO: 25727 - DNA, 310 bp, Oryza sativa
  Clone ID: PAT_MRT4530_30586C.1
tccacaagggggattctggtctttgccgtgaggggtaacctgtgctggtgaacccccagatatccctgtgggtgatggcgcccaccattgtgagttgtggtgacaggtttgcatgagtgggcatgtctccaggatggaaatgtcagccatgagctgccccatggtgatgaatgatgtggtgaaatgtctgccccgtgagcgtgtggtaatgagttgagttattaggctgtgaatggatatatatatatgaggctggatgaactgtggatgttagtattgtagcccaagatagcccccgaaattgagttat

SEQ ID NO: 25728 - DNA, 195 bp, Oryza sativa
  Clone ID: PAT_MRT4530_30587C.1
cagttgaatctgagttgcttctggcctatggatgatgtttatgcaagcaatcccagacacatgatgtcggcccatttatatggaatgccccatggtgaaaatgaactgatgtgtgccacacagtgcaatggatgatgctggtgttgtgctgaatgctgtgactgattttggccagtggaaccttggtgatgtgca

SEQ ID NO: 25729 - DNA, 536 bp, Oryza sativa
  Clone ID: PAT_MRT4530_30588C.1
ggggggggttttttttttttttttttttttttttttttttttttttttagccagctcaatcttttaccatacgtcacttataaagaggagggtttatagtatgtcgtagtacactgtatgcaacacgtttgtattgtagtactacgtgtgcgtgcatatcagaatatgtacagagtagtacagttcagcaagcacgtaggcgacctttctggcttctgggtcgcaaagccagctgcgctgatgattctgattcttatctcacccatgcatccatctttgttctttgcctgataccccttttccagcaacagcaaaactaccatgcgcaaattggcatcctcttccaccgtttcgtttggtaggcaagcaagcaaaagacaatccattcctggttcctctccttaaaaaccaaaccaagcgggcctatgtttactgaagattagtctttaacaggggccaattccttcccgtcttcaaacagacagacaaacaactcctctaatggtgatcaattatgacttcacggttttttcctt

SEQ ID NO: 25730 - DNA, 1473 bp, Oryza sativa
  unsure (1)..(1473): unsure at all n locations
  Clone ID: PAT_MRT4530_30589C.1
acccaaataatccatgttcagggtgtaaatacaagtagtacaatactctacttttgtgttcagttcagttattctgtctaaacaccacagcagttaaatggttcacgaaagaaaaggggtggaagttagtaaggtactagtacactactactagcaggcatcaagcctgcgcaagttcatgagggaaaagaagcagacacacatgaaataaagcagttcatgagggactagtaaattcagtcgacttgctttcctcaccaatgctcgaggtcaacctttattggcatttaagaatccccacacttcatgctgctactggtactccaaatcttgtacaatcagagccacatctggaggtggaggagcaagcaatacatcttcctaaccacatttccttttttctatagggggcaatatcatgacacagtacaaagcataaagggccgtttgttctcgcacaacaaaagccacagcaacctttatgccttgatatttgttgtttatttaattttttgttccttttttattttttttttttttttttttttttggaggtagaaatacggttcggagtaaagtaacaagataattattgtatcagtttgcacacttcgatccaatgttgggataataattgtcaggataatgccaagtattcaaagatactagcatccgttaattcatactaataaattattgtggatctatggcaacatgagagcgctctatataaagaacttcaggaaattcgttgcagctatgatgaagttgtagttgctggatctgactgtagatatggggcaaagtgtttcagggctgcctcatatactggttttttgaattcaactgccttttcaataacttgctgaggtgtcatccatgtccattcacaaaactccggcctctcagatccgtcaccattaaggttaacctcatcttccttcccagtaaatctaaatagaaaccatttctgagcctgtcctttccagttcgttcctccccacctagcattcagcttttctttcacatcaacagggaaatcatacgttaaccaaacggggacctcagccaccatttctgcagatgtaacacccgtttcctccctcaattctctgaaagcagcttccctcggatcctctcccgcatcaataccaccctgaggcatctgccatgtgttggcgatgtcgatcctggacgcggtgaaaatcttggtgagggaggggtcggcgaggcagatgccgacgttggtgcggtagttctccggcggcgtctccatggaggctacgacggcgagcggcgacgcggagcaggaggaggagagcgggcgggtgaggcggagcgcggaggaggggaggagacggcggcgagtagcggtggtgcggaatcggatagggctcacgaggattggggggaggcgtgcgacggacaccaccaccatcactccgccccgccctcgggcgttngaccacgtcc

SEQ ID NO: 25731 - DNA, 508 bp, Oryza sativa
  Clone ID: PAT_MRT4530_3058C.1
cccacgcgtccgagcaaatcggagggtcagagcacgagctggctgctaaagtggacaagtacgcctgcagcatgatcagtggctccggctcgacgctcttcgaggagatgaggctctactacatcgtcaccttcgacggctacaacatctacgacctcatgacaatgatcagcgaggcgaagagcaccaagaccacatgcacggtgctgatccacgtgaagaccaagaaaggccgcggctactcctacagcgagcgcgtccgcgacaagcaccacaggggggacaagcttgatacgacgaccgtgaagcaggacgagttgctggacaagacactggtgcacacctactactacggggaggcgctcatagactacgcgtaccacgataacaggctcatgaagatgcacgcggacttgtggagagccacggctatgagctacatcctgccaggtgtgcgatgctcggcttcgatgtgttcatcatcgagcaggactgcaacacgtttggc

SEQ ID NO: 25732 - DNA, 352 bp, Oryza sativa
  Clone ID: PAT_MRT4530_30590C.1
atgggcctagcactgacccttccgaccttagcaccaacgtttctgggcatccgcttctccatagaaaactacctggtgccccaagtcgctgagctgaacaaggctatgcgcatctgcacgaagctctatgcctattcctcaccgttggtgatgcgctttgaccgtctagaaaacgcctggccggtgaccacctgcaggacggtgtccttcagatgatcatggacctcttgaggatatgctgccaccacctcggaggagttgttgggtacacctagcgcagcggagttgcggcaaacctcatcctttgttggaaccagtgcttcatccaaagctcgatcatggagtttgggga

SEQ ID NO: 25733 - DNA, 125 bp, Oryza sativa
  Clone ID: PAT_MRT4530_30591C.1
gctatttctacctgcaccatcggatccagcacggagggacgattcgtagcattgttaggatggccccggtccccacaatatgaacgcccattctgtccagttctaaaagaccaaccaccacaaaa

SEQ ID NO: 25734 - DNA, 427 bp, Oryza sativa
  unsure (1)..(427): unsure at all n locations
  Clone ID: PAT_MRT4530_30592C.1
gagatgatgacatgggtaccagacgaaggacgcgaatgtgagttgtgcgagcactggcttcgattgcatgccatagggtgctgtgctgtcagttttggttgtacctgagattgacttgacttagttgctgagaaatcaaggtgtgttatggcatagagcattatatttatatgttggcaaactattaggtttagccttcaagttgcgagataagtgtaacattattttgcagcaagcactttacaggaaaatgttcagacccaagtgggctctatgagactgacccagttgggctgacctgaggcagttgctttgggttggtctggctgtttgtatcaacttatccatcgacggataatccatccaatttggctctaaaaaaaaaaaaaaaaaaaaaaaaaaaaaaaaaaaaaaaaaaanannnnnn

SEQ ID NO: 25735 - DNA, 528 bp, Oryza sativa
  Clone ID: PAT_MRT4530_30593C.1
atggctgagggagtggaggaggagggagttgcggcggcgacgacgcacgcggggaaggaggagggcgaggatgcggcgcgatgggggaggaggattgatccatttggtgcagccgatcgccgagaacgcgaccgcgtcaactcggtgtgtcgccacgccctgaacgccgccgcatcatcttcacaacgtcgcccgccatccacagtccaccatcggtcgagccgcctcgccatcgtcttcgccaacgcccaaggaccaggatacccgaaggaatcgagccacattggatctcaggaggagaatgccatcttcttccccgattccggccgccgtcgccatttctctctctctcactctctgatcaaggccggagaacgccgtcgacgacgaccgctgccgaagccgctctccatcgccaagacctcgccaagccagagcagccgctcggagtgcatgagaattgctatggtccttgggtgggtcatcatggtggctcaagagtgctatgagatcactatggagtattaa

SEQ ID NO: 25736 - DNA, 1320 bp, Oryza sativa
  Clone ID: PAT_MRT4530_30594C.1
tcccatggtaatgtacaagccttggttaggcagaagaggagtagtaggagtacaaggagtacaatagaatactacgtccatggatgaaaaactactgtacatattattcatgtcacacggggccatgcgtcgcacacacgcacgcatgcacgcgcgcacggggcgcgccaaaattacgacggcgcacgtcgccgactcgccgtaccgtgcgtacgtccttcctcagaacgacggcacgacgccgtccgacgcggcgagggcggagaacgccggcgagcatggcgcctcgtcgtcgtcgtcggcgtcggcggtgcgcttggcgaaccggcccttgatgcgcggccgcgtctcggcgtacgccttgcgggacgcgtaccggatggtcttgtcgaaccgccggttcttgcgcttctccctgtaccgcatcagccgcgcctccctctccttccccttgctcgccaccaccaccaccatgggcggcgccgccgagcccgccgacagcgcgtccggtacgatcgcgacctccgacgacgacaagctgtgggccatggagtgttcggggtagaaaaggctgccggcggtgaggtccagctcgggcggcgcgaccggtaccccgatggccttgattccgtccatggaccgggcgaagtccaggtcgacgccgaggtacgcgccggtgtcggcgaagaacgcgtcggcggctgcggcgctatcctcgtggctattgtcgtcgggctcggggagaagccacgacgccgcctcggcctcgttgctccggtcatcatccgcatcctcctcccgcgccgcggcggcatccgcggcggcctgggagaaggggaagggctgcggcgcgtcggcgagcgggccgaagaagggcgcgacggggaggcgctcgtgcctgcgcgcgagcgggttcgccgagtggatgtcggcgtcgcaggcggcgcacagcgccgcggcgtccgcccggcacgtgacggcggcgggcgcgtgctcgcacacctcgcacagccacacccgcgcgtggcgcgacccggcgccgtgcgcccgcgcgtcgcaccgggcgcacaggaacgccccgtccgcgcggcagtagagccgcgccgcctccccgccgcacgagtcgcacgcccgcgtccccaacccccacgacgacgaggagtaccccgccgccaccgctcctcccactcccaccatcgccttgtcctccaccgcctccatatattcttcgcttcgctttgccgctcggcgcgtggtgcgtttcactcgctcgcagctcggtttctcgcggagtttggctgtgttttttgggcctcgtgc

SEQ ID NO: 25737 - DNA, 345 bp, Oryza sativa
  Clone ID: PAT_MRT4530_30595C.1
ttggtatgatcttactgcagaaggtgaaaagaggagggtaacgagaactgctgccatccatagcacccccaggcggatgctgcagaggaggacagggaatctgtgttaggcgtagtaaaacacgcaggattaagaaaaagaatgaacataacgggcacaaggagtataccatggacagagaccactgctggcaacaaaagggcacaccctcgagactcgcaacgtctaccgccctaggggctatacatggagagggagcaaggtgaggacatcaagagtgcacaggcggaggccaatacgaggaagacacaaacagttaacaggaacaaaaaaaacactaagagg

SEQ ID NO: 25738 - DNA, 615 bp, Oryza sativa
  Clone ID: PAT_MRT4530_30596C.1
ctagatcctgaccatcttgtcctcgttgtcggcgtcagccacatgaggtggggaggatggcgccgctcccagccgcttcctcttcctcgtcgtcggcggccgcatgaggaggggagggtggtgccgctcccgggagcctcctcctccccgtcgttggtggcagcgccgctcccggctgccgcctcctcctcctcgacgtcggcggcagccgccgcgccacctccgcctgcaaccgcgatgggcgcctcctcgtcggcgcgcggcagcggcgccgctcctagccgcagcttcctcctcctcgtcgtcggcggcggcggccgccaccgcgatgcctccgaacgcagccgcaccagcctcccgtgcctcggccgccagcagctcggccaccgcctcatcggcagcggcggcggcgagccgatcgcctcccgcctgcgcgctcagagaaaggagtagagaggagggttgaaaggcagagagagaagtttcacatctccccgtggtgtcctccgcggctccttcgggcgcggtggcgtcggcgacggagcgccctcgcttcctagagcggtgcggcctcaacgccgacgagttcgacgacgatgccgaggcggaacccat

SEQ ID NO: 25739 - DNA, 1280 bp, Oryza sativa
  Clone ID: PAT_MRT4530_30597C.1
atgggggagaataaatggatgggaaaaagatgggaggacatggacactgatgtcctcgtgaagatattcaaggagttgaacttagttgagctgtcacccgtatctcaagtttgtcgtttgtggcatttggcctgttcagatccgcttatttggagcactcttgacttcggtttgctgaaatccaattatattcaaacaagggcatctccctatatttgggttgatgataggtctgacaagaggctttcaagaatattacgggtggctatgtcaattagctatggaaatgttagttgcttgatatttcattacaatctgtacatgaaggatgaacacctacattacagtcttgacaggtctcctcacctaaaacgactggttatgccagcatggaaccgcattaccaaattcggaatatgccaagctattcaaaggtgggaagagctggagtcgctgacaatgcctaccattggccatcctccgtatatcatggaagagatagcgaggagctgcaagaactttgcagagctcaaggtcatgggctcattcgacgacctctttgcttcggcgattgccacccaccttccaaagctgaaagtcttaagcctgcgctgctcgaaagtgaccatgagtgccctgctatggttactggacaacatggcaaaccttgaggttctgaacatttctcattgcctgctgtttgagatcgtggccaacgggcggaggcaagtgatccatgagctggatgaccaaaccctcgagaaagcttcccggctgcgggagttccaccactgccagagcagatcatgccttgcgtgccagcggatgatggcggacgaaggcatcatgcggtggtacaggtatgaagactggttctggcgccgggatgaggtgagctcacttgatctgcaagactatgggaagctgttcgatgcagagtgcgaggcattgacagccgtggaatagatgataatggtcaggaaattaaacctaccattgtaggaagttgtttgaccagacattttcataaaatcatagcaagcaccgagaggctgtaacctagagtaataaccataataatggtaacaataatgtgcatgcatggtggtggtgtgggtagctgatgttgtaaatgcatgaatagtttgtcttgtccttgtttgaaaggtggcgtttatcatctccatggtatgaccagaatgtaaaaaatctccgaaaccgtatgctttgtttcttttaaaaaaaaaaaaaaaaaaaaattgggcaaaaaaaaaaaaaaa

SEQ ID NO: 25740 - DNA, 510 bp, Oryza sativa
  unsure (1)..(510): unsure at all n locations
  Clone ID: PAT_MRT4530_30598C.1
ggggttggtgggaaagcatggcggcgccggatgttgantaccgctgcttcntcngcgggctcncctgggccaccgaccancgctccctcgaaccgccttctccacctacngcganatcctcnantccnagatcatcnacnatcngganacagggaagtcccccnggttccggttcntgacnttctccaacgaacaggcatgcnccacnccatccaagggattaacggcaaggaactccacggcccnacatcncccttnncaaggccaatcnccccctcccgaagccgaagccgcngtggctaccgncancnccgcngaagcngaagctaccgtngccgcngctnccgttgttgttnccgcngcngtngctacggcaacccccttaaagcgctacgcngtgccgtngctaccgtngcgncttgtngcgcactncgttgnngctacgcaaccccgcnggnggnactcccacggaaatngaagaactnnccgttggggcctccttggccaatt

SEQ ID NO: 25741 - DNA, 405 bp, Oryza sativa
  Clone ID: PAT_MRT4530_30599C.1
atgcagaagtgtgaagaaaacaagcagtcaggtagcagtgtagcacttgtcttctacggcactaccacaatccatcaccagcgccaccttcccagctcccaagtcccaagtagccgcaataatggtaatcacggctctgcagcttctccctccaatccttggccttccggcgacggcgagaaatggctacgccgtcagaaggccacggatgatgactgtgacttgctgcaggcacaaccagaagcaagaacctccaggcaagagaacaagagaaaagtaagggagaagctggagaagctccgggagaaggcactaggcccagatgataaaaatggagccatccgtaagaaggaatctttggcgaacttgttgattcctcctaaattggtcgaggctaccatttga

SEQ ID NO: 25742 - DNA, 1143 bp, Oryza sativa
  Clone ID: PAT_MRT4530_3059C.1
atgagtagaatgtccactagttgaggttttgtttaatctagggtgaacaagccgggagagagggcgcgcggaccgggtccacgggagtggggcccacgcgtcaccctcacggtccacggtggaccgggcgcacgcggctgacgccggccggcgccgtgggtcccacgcgtcaccgcacccgcgggcgcgggcggctgacggccgggcccacctggcagccgcggggcgcgccccaaggcggcctcgccggcacggccgacgggaggcggcgcacccgcgccccgatggtcgccgccagcgaccaacggcgcggcggagtggcggccgagagaggggagggaagagggaagcgaaggccggggtcctcggctcaccccgggacgacgaggacggcggaaacgacgaccggagcggaggaaggcggcggcgcggttcggatcgacgaggacggtggtgctccgacggtcggcggcgaaacgaaggggtagacggcgttgacggggacgcggcgaagccgaaggaggtgacgccgagacgggaggaggtccggggcgacgacggcggcgaaccggagctcggcggcgacggcggagagagaggacaacggcgcgagctcgaatccgacggggagagagtgcggcgagtggcggaaatggaggagcgaagcacggggaacgattatatagcgtcgggagggagagagggcggccggaggggaaggaatcggccgcggaaatctcggccgccattgatgcgccggcgaactttgcgggactaaatccggacgaatccgagggagagagagaggggaaagtggggggaaagagggagggaatcacggggagtgatttccccctctttatggcgcgcggggacggcgggatgcggcggattcggcggcggcggcggcgctagggcacgggcgggcggcgggcgcggcgcgaggtaggcgatgacaggtgggccccacccgtcagcgagggtggcgggcgggcccgcctgtcagcggcgcgcgcgcggggaggaggccgatgggccgcggggagaggagagagagggagggaattgggccgagccggcccaagagggaaaaggggggggggaaagaagacttttagggactttctttttataaaacctttt

SEQ ID NO: 25743 - DNA, 452 bp, Oryza sativa
  Clone ID: PAT_MRT4530_305C.1
ttcataaattagttaattgtgatctctgaaaattgtgagctgctcctgcaaagctgcagtgcccctgctttttcttagaaaaaaaattctaatgcagtgtggagtaacggtatgatttaagcaatgactacttttaaacttcacatcattgttaatcggcttctgatcagaaatatgttatgtttattgatagtatcacaaccttttggttggaacactctgcacgctcagatgtttctcattgtttatgagttcatttcatgaattaggaagtgtgcacacttgctttcacaaacatggctattttctgctatttgtgttattatttattactatgacaacttctatatgatcagtgtaccatcatcttttctttttactgcataaccagcactgatctgttttagctctctttttttttcttaaagataagcaggcaccaggttactcta

SEQ ID NO: 25744 - DNA, 844 bp, Oryza sativa
  Clone ID: PAT_MRT4530_30600C.1
cttcatccttgttcctggtgcaaggctcctaattcccaaactatagtcccgtgcttccgtttccctagtggttttggtccacaagtggaacttatgcagaagtgtgaagaaaccaagcagtcaggtagcaggccgggacttgtcttctacggcactaccacaatccatcaccagcgccaccttcccagctcccaagtcccaagtagccgcaataatggtaatcacggctctgcagcttctccctccaatccttggccttccggcgacggcgagaaatggctacgccgtcagaaggccacggatgatgactgtgacttgctgcaggcacaaccaggcaaccactgtacatgaatcaaggctaacaagcagtttatcccgtagagatgcactgtcatacatgtcgtctgcgttcatagcaacgcttctggtggctggtcctgcagaagcaagaacctccaggcaagagaacaagagaaaagtaagggagaagctggagaagctccgggagaaggcactaggcccagatgataaaaatggagccatccgtaagaaggaatctttggcgaacttgttgattcctcctaaattggtcgaggctaccatttgaaaagccattgtatcgatgtgaacttatattcagacgttaaggaacaataatatggaagtctgaatatatggtgctcctctgaactgttgttgccaactcgccatcactcgtgtatgaaatatgatactagttgggatctcaatccaaattaaattatgccttttctaaaaaaaaaaaaaaaaaaaaaaaaaaaaaaaaaaaaaaaaaaaagcagccaaaaaaaaaaaaaaaaaaaaa

SEQ ID NO: 25745 - DNA, 1732 bp, Oryza sativa
  Clone ID: PAT_MRT4530_30601C.1
gggggggagtaatagccccccggcgcagggggcgcccgtttggcacttgcgggcagtcagcgcgcgggcgccccggggtgtggacccccacatggggggtaccgggggggtctccagggtgggcggcttgccgcgccgacggccggggcgccggacacgcgggcgcggacccaagttccgcggcgccgcccgcgcgtcgcgggcccgggaccagcctcccggaaccagaggtggctgacggcgtggcccccggtgggccccgcgccccttgccggaacctcgttgcgtggcctgcgtccctgctcctgcccggtgcgcccccgcggcgcgccgcccctctcgccccctggcgcgcgcgcgagcacgcacgccgcagggcctgccgtggaagccgccgttggcgagggaccggggggagttgggcccgggccggagtcctgcggcccgggcgtgccccgggttcgagtgcgtccattcctcaggttttttttttttttttttttaactaatattttttttcattgaacaaatgaaagaatttcaccactacccccaggtacaaattttagccgcgtggaacactctccaccgtggtaacaaaacaacagtcctctactccattccaacaaatctacccgacggtggagcaggccgacgtgtcggggtctacgagcgccgggaccaggtatttcctcccgtgcgccccattcgcgttgtagctggccccgctggccgggtccaccagcagcgacccagcgtaacccgggtacgcccccttgccgtacactccggcgcacgcggtggcggcctccagcggcgcgtcggcgtcgccctggaagaagccgttgccgaacgggttggtgacggtgccgacgatcatcgaggcgagggatatcaccatgccgtcgacgccgacgtcgccgttgggcggcgtgaggggcgccgcctgcgggccgtacaccggctggtggtacggccacgcgcactggccggggcactgggtcgccgggttgcccacccacacgtaggcgaaccgcccggcgcgggaccgcggcgacgcgccgtgggtgccgcaccggctcatgcagaagccgtcgacagcgacgtcgtcggccgtgagcaccacgttgatggcgcggctcggcgagcctcgggcggcgagcctgacgaggtccttctccccgagccgcttgccgagggagtacgactggtcgagcacgtgctggccgagggacagcgccgggaagcgcgccttcgagttggcgtagtacttctgcgccgtcttgaaccagctggcgacggacggctccggctgcggctgcggcgacggcggggtggacagcgacgagacgaagtcggtgatcaccgcgcgctgcggcgcggagaagttgccgtaccagatgaggttgacggcgatgcggccggagaggagcgcgcccttgtggtacgtcattgtgatgggctggtcctgcaccagcgcggtgagcttcctcgacgcgacgcacatctggaagagaagcgcgcacgcgagcaggcacgctgcaaaagctgcggaggaagccgccattggcgatggatcgagaggattttggtgggtttttggccagatgagttcttggggacggccggttcggagcccccccgggccgggtgcgggctttatagttggccgaggagagtgaagtggagtgtgagaagtggatgggggatggttaattttccgccctcgtgc

SEQ ID NO: 25746 - DNA, 268 bp, Oryza sativa
  Clone ID: PAT_MRT4530_30602C.1
cccacgcgtccgcactacttctctgaaaaaccctctgcttcatttcatttcgtgagtttatttcgacgatctgaaaacgaaatggcggcgacgctccggctcaggctcctcgccgcggcggcggccgccgccgtcatggcgtcgtccatggtcgggatagcctccgtcgccgaagcgccggcgccggcgctcgcgttcggagcaaccgctcgcccggacttcgctcgtgcgttcctctgcgtggctcgcttagattgcctgtggtggt

SEQ ID NO: 25747 - DNA, 428 bp, Oryza sativa
  Clone ID: PAT_MRT4530_30603C.1
ttgttgaatttaagcaacgtcttttggccgttctacatgctatgcttatatactagtaattagcaagcacctagattcactgcaaaaggattgcctgttgatattacggaacagcgccgctgtgtagtactctaaatgatttgtctttttaagcctaagttatttggtttggcttttagatgtgaccatatatgctcctttttatattaaattgactaaatggccaattcctaactagtcagaaatgactagtaaagtctacaagaaactcattgaccgtctactatggtatcaggattatcacttctgaataggcgtggactttaaagcagtagtgacaatgacttgttcagtgtattttgtgtaaaatcacatttaatttaataaagaactgatttgatcttttttccccaaaaaaaaaaaaaaaa

SEQ ID NO: 25748 - DNA, 813 bp, Oryza sativa
  unsure (1)..(813): unsure at all n locations
  Clone ID: PAT_MRT4530_30604C.1
ggccggccgggnaaaaactcactcagctggatgttgagcattcagcagcagcagcagcagccacctccatcatgagttgtgcactttgcaacagtgctggcttctgcatgtagacgtgttcactcacacaaaacaaattaaaaattccggggagtggctcagcttatagcttaaaccatcagagctgcaaaggaaattaagtaccaaagtactgtactgtactgtactacagtttcaagccaagaaaggcaagacttgtgagagatttttgtgcaaagcaagatggctaagcaaaagattgttgtgaagatgcccatggataccgagaggaagaagaggaaggccttcaaggccgcagttggcatgacaggcgtgacatccgcctcgttggatggagacaagctcatcgtgatcggcgacggcgtggaccccattgcgctgacgacgatactccggcgcagcctcggccacgccgagctgctcagcgtctcctccggcgacgacaagaagatgggcggcggcggcggccacggcggcatgggcatggggttcggcggtggccacggcggcatggggttcggcggcggccacggcggcaaagaaggcaaggaaggcggcggcaaggtcgtcgtcgacggtgtccaccaccaccaccaacagcagctgcagcagcagcatgcgatggcgccgccgatgcagccgtacccggcggcgccggcgtactacaacgccgccgcgccgtcctaccccgtctacccctcctacgctggctacccgcagcaagaacaggatcctggctgcagcatcatgtaa

SEQ ID NO: 25749 - DNA, 2065 bp, Oryza sativa
  unsure (1)..(2065): unsure at all n locations
  Clone ID: PAT_MRT4530_30605C.1
ggaccggtccagaatttctgggattaacaaacctactccaaataaagtgacgacccagccaccagagtgatgaatttgagcgctcgacgcggaaccagatgctagaacgaggcacagaaattcttaaaggaaatgcttacatttcaaaaattcgctcttttctattaaagatgggcttggaaagcagtgatcttgaaacagtatgtgttaaggatcggctcctaacaaacgaatgtattgataaaatagttggttttgctttgagtcatcaacttaagcactctacaattccagacccttcgagtgatgttcgtttcactctatctagtgaaagtcttaagcatggtgtcgtccggttggaaagtgtggaatctaaccctaagagcagcaacataaggaagtcgctcaaggatattgctactgagaatgaatttgaaaagcgacttcttgctgatgttatacccccggacgaaataggtgtcacctttgaggacattggggcattggaaagtgtcaaggaaactcttaaggagttagtgatgctacctttgcaaaggcctgaattgttttccagaggtcaacttatgaagccatgtaaaggaatattactttttggcccgcctggtacaggaaagacaatgcttgccaaagctgtggctacagaggctggtgcgaatttcataaatatatcaatgtcgagcatctcttcaaagtggtttggtgaaggagagaagtttgtgaaagctgtattttcactggcaagcaaaattgctccaagtgttattttcgtggatgaggttgatggcatgttgggtaggcgtgaaaaccctggagaacatgaagcaatgcgtaaaatgaaaaatgagtttatggtgaactgggatggtctaagaacaaaagataaagagcgtgtattagtacttgctgcaactaataggccatttgaccttgatgaggctgttgttaggaggcttcctaggcggttgatggtgaatttgccggatgcatcaaatagaagaaaaattcttagcgtgatactagctaaagaagatttggcagatgatgtcgatcttgaagctgtagctagcttgactgaagggtattctggcagtgatctcaagaatctatgtattactgctgctcatctccctattaaagatatccttgaaaaggagaagaaggagaaagctttagcagaggcagaaaataggccgctgccccaatcattttcaagtaacgatgtccgtgccttacgactaagtgatttcaaacatgctcatgaacaggtctgtgcaagtgtgtcttcggattcaactaacatgaatgaacttattcaatggaatgatctttatggagaaggtggatcaaggaaaaagactactctaagctacttcatgtagctgaagttcattccaatgtacatatatatcagaagcattaggacaaacaatggtgattggaggcaaaagttttgcagattcactacagtaaaaaaagaactgtactatctgctagacatcagaagaattaacaacagttcatatcgaggcggatgggataagacattcaatcgtcgccatggtgtgggctgtcgattttggcgaaagaggaagatgggattcgggatgtggcttacaaattgcctgctgtggtggacctgggggtagtgacggcaacatatcaccatccgcaaaaatagattacatttctagtccccatagtcaggtcaggcagccagttccgagaatgacatctcttaccgggccggttggttcaccgtcatttttctcatttcgtgacagcgattcaaatttttttaggttaaagttgtgcctgtgcaattgtacagtatgagcatccaggccaattaacttgttattgcggtcaccgcaaaattcattttaaacatgtccgttgttactccatttgtcgactgtctaccaggttttggtactgcccctttactgatcataatattatatatggagatgcgggttaccattatcgattcaaaaaaaaaaaaaaaaaaaaaaaaaaaaaaaaaanaaaaaanaaaaaaaaaaaa

SEQ ID NO: 25750 - DNA, 462 bp, Oryza sativa
  Clone ID: PAT_MRT4530_30606C.1
atggagagacaaaggaagaggatttcatgcgagatcttgcgctggttggttggtggtgacactcggcagctgtttggttggctgtttcgtgaagtcgcgtggccgcaggcacgcacgggcacggcggtgtgcggcggcgacgacgcgaaacgaggaggggaaccggcaggagctcgtcgccatgcgcgacgccagccgcggtggccgcagagaccgggctacgctcatcgccgccgacgtggcgttcttcttctcggcaacgccgtggccgtccgcctcgtgaagcacctcggtgccaaggtggtggtctccgtcgaccgcggctgcgaccgctccgacctcaccttcgcggcacggaggggcaggcggcggcgcgagacgagggagcggcagacggcggcgcacgggccgggcagtgggcagcggcgtgagacggtgtctcagggctcacccagtccatga

SEQ ID NO: 25751 - DNA, 1165 bp, Oryza sativa
  Clone ID: PAT_MRT4530_30607C.1
atgggccggccggcccgagaggactcggcccagtagggtgcgcgggaggtgagagagggaaccggtggaccgggctcacctcgcgtggtcccgagtgggacccgcttgttggtgacacggttcatcgcgcggagggagcacgcggcgcgcgctagggtttgggggagggacgcggtgcacgcgcgcggctcgcggtgggtgcggatgcggcgggcccacgcgcagccttacggatcacggtggaccgcgcgcgagggcggggcggaggggagcggcggaccagggttagcttgacctggtcgcggccgaggtggcgccgacgtggcgcctacatggctgccacgctagccggcaggaggttgaagaaggcgtcggccggaacggacgacggacggcggctgcgaacggcggggagaaccacggtgatacaggcgaaagcgagcacaccgggaggtagcacgggacgaggggagacgagccaatggctcggattcgccgagggatgctcgacggcagcggattgctgcggcggcatccggtggcgagaaaaggggaaagggtgacgggagttcgatttctccggaccagcggatctacgcggccaccggagtccgttccttgcgctggattaggagaaaaggcaccgagggaggccggcgatgagaggcgctaccgagctcgggcggcgacggcggcgagcacatagcgggcggcggcaaggcttagggcgacgccagctagctacggggggtctaccatggcgcgggaaccgaacggaggaagcaggggccgggccgagaggggaaagggagaaacggaggggagaaaggaggggcgcgccatgccaatttgggaagcggcgcggctcgggcacgcgtgatggctctgggggcagggctcggcgcaggcgcagcgtggcagggcgcagggccggacggcgcaggcacgggcagcaggcggctgacgacggcggcgaacgcgcgggcacgcgcgcgcgaagcaacggtgcgcgggttcgaaattcacgggcggggggtcgccggggagagagacggggagagggagagcgagagaacgagagagaggagatggtgctcggctcgactcggcgtcggctcacgcgcacacgcgtgctgcgcacgggcagagcgaggggaaagctgag

SEQ ID NO: 25752 - DNA, 4507 bp, Oryza sativa
  Clone ID: PAT_MRT4530_30608C.1
atgtttccgccgaaagggtccaatccctatgggcagcagcaaagttacggagggcagcaatcctatggccaaatccctggcagcagtggattttcgtcctcggcagcaacgggtggtgctgatggtagtcgatttggcgcccgtgtcgggcagggtgcagctgggcagtatggagggccttacgcttcagtgtacggcacacagcaggttggtggacttggtggcaaaggtccggcttcttctagtattcctaatttgcctgagccatccaagttctcgtctggatctgtagggtccagcatagcaagaccaaatgatgactatatggctgtgcgtggttatggacaaaagctagaccagtatggtagtgattatacattagagagaagaatgtatggtgatcactcagctaatcttggcaggagagatgggcttactgatttggatagaagatatcccgagcatgtttctggaggccatcagggttcatcaatgcgccatccacagctgctgaaaccccaactgcagtctggatctgatataagacaagccgattactttgcaggaaggtctgctccaatccatcaaggatcgcaggatattggtgcatatggaagagttgaagctgatcatcgcaacttgtccattcttgggaccgccccatatggaggacaacagtcagcttcgttgttgggaggagctcctaggacaaacattgatagcctctcctatgggcaagggtcatcaagcagcggttatgggatgggtctgccccctggacgggactatgcctcagggaaaggtcttctccatccttcttcggattctgattaccgagatagcattttatcccgtgtacatccaggcatctccatggttgatgaacgtgctgttgatcgggttggttatcgtcgtgaactggatctaagagatgaagaacgtcgaagggacctattactggaaagagaaaaggaacgtgaccgtgaacgggaacgagagctgcgagacctacgagatcgtgaaagagagcgtgaaagggaaagggaccgtgaaagactaagagaacgtgaaagagaaagggaacttgaacgtgaaagagaacgtcttcgtgaacgtcgcatgaaggagagggaacgggataggaagcaccctgctgattcaaggagggagcacactccacctagaactcctggtgatcggcggcgttcttcttctgttagagctgagaagcctttgcggcgaccttcacctcggcgtgatgctgtgcataggcatcgttcacctgttaaagaaataaagagagaatatatttgcaaggttttgccatttcgcttggtggataatgagagggactatttatctttgacaaaaagatatcctaggctatcaattgctccagatttttctaagattgtcttcaattggactaaagaaagcctaaatctttcgctgcacacacctgtgagtttggagcatggcatccatgaagttgatgatagtactgatgaaggatcagtgattacctctgggaaaacatcaagcaccaagatttccgaaatcatttggaatgcaaaggtgcttttgatgagcggcatgagcaacagtgcctttgctgacataacgtcattgagaagtacagatgaacgagtggtgcatctgaacaatatcttgaaatttgctgtattcaagagggatcgttcactttttgcaattgggggcccttggaatgcagcaatagacggtggagaccctgtagttgacccttcttgcttgattcagactgctatcagaaatgcgattagatcatctgtcccaataattaagtctactaacttcactctagataactggttaagtattactgctggagtcacagttactaatgcaaacatattactacagatccattacaacagggttggcaaagatggactcttcagtcacaaagaaatcactgtagtttttgtgccaaacctgtcagaatgcttaccttcagtggatttatggaagaaaaattggactgcatataggaaatcaaggacagaaaaggagcagctgattatgaagaaggagaagagcccaactgatgcaagcaaacagaagcaaggagaactaggccagggtaaaagtactgatgttgatcaaaaggaggatgctggccacaatgctgctgaaaatatgaaagttgataatgatatggatctgctgggtaaagatggaaaggagaaacctgccgagcatgatggacaaaatcttggtaaagttgaggaaaaaaatattgataaagtcgaggaacacattgagaagaagggtgggggtgttgaagggaacacttcaggtgaagcttctgttgaccatgcaactgaggataaaaagcccacgaaaaagaaagtgataaaaaaggttgtgaaagtagttcgaaaaaaaccaactggtgaaacttcagctggtaaatcatctcaggaggacaagaacattgtaccagaaactgcaagtgtagctgtggaagagcaagtccagcaaaaaagtgaggatgctggaaaagaggctgagggcaagaaacctggaaagaagaaagtaattagaaggattattaagaaaaagccttctgggtcagctcgtgattcgactgcccctgctgaaacaagtaagcaagcagtggaggttcagccagagaagaataatgaagtcttgagtggtgctgtgatttcagaggctaaacttgaagaagcttcaaaagctccagctgaagatgtctcaaaacagaataaagaacaggaacaggaggaaaaggggcagtcgttgcctgttgaccagaagtccaatggggataagattaagcagcaggaagttctaaaacaaaaggatataaagcaagatgggaaaaatgataaggcaaaggatgataaagagaaaaagagtagagatcagaagacggattcaaagcaaaagtcactcactgatactaaagaaaaaaagaaatctgatgagcctcccaaacatccaggattcattcttcaggccaaaaggagtaaagactctaaagtccgatcaacatccctttcattggatggcctccttgactatacggccaacgatctggaggagtcagtatttgagctttctttgtttgccgagtctttcagtgaaatgcttcaacacaagatgggttgtgttatattatcttttcttgagaaattatataagcgctatgttatcaagaggaatcagcgtaaacgccaaagagaagaggatctaaagaaggaagacaagaaaacatcagagaagcggcccaagacaaatgatgaaactttaagtgaaagtggcccgagtaatcaaggggaaagtgttgaaatgataaaagcgggtaagggtacagctcattcagctggccaacccaataaagatgatgagacaaagatgaatgcgggtcactcagcagctgcccaggatgaactggttaaagagggcaaggagaagatgagtgcagatcactcgacagcgccccctaaagaacttataaaagagggtgaggaaaacatgaacacggataattcagcagctgtccatgttgagcctgtagctgatgagaaaatggaggatgaagagcctgattatgaagaagatcctgaagaggtagaattatatgaagatgatgaggagatggatgaagctgctgctgaggaactggtagaacagaatgaagataatttgaatgataaggccaagcaggaagtaactactgaagaggatggaaacaagaacacagaggagcgtgagtcagaaaacaatgctaatatgcttgaaaaagctgcttcaggagaggacaaacagtctgtagttgaaaaatctgcttcagtggagggcaaacaatctgtatcggagaaaggtgacaaggcagttggtaaggaggtaaagacaactagatcacaaaaaggtgattcaacaaaagatgaggtcgttgataaagagctgctgcaggcttttagatacttcgaccaaaacagagccggttatttgaaggtggatgatttaaggtgcattcttcataatttggggaagttcttatctaacagggatgtgaaggatttggttcaaatcgcccttgttgagagcaattctgcaagggataatcgcatcatctatacaaagcttgcgaagaaagttgacctctgatcaggtccgaccttggctaaggagtatgttgagatgggccgcaaattaaacgaataaccttctttgaagaggccagctacggcgatgtcgatttgagttactttacgatgtgttctccttaccatgacaaggagtagctagatttcatgtttttttttcttttatggatgtcttcaccataaacatggcaaacaaagctgtcgttttgtatcattgtatgtgtacttggaaaattttcttttgatataagcattcacccaagaaagaatgttgtacacttattatatataagatgtatgcttgcgggtgcaaaaaaaaaaaaaaaaaaaaa

SEQ ID NO: 25753 - DNA, 1914 bp, Oryza sativa
  Clone ID: PAT_MRT4530_30609C.1
aggttcaatgtgcattattgtatatataaacaaccttttcaagtcatccacttaaaattttcaggatgattgaataaacatgtatagaacaaaaagaaaaattctttttggcggaatagatacaaacaaccgcaaccatatcacaattcacaagtggctcttctaaatgttgaaccagcttatgttcaggaaactagacaaatgcagcaaatcaaatcctttcaggtgtccagaataaaaatcaatggctaccaccgaaaatcacattgctttgctgggtattactaatttaaactcaccaaatcattctaactgtacattccactttgtcgctcgaagtatggagttttaggcctccactttcctgtgaaagatgatgttcagtgcatcgctgtatagagccacagaatttgagagcaccgcaagcacaatcatggttaaggccaaaatcttgtcgcgcttggttgcaattccataaggatctctgagtatgatcatggcaggaaagataaaaccgataagaacagcagctgtggcaccggtgaattggaacgcgtcccagatgctcggtatgaagatggcagcaagataaattacagcaaggagtgatcccgtgataatggcgaaccttctgttgtcacgagaaatgtgccttgcagtagggaagagcagtccatccaaattgagcctaagggcgaagaagactatgggaaagacgagcatgatgtggactacatagctcactctcacaacatcattgaagacagagctgaatggaatatgaaggttggagtcaaagttggcgagtacatcagccagggtaccctcgccaaagaggagatatgcaaagaagcttgtcgcaatgtacacacttgagcagagagccagtgaagtttgcacaattggtttagtttgtgttctatcttccaactcattgtcaatgctatgtacattgtaatggcagatgtaggcagtgacaagaacagggacagctgtgaagagcttccagatggaactaagaccatctagttctggaaaaagtttgggcatcgctacagttccattgaagagtttgatgatagcaattccagcagtaatgacgacaaaaaccacagcaagagcaaccgatagggcagaggtgtatctcaatgaatccagacgcttaaagctcaccaatggagcaaacacgaaaagagtcgtcgcaagaagaacaatggcacgtgaattccagagatgagctccaaaccagccctcaagtataccacgatggtgaacaccggttgatgatgttccagatagcacatcaccaatgataatcatgtaaacgatcatcatgccaatgttgtttattacgacagatgcttgcagcgcaatcctcccccactgaccgaaagtttcacccatcagccacccgtaggacgtaatcttgccctcgtggctgcacctgaccagcatgtcaatggatgcctcagtgagcaacgccacaaggatgatcatcaggataccagggataattcccagcatcttgatgctcgctggcagtgccataattccagcccccacgatggtcgttgacagattgaacactgcaccggagaaagaagctccattgaactcatggatcccctcctcctcttccttaattgggagaagcggtgtggtctcatctcgtatttccttgtgtgacacatgcctgctgtcacttggtgatccattcccaattcccatttgtgttcgctatccttaccccaaaccccaatccttgctcaataccggcgatcagataagatcaaaagagaatatcacacctacagaagctctctcttcctcccccaaactcctctctttttttataggcgaaccaacgccgggtggatcagcagagcaaaagcctctctcttctcggacgcgtgg

SEQ ID NO: 25754 - DNA, 170 bp, Oryza sativa
  Clone ID: PAT_MRT4530_3060C.1
gagtaagatgatgacttcgtagacctggcctactggataaccgtctctactagtgacctttatctgctacttacatctaccaccgatacgatagcagtatactcgacatattcttactattaatagatgacccaatcacacacacgctactgaactatgtatctctcata

SEQ ID NO: 25755 - DNA, 176 bp, Oryza sativa
  Clone ID: PAT_MRT4530_30610C.1
cagtctcacatcaaattggattgataagccaagcatcccaaattctgaatgtgacaatgtacaaatgggcttacggctcatcagcagaaagcaacctgagcctcggcgagatcctcacgaggccaaagtggtggtggggcaccttttaacccctcaagcgaagatgtatcggtagt

SEQ ID NO: 25756 - DNA, 254 bp, Oryza sativa
  unsure (1)..(254): unsure at all n locations
  Clone ID: PAT_MRT4530_30611C.1
attagaagaaaaagagtttttgttatacgacgcaatcggtcaaacatgcttatgccggggggggggggggggggagaangaaatnccnantggaaaagaagggaaaaactatggaaaaaaaaggctacttcaggacaacaagagggaggaggcagagccacgctacactctaatcaaacccaaaaaagcggaaatgcctacggaagacaacagacggcctttcaaatggatggactataaaaccacaaagaccg

SEQ ID NO: 25757 - DNA, 1622 bp, Oryza sativa
  Clone ID: PAT_MRT4530_30612C.1
agatagggtctatgttgttcatatagatttgcttttgtttttctcaatctaaggattgaatttggacttgaattcttgtcagtacttggatttgtactgcattactccatgattctctctggctaactgcaaatagcataaactcaaaatgcacggacatgaagcaatttttaagcatgagcattttcagggaggcatctcggctccagttcaactgggagtccaagaagaggcgtcggagacggatctttcttgtagctttcttccttgcagcacagcttccacctgaactgtgtcaccaaggagtgcatggtcaccaatgtctcagtccttgcaaactcgtttccaggacacattcttggacctcccccaaatggcacaaagcaataaggaggaatcgaagagttgttctcgaatcgagcagggtcgaaattgcttggctcagggaaaatatttgcatccaaatgtgtaacagattgggctgtgaataccatccaaccttttggaatgtgatagccctggtattcgatgtctctggtagctgttctgaagctcccaaaaattggagggattgttcgcactgtctccattgccaccttccatgtgtacttcatccttgaaacatcatcccaggttagagcatcctcaggtcccttgttcctggcaatctcatcttgctcctcagttatcttggaaaggacttctggctccttgtccaggtgccagagcatgaatgtgattagaacagatgtcgtctcatagcctgcgatcagaaggaagatcgcgttgtccacgatgtcctcgaccgtgagcgagtgcgcaccttcagcacgcaaggcgagcatgtatgtgaagaaatcgtcagctgctgaagcgccatgagcctgctgctgctgcaagagcgtctctctctcacgagcgatccccctgagcaacttcctgatcctttggctcgcactcaggcccctgctgaacctggtgaaaggtatcttcactggaatcgacagcgcagccctcaccatcgccgggaagtcggtggcaagggcttctctgacagaacctgcctcttgtccgaagatgaccgagcagatgatgtccaatgtgagcctctttgccaaaggaagaaccttgacagtcttgtgtccaacccaattcaccttaacatgcctcctgacttcctcatccatcttagagacatacctgattaccatttctgggcttaagaaattctgcagtgcgccacggacttgcttcagctcctcgcctgagagcatcagtatattccggccgctaaggaggttcatcgaccttgtccccgtgaagagcaggtccttgttgctgaatatgaagcggttggctgcaggtccggccatcaggactgcaggtgagccaaacagccacatcttggacacaggaccatacttgccgatcctgccttggtaccattggtgatcagtgttactgcgaagggcccggaggaaggagatgctctggccaacgaatgggaagccaagtgagcctggagggagattgtaggatgagtacttgaatcgggtgacaaggtggaggaggatgggtatgaacagggcaatcagcagagcaggaagaatggatgaatccat

SEQ ID NO: 25758 - DNA, 162 bp, Oryza sativa
  Clone ID: PAT_MRT4530_30613C.1
atgtccctacaatcatggttaacattatcaatttacagaggtaatagacctggcaattttgagttagaattcgaaattaggtggcacaatgtggataatctccaagtaattaaacagtggagtagatctcttaatagtgggcaagttatacttgctacctaa

SEQ ID NO: 25759 - DNA, 1029 bp, Oryza sativa
  Clone ID: PAT_MRT4530_30614C.1
atggccgacctcgccgacgaggatccgcccgtcctcctcgaccgcgcctctcgtgccacccgtgggaagaggataaccaagctcctcgaagatgaggttgagcaggacgaggtcttctggaatcaggacgccctcaaggaggatgaagaagatgacaactacgaggaagagcaggatgctggtgatgaattcgacagtgattttggtgaagatgagtcggaacctgatgatgaaccggaaaaggaagtacgtgagagattacctatcaaaaagcgactcatattccctgggaagactatgaaaaaaatcaatgccaagaagaagaagaaggtggtcccaaagctggaagatgattccaaaactgacaagtattcagatcagcaaagtccatctaagcaaacagacattcctgatgaactggagaccggtgaaaagaccatcaggaaatcaactagaacatctgtcatcgtcagacaagctgagagggaggcaatacgtgctgagaaagaagcaacgatgaaggttcctgttattaagaagaaaaaggagggagaagaaaagcgtatgacacaagaagagatgctgttggaagcagctgaaacagagatcatcaacctgagaaatcttgaacgtgtattggcaagagaggaggaggttaagaaaaaagccgttgttcataaagctgtttatgagggtcctacgattcggttttgctcaagagatgatccagagaaatctatttgtgctgtaactggacttcctgccaaataccgtgacccaaagacggggttgccatatgcaacaaaggaagcatttaaaatcatccgagaaagtttcctgaaagaggaggctgacaggaagaggcccaacttggcgaatatgggagagctctttgaatcaataacaggagaatactccacacccaagaagagaagaattgaggcaagatcacccagcatctcatcagaccaaaggcatggaggacgctttcgacgaatacctgctcttgatttgctggacgaggactga

SEQ ID NO: 25760 - DNA, 437 bp, Oryza sativa
  Clone ID: PAT_MRT4530_30615C.1
actcatcgacacgctcaccccgtctatcccccgtaactcccgaaaaaaaatccatcctcaccctcccgtcgctaggtcgccgcctgcgccgatctgctccgcagcgatctctcccaccggcattgccttcctcaccgatcttctacgcttcgccaccgttcctcgccaccggaagccctcaccaccatcgcacctcctcgccttgcgattcccaaccctaaccgccgtctccccgcaggtcaccgtcaatcgccgtcgcccccgcaggtcaccatcgcgccgctaccatccagtcaccgtcgtgcttccttcgttctctctacatcgcatcgcaaatggatttccccgccgaccgggcttcgcccatgccgtccggtccagcgcgacctccgccaaggagttcggtatgtccctctcaccactgatctgcacgtact

SEQ ID NO: 25761 - DNA, 1482 bp, Oryza sativa
  Clone ID: PAT_MRT4530_30616C.1
atgtcggccggagacgaccgcctgtccgccctccccgacgacctcctcattcgcgtcctccacttcgcgcccgccaaggaggccgcgtccaccagcttgctgtcgcggcggttcggcgcgctctggcgctcctccggcgccgtcaacctcgccgcgtgcgtccccgacggcagggacgccttcgtccgtgccgccgaggcggctctcgccgccgcggaccgcgccgtcacgaggctcaccctgcacgtcgagggagacgacgagtgctccacgtacaactcgctcagagtcggagatcacgacgtgctcgacgccgtggtcgcccacccggcggcgcgccgcgtcgaggagctccgcgtcgccgccgtccaccgtggccagccggacgaacacgacgacgccgtgatggacgacgacgtcttcctctacatcctcaggttctcctccctcccgtcgaacaccctccgcgtgctggacctcaccaggtgccacaacttctcgccgccgccgccgccgcgcaccgcctccgccgccgtcgccttcccgaggctaacgacgctacggctgcgacactgcacgtatagcgtcaaacacctccacggcatcgtcgacgccgcgccggagctcgccaccgtgcacctcgagttcgtcctcctctcgtccgatcgccatcgccgcttcggccccgtaacatggaacaccggcctccgcttcccgtcggccaccgtgctcgcgctgatccactgccgcggcgaagaaggcgcaccgggcagatcaatggagatcaccgcgctgaggctgcgatccttcacgtacaagggagaagcggtgctgttcgacctaacctcgccgccgtcgccggacacgacgacggtggtcgccgccgacctccacttcacccatggcatggggcgatgcgtcgactactcgcatttcatccacaacttcaccaacgccaaggtgctcaggctcaaggcgaaccacctcgacgacatggccgtcgccgaggtgttccccgaactggaacacctccgcctcgagctcgacggagcttacagcggctggagcatggcggcggagacggcggcggcgacgatcgccagcctgctccattgctgcccggtgcttcgtcaactcgagctcaatttcatcagcgatttgccacctgattcctgcaagaactccaagcaagtgaagcatttgtttcagaagaaatgtgatgcggatttcgggaagtcgatcgatgatttcatgcgcctcatcaaattcgaatcgaatcagagattggatatccgtggactgagtgattgctccttcgcatgcttgaagagtagtttgagaagagtcagtctgcagttcaggttgggagaggattccgattgttttggagttcgtctgatcaaattcttcgctgaaaacgcaatgtttctcgaagaactgcacgttttgacagcggaaaccgaaatcagtgaaagtacatag

SEQ ID NO: 25762 - DNA, 1197 bp, Oryza sativa
  Clone ID: PAT_MRT4530_30617C.1
atggcgtgcgtgaggtcaccgctggactggagctctggcctcccaagggagctcctcgagatcatcgccaagaagctgccgtccggccatgacgccgcctccttccgctccgtctgctcgccgtggcgcgccgcgctgccgttcgcgaggttcgcgccgctcctgatgctcccgtttgatcccactcccacctcgccgtcgccgccggaggagaagaccgtctcgttctacagcttggtggaggagaagaccgtctccttgcctctcccggagctccacggcaaggtcgtcgtcggcgcgtcgcgcgggtggctggcgctcgtggacgaggccgccgccgtgtcgctgctcaacccgttcacgggcagccgcgtcgcgctcccgccggccgaccagcgcgtcgccgcggcgtcgtcgagaagcgtggagatggtcggcgtcgggaacgacggcggtggccggtgggtactcaggtgttcgtccggcgacgtcagccccgtcacgctggacaagatgagggaagtgttcttcagtgagatcgtgctctccacgacgcccggcggcgacgggtgcgcggccatggccgtgctcgcggactcgtcggaggtcgcgttctgccgggtcggtgacacggcatggacgctgatcgagacgaacgtggaatgctgcgttagcgccatcgtccactgccatggtagcttcctcgccatcggctgcctcggcgaggtctccatcatcaacatcgccggcgacaacgacgcgacgccgtctccggcgaggccagtgtcgtcgctgccagagcctgcgcagatgtgccaccgcagctacctggaggtgaacggcgagctccacctcgtcggcgtcgctatacgagccttccacggcgagtggcccttcggtcaccacgccgtggtctacaagtgcgacctcgccgccggcgaaacgccggtgtggtccatggttaccgacgccggcgacatggcaatgttcatgtccaagaatttcaattcgggctttggtggtgcaagtgtctccaagatcaagagcaactgtatctacttatctgagcctacatatggcagtgatcattctccagaattggttgatatttctactggcatgtcagagaagatagcttgcccaaccatgaagggttcagaggctctatgctggattcgacccaatctctggacatga

SEQ ID NO: 25763 - DNA, 795 bp, Oryza sativa
  Clone ID: PAT_MRT4530_30618C.1
ttaatagaatacaaactttggtttctcgaggaaacattttcttctgcaacagtctctgccgcccctagggggcggaaccttagcctccgccgccgcccctcctcctccctcctccgtgcttcgccgccggagctcgttgccggcaaagccgggcgacgcgctgggatggcggcggcggggccatcctcctcggctccacctcggcccggcgcgggcgtggcgacgatggcggcgggacggcgaggtcatggcgacggggacggtgcggcgttgggcgcggcggtggggcgctcggtgtcggctctctgcggctccagcgacgggcgacggcgtcgccagatctggtctccccgcttggccggggtgaacggcgatgggctcggtcgacgccggcgccgctccgcagacctcgccgccacgagggaggcgcggcgccctcgtcaatgctccggctgtaaacgttgtgcctgtgacgccttcctccatgatgccggcgacctgcgcttcgcgctgcacctccgatccgcgccaccccggtcggatctggacggctgacgtctggcggcgctggctagcgacggtggcggctggacggtggtggctggacgggggtgtccgtggcggtggcggtggcgatggtggctgacggtggtggctagcgacggtggtggctgtggcagtggcggtggcggccggccaacaactctcaaacggccacccgggccaacaactttcaaacggccacccgggcctagctgatcccgtcagctcacatccgcccatgaccgtgggcat

SEQ ID NO: 25764 - DNA, 156 bp, Oryza sativa
  Clone ID: PAT_MRT4530_30619C.1
atgccgcacctgagagacgggagccgtcacgccacgtcgatgccgcactccggtcgctattcgtccatcgacctcgccaacgtctgctatgccgcggagatggagaccatgccatcctcggcctcagcctccctggccaggccgtcctcagcctaa

SEQ ID NO: 25765 - DNA, 2374 bp, Oryza sativa
  Clone ID: PAT_MRT4530_3061C.1
ggttgctgctgtgttggttgtggtaatattgacagtccaaataatgtagtacttgcattgctgctcggttcctagtagctatttatatgtgtcacatgcatgcatgcgggctactagcaaaggcatctgattctaaaaggaagcaagacacaaggaggctacgacattaatgtatgtgctactgctagctatatatgaagttgtcatggttgagtgagtggtcatgagctagctagatagatggctagctcgtcgatcagctgcatggtagctaggaggaggggagcttggcgatgaacgcgtcgaccttgatgttggtggtccgggagaggaatttcatgcagatgggaggcttgacaccggcgagggcgagcaccgactgcggcagcgtccagatgccgtcgccgcagatgaggcccgacgcgacggggggagcgaacgccttggccctggcgccgtcgaggcggtcccagacgaagcggatgaggctgccgatgcacatgtcgatgccgaagtaggggccgaggtagaaggggatcgccatggccatcggcagcgggaggaacctcgccaccttgggcgccgcgaggtccctggcgaggttgacggcgatggcggcgacgaagaagccgatgcagaggtcgaggcagtgcttgggcagcgagccgaggccctgcaccccgaggatggccatgttccggtacaccagcgcgttcggcgacgggtactccgaccccggcatcccgatgtcgtggaacgccttgtagaagagccagaacaccgacggcgcgatcacgcaccccatggcggtgccgatcacctggctcacgaacatggaccgcggcgacgccagcgtcatgtacccggtcttgaagtcctgcgtcaggtccgacgccgtcgacacgatcccgatcatcacgccgcacgccgccagccccgcgatgatgccgccgtccgacgcgtccgcccacgcccccaccgtgaagatggccagcttgccgtacgtcgtcgccagcgaccagtccgtcagcccgcacccgtacgcgttgcagaacgccagcaccggcgccaccacgtacgacaccgcgacgtggtaccacctcagctggtggaagatgcggggcaccgtcgcgatcgacaccaccgcgatcaccacgtacgcgctcagcgccagccagttcgggatctggtccttgaggaacagctccgtccgccgcttgtcgtcgaacgtctcctccggcgtctgcccgccgccgccgccgccgccgccggagaccggcagcgtcggctcagacatcatcgcgcgcacctgcatcaccagcgccgttgtggttcttgtcatcaccttcagaaagttgtacagcccgtcgccgaggatgagtgaaatggagatgaacacccggtagccgacgatgccgcggaggctgctgggtttgaggtcagcaggataccagtcacccttcttgtgctcgatgagaggccacatgattccccacgacatgacgcctccgaggagcacggagatgttgacgaggtaagggcagatcatcccgacgccgacgtacgtcgcagagaaatcgaagaagaacttgtttctgtaggcctcgagacccagcgtcgggaacgacatgaacccgcaaccgtcgccgccggtgtagaaccactggaagaagccccaggagaagctcatcacgaagaatttccccagcattttgacctgcatcttggcaagctttgcaccctggggagtgtggaagctgttgatgagatgtgcggttgcagtgccactcgggtatatgagcttgtaatcgatgatcattatcttcctgagtggcacaactgagaagaggcccaggaagctgacaatgaagaggaatccaatcatccagcccaagctggggttcttgatgttgtgctcgtccctggcctcgcctgactggtcgctgatcctgtcgctcatcgcgaatatgtagctgccaaaaccccctgtaccaccagtgcatagatcagcatcgctgaaggcgatgccggagcaggcgacgacgcaggtctggacgacggtgttctcctggcgggtgaaggggcggacgctggcgacgccggccttgtcgaggagcttggtccacgacgtgaggaggaagaagccgaggagccccgcggagacgttgagcgaggggatgatccccgtcgtcaggttcagcttcatcacgatcacgctgaacatggcgcccagcagcgcgctcaccgccagcgcccgcagcgtcacctgctccttccaccccggcaccaccctcccctcgaacacccgctccaccgacaccaccgccgcctcctcctcctcctgatctctacgctccctcccgctcctcgccat

SEQ ID NO: 25766 - DNA, 969 bp, Oryza sativa
  Clone ID: PAT_MRT4530_30620C.1
ctagacgccgaggtgttgaggatccaaactggcgtagcgatccttgtgtatacctactaccaccttggtgccagcgtcctctctgcctatgtggtgatcgatgccaactaatggcttcgaggaatccggtgaccaaaacaacggcggaagggcaacggacggcgccggcgacgaggaagaaacggcggcggagatcgggtcgacggtgacggcggtgctctggcggtcttcggcggcggcgaaggggcggacgaggacggcggcgacttggcgaccacgatggcggtcttcccgagcgatgacgacgaccggaacggcggcggcacacggctgaagcgacggcgacgacggtggcgctaggtcacacggcgctagagcgcgcccacagttgttcccgccgtcgacagcgcgcccgctcccggactcctccatcgtcgacagccgccatcgccactgccacagccaccaccatcgccagccgccaccgtcagccaccatcaccaccgccaccgccacggacacccgggtcgccggcatcatggaggaaggcgtcacgggtacggcgttcacagccggagcattgacgagggcgccgcgccttcctcgtggcggcgaggttcttgatgagggccggcgtcgcggcacgcgccacagtccgccgccgtcgtcgccaacttcgtcgccgccacatccgccaccatcgccgccgctagccacccccctgccaggtccgcggagtggcgccagcgacgaccgagcccgtcgccggtcaccccggccaagcggggagaccagatctggcgacgccgtcgctggagccgcggagagccgacaccgtgaccgccgcgcccaactccgcgccgtcgccgcgccgtccctgtcgccacgaccttgccgtcccgccgccatcgtcgccacgcccgcgccggggcgaggtggagccgaggaggatggccccaccgccgccat

SEQ ID NO: 25767 - DNA, 877 bp, Oryza sativa
  Clone ID: PAT_MRT4530_30621C.1
gagagtcaaagtggaattattccttctaagttggcctatcagggagttcagggcgaaatcctagccgccgccgccgcccctcctcctccctcctccgtgcttcgccgccgccggagctcgtcgccggcaaagccgggcgacacgttgggatggcggcggtggggccatcctcctcggctccacctcgccccggcgcgggcgtggcgacgatggcggcgggacggcaaggtcgtggcgacagggacggcgcggcgacggcgcggagttgggcgcggcggtcacggtgtcggctctccgcggctccagcgacggcgtcgccagatctggtctccccgcttggccggggtgaccggcgacgggctcggtcgtcgctggcgccactccgcggacctggcaggggggtggctagcggcggcgatggtggcggatgtggcggcgacgaagttggcgacgacggcggcggactgtggcgcgtgccgcgacgccggccctcatcaagaacctcgccgccacgaggaaggcgcggcgccctcgtcaatgctccggctgtgaacgccgtacccgtgacgccttcctccatgatgccggcgacccgtgcttcacgctgcacctccgatccgcgccaccccggccggatctggacggttggcgtctggcagcgttggctagcgacggtggcggctggacggtggtggttggacaggggtgtccgtggcggtggcggtggtgatggtggctgacggtggcggctggcgatggtggtggctgtggcagtggcgatggcggctgtcgacgatggtacctggggctaattgcaattttggccgcccataaagagcttgcggccgtactttttcatctgggtcccttgccgccc

SEQ ID NO: 25768 - DNA, 270 bp, Oryza sativa
  Clone ID: PAT_MRT4530_30622C.1
atggcgcgacgggccaagaccacaccacaccgtatcaccgtctcgttcgccgacgacggcgactgcgaaccgatgagcacctcgggcaaggcgagcttgtccgccaaccagcacaccgatgctctaagccttggggagctgattcggacacaatggaagccatatatgtgttccagcagcaaggtctctaggagagggcaggcgatgatgatggcatgtagggcgacctcggagagggtgatgtacttggtcgccatcatgaatgcatga

SEQ ID NO: 25769 - DNA, 1635 bp, Oryza sativa
  Clone ID: PAT_MRT4530_30623C.1
tcacgcgtatacattgcagacagtccgatgagcggcctcagcaagtctaactagtaaaagaaggtgccaccctagggggcgaaaccctagccgccgccgccgcccctcctcctcctccttcctccgtgcttcgccgccgccggagctcgtcgccggcaaagccgggcgacgcgttgggatggcggtggcagggccatcctcctcggctccacctcgctccggcgcgggcgtggcgacgatggcggcgggacggcgaggtcgtggcgacggggacgacgcggtgacggcgcggagttgggcgcggcggtgggacgccacggtgtcggctctccacggctccagcgacggacgacggggagaccagatccgtccccagatctggtctccccgcttggccggggtgaccggcgacgggctcggttgtcgccggcgccgctccgcggacccggcagggggatggtagcggcgacgatggtggtggatgtggcggcgacgaagttggcgacgactgcggtgcgtgccgcgatgccggccctcgtcaagaacctcgccgccacgagggaggcacggcgccctcgttaatgctccggctgtgaacgccgtgcccgtgatgccttcctccatgatgccggcgacctgcgcttcgcgctgcacctccgatccgcgccacctcggccggatctggacggctggcgtctggcggcgctggctagcgacggtggcggctggacggtggtggctggacgggggtgtccgtggcggtggcggtggctgacagtggcggctagcgacggtggtggggtgtgtcgtcgtcagcggcggtatgtggaggcggggaaggggtctggcggtggggaaggaggagtccgggtgcgggcgcgccgtcgacggcgggaacaactgtgggcggtggccttggccgaatcgaacggcgacgccgtttggcggcgttcccctccttggaggcgttgtttcagcatacccctttcctttccctaccatattctccgggtgaaaaccttgcttcggttccgaacgagcggtggcggcgatccacgtcgcatcctccttgggggcaccggagaagccccaggatgtggttttcacctgaagaattctatcggagagggtaagaaaattcatgcaaacaacaccccaagggtaatgcgacgccagtaggcatcgtcgttgctggctcgaagggctcactagaatcggcggcggcaccgcctcctcctccttgttgtcgttgtcggcggcctccgtgccacccgcctcccgccggactccgcgtcgccgcctgccggatccgcgctcccctccggccgcaccgcaaccgacgcccctcccctccgccggatgtggggagggatggaaggagaggggaggagagcggatcctgtgtgggggaggccggccggccgccggatctgtgcggggacagccgctgcccgccggatcccgcgcctccactgctgccatgtggagctgaggccaccgtgcgtcgatgccgaccgctgccgcgccgccgctgtcgccgcgcgccgccgtcgccttgttgaggatggatacgaggttgggggatggaggcagcggcacccagtggttggagtcatatcccccaacctccgacat

SEQ ID NO: 25770 - DNA, 319 bp, Oryza sativa
  Clone ID: PAT_MRT4530_30624C.1
agccttcggccaagcgttccggaagaaaaggcctgccctttggggatggttgggattacttgaccggtgaagggcctggatattaataagttgttcaagctttcttaaggaccttggcccctggcccaatttggggggttaaacatgggattaagccttatggataaagttgttcctgttgcaatggttcctttggaaaaaaactattggaacattttaaattttgaaaggggaagggcaaattcaaaatggggttctgttaaagctgcatggggccaccttgaccatttccctgtcaaatacgttgcattgggaatgg

SEQ ID NO: 25771 - DNA, 1626 bp, Oryza sativa
  Clone ID: PAT_MRT4530_30625C.1
tcgatggagaaggcgaagctctcgtcggcgctcttcgccggcacgcacttcgaccgcaagcgcttcgccggcgacttcgcccggttccggcaaggcccgcctgccccagacgtggcctccgccgccgcgccgtcgccggagaagaagcggaagcgccagagcaaggccaaggcgaagaagagcaagaagaggcgggcggaaggcgccgactctgcttccgatgctgtggaagggttcagtgtgttcaagggattggcagcaaagaaggatgaggacgattcggagaagaaggtcgagactggtaagagtgaggactcggaggttgtaaggcggaggaaggaagtcgagagagaaatcgagagagcggcaatactacggaagaagtttgatattcacatttcaggacaaaatgttccagcaccgctagagaactttgaagaactggtttcaaggtatggttgcgactcatatttggttggaaacttgtcaaaacttggatttcaagaacctacacctatccaaaggcaggccattccaattcttctatccgggagagagtgctttgcctgtgcacctacaggttctggcaagactttggctttcttgttcccaatccttatgaaaatcaagccaggatctaaagagggtgttaaagctgtgattctttgcccaacaagggaattggcagcacaaaccacaagagagtgcaagaagttagcaaaaggaagaaagttttatattaaactaatgacaaaagatctatcaaaatctgggaatttcaaggatatgcattgtgacatcctgatctccaccccacttcgtctggaccacgctgtacaaaaaagagaccttgatttaagtagagtggaataccttgtcttggatgaatctgataaactttttgagcttggatttgttgaagtgattgattcagttgtcaaagcctgctcgaatccttcaataattcgatctctgtttagtgccacattgcctgattcaatagaaacgcttgcacgcacgataatgcacgatgctgttcgagtcatcgtgggaagaaagaattcagcctcttcactgattaagcaaaagttgattttcgctggaactgagaaggggaagttgctagctcttcgccaaagctttgcagaatctctcaatcctccagtattgatctttgttcaaagcaaagagagggcaaaagaactttacaaagaactggcatttgatgacgtaagagctgatgtaattcatgcggaccttgatgaggagcagcgtcaagatgctgttgacaacttgagagccggaaagacttgggtactgatagctaccgaagtcattgcccggggaatggatttcaaaggtgttaactgcgttatcaactatgattttccagagtcagcttctgcctatattcaccgaataggacgatctggaagagcaggtagatcaggggaggccatcacattcttcaccgaggaggataagccattcttgcggaacatcgcaaatgtgctgatatcttcaggctgcgaggttccttcttggataaaggcattgcctaaactcaagcgcaagaagcacagggtgaaccgggatcccatctccacattaccagacgaagattga

SEQ ID NO: 25772 - DNA, 813 bp, Oryza sativa
  Clone ID: PAT_MRT4530_30626C.1
aggtaccatcgtagacagccgccaccgccactaccacagccaccaccgtcgccagccgccaccgtcagccaccaccaccgccacgaacacccctgtccagccaccaccgtccagccgccaccgtcgctatccagtgccgccagacgccagccatccagatccggccggggtggcacggatcggaggtgcagcgcgaagcgcgggtcgccggcatcatggaggaaggcgtcacgggcacggcattcacagccggagcattgacgagggcgccgcgcctccctcgtggcggcgaggttcttgacaagggccggcgtcgcggcacgcaccgcagtccgccgccattgtcgccaacttcgtcgccaccacattcgccaccatcgccgccgctagccacccccctaccaggtccgcggagcggcgccggcgacgaccgagcgcgtcaccggtcaccccggccaagcggggagaccagatctggcgacgccgtcgcccgtcgctggagccgtggagagccgacaccgtggagcgccccaccgccgcgcccaactccgcgccgtcgccgcgccgtccctgtcgccacgacctcgccgtcccgccaccatcgtcgccacgcccacgccggggcgaggtggagccgaggaggatggccccgccgccgccatcccaacgcgtcgcccggctttgccggcgacgagctccggcggcggcgaagcacggaggagggaggaggaggggcggcggcggcggctagggttttgccccctagggtttctatccctcttcataagaggctcacttgctcattttctccga

SEQ ID NO: 25773 - DNA, 1422 bp, Oryza sativa
  Clone ID: PAT_MRT4530_30627C.1
atgacgacgaccgggagcactccgccgcggaagaaccggagcaatgtcaccggcggcgagggggggagcctcgaggagtacgcgtggcgggcggcgggcgaggctgcagctgcgaagaaggcgacgagggcgtggggcgtcagcgtcagcctccggagccacttcagctcgctcgtgctgctcctgctgctcctcctcgtcgccctcgccgtctccgccaccaccaagaacggcgaccccgccgagacgcctcacgcgccgccgcttccaccgccggcgtcaataaagctcccgtcgtcgtcgtcgtccggcggcggcgagtgcgacctcttctccgggaggtgggtgtacgacgaggcggcgtacccgctgtacagggagagcgcgtgcagggtgatgtcggagcagtcggcgtgcgagaagtacgggaggacggacctccggtaccagcattggaggtggcaaccccatggctgcgaccttcctaggtttgacgcggagaagtttctggggaagctaaggaacaagcggctggtgttcgtgggcgactcgctgaaccgcaaccagtgggcttccatgctctgcctcatcgacaccggcgcccctgaactccacacctcaatcaactcctcccgatctctcaccaccttcaaaattcacgagtacaacgcgtcggtggatttctactggtcgccgttgctggtggagtccaactccgaccacccgctgcgccaccgcgtcgccgaccggaccgtccgcgccgcctccatcaacaagcacgccgcccactggaccaacgccgacgtcctcgtcttcaactcctacctctggtggcagcgtcccgccatgaaagtcctgtgggggtcgtttgacaatccggcggcggtggtggcggcggcggcggaggaaggggacgagtacgcggtgtccaaggtgattgacagcctgcgcgcgtacgagctggcggtgaggacgtgggccgactggatggagttccacgtcgaccgcgcccgcacccagctcttcttcatgaccatgtcgccgacgcacctccgctccgacgagtgggaggacgccgccgccgccgccgccggcggaaaccacgggtgctacggcgagacggagccgatcgcggcggaggagtacagggggacaagcgggacggacatggcgttcgcgagggcggtggaggcggaggcgcggcggctcggggagcgcagcgtggcggtgcggctgatcaacgtgacgcggctgtcggagcggcgcaaggacgcgcacccgtcggtgcaccgccggtactgggaccccgtcaccgacgagcagcggcgcaaccccagcagctacgccgactgcatccactggtgcctccccggcgtccccgacgtctggaaccagctcctctacgcacacatcgtctcatga

SEQ ID NO: 25774 - DNA, 2614 bp, Oryza sativa
  Clone ID: PAT_MRT4530_30628C.1
ttttttttttagtcaaatcgagcagcaagggcaaatgtgctgttataaactccgtcgagcagaattcagaattgttgctacctctacgggtccatcccggaggcttgaccgacttcactaaagtacactatatctaatccatcatatgtgtgaccaggctgtagcgtcgcccctgtgaccaaacaacatcttatcagctgtaggtgaggagaaacctaggtaggtgatagtagatatgtggtgtgtacaactccttgtctccttgttacttgtacatgtactgctaatgttccatgttgtacaagcagcacaaacaaaatacatggggcaacacttgttcactcggaaaatgttcctgtgtggatctgtaatacaatgggtacgttcatctcagcacaaactatcttcctctttacctacaaaatgtgttggcaaatcaccaacgtttgcccttaatgccctgcttctgtatatgcacaaccaatatgcaggacataaaaaatactctacctgtatgtcatcttgattgggaatggtgaggcctgtacctatgaagtatgaaccggatctatgaacaggtacaacataaaaaaagggtatctatgaactgttttcttcttcattgccaacccaatactttttcactgaaaccaaaatcttctcaggtatatgaggcccatcttcatgatcaagcaacttggatttccaccgcatccccatcactgtcctcctaaccttgttcagcacctcaacattgtcccgcagtatgactgcgccctcaggacgtaaaatcctatccatctccagaagaatgtcttccatgttgcacttattctggtataagctgaagagaccattggcatgtatcaagtcgtatgtcctaggatatgtagagaaggcttcacaccaatcatggtatatgccaataagacctcgctcgtaaatgataccaagagtgttcttctcagatattgtgggcacaacattcattacccaagatattggagaatcaataattgccgcaaaacttccaagccctgcgttcatgtccataatattcctatacctcaaagaacctatcagcttgtttatcctcttgtaagtactgacatacttcttccacaacttattatcctcctcaaaaatttcttctgtaacacctggggtgcgaccctgtagaattctgggaggggcagcaaatagtctctctgggaatttccgtagctgtgcttcttccgggaaaggtgttatacaaccttccattttcttataccagacatcatctgcatcttgaattttgcacatcttgctaggatggtcatccttattatgacattcatttgaatctgcctttttgcgccaaataacagtatctcccttctcatgaatcttaccccagcacaacatttcagcaattttttcgattacattttgttctgcctctaagtcttccttggatcttttccatgcttggtgatttgtcttccaattgatgggaggaccagacaatatccaatagccaccaggcctcagaacccgatctacttcaaacatgtacatcgcatcatttgacttccaggagattaagcagcgtgagcaatgggccatatcaaaagatccagaggggtatggtagttttatagttccaagcactccaattactgcaggaacacctcgctccaatgcaaattgaacctgagcttcatgtgagtctcgaggtgcaaatgacatggttaatacatttctgtccattaggtaagcaccccagctggcaaccccgcatccagtatcaagtgcagtcctaatggtgccatcagtaaatggaatgacggatgcaagctcatcaatgtaggcatttgctccattgggaaacattgtcccccctcctggaaatctaaacacatctccctcaaactggacccagttctgaacagccttctcaactgtcaaattcttatatggtgcatttgcatatggaacatagtcacggctcttgggccaaggaaaaggggtgacatagcctttgggtgctgggattagacagcgcagtttcttagtctctgtaggacaatgcctctctcggtagttcatattttctctaggaaagttcattgctcggttctgatcctgacaaggagtatagtcactgtatcgaatatggcatggctcaaagactttatcggtcatgaccaaaggattaacaccacctaagctatgatgggtctcaaagtgcaagtttggcaagattgtacagtcggtctcttttgtcaccctcaatgcaatactatccccccttccggtcccacttttctgccaagctcctagtatataaaagaagcagcacaaactcatcacaattacgatggacatcgtgctccgcgttctacggtcacctggattcatcctcgagcccctcatgaacctctctgcaggagacggccggaaggcgacccggtggaatggaactccccgcggcggcggcggcggcggcgtgaggcggtgggggggctcgggtcaccggcgggtggagaggagaggagagggggggagaagattttggtggaggtaggcttggttgctccgccgctgctgctgcttttgactttttcacgcg

SEQ ID NO: 25775 - DNA, 321 bp, Oryza sativa
  unsure (1)..(321): unsure at all n locations
  Clone ID: PAT_MRT4530_30629C.1
ggcgagnacacaggcnacaaacaaaagnanaaagagggcnccaaaagcggnaagganacaaanagcccagccccgnaggacganncnaggaacacaanannncaggngaacaacaaaggngnancagaannnannggaacccagggggcacaangaacggcgacacaaanaagggggaaacccaacnaaagagnangcnccagngacaaccnncgccaaaggcgangcagcagcncaggcccgggnccgcnggggcaccnggatgcgcccccggaaancnncnnccatgagcaccgagcccncccgcagaacgagcggggg

SEQ ID NO: 25776 - DNA, 264 bp, Oryza sativa
  unsure (1)..(264): unsure at all n locations
  Clone ID: PAT_MRT4530_3062C.1
cccacgcgtccgggctagttctagatcgcgagaggccgncctttcccgccacccacccctcgncgtcgncgtccgccggatgatggaaactctgcccgcgccgngccccacccagatccccagatccacggccatccgcccgccgtgcgccacccccttctcccgcgnccactggcagaccacctgcgccgncatcctcgncaccaccactaccaccaacgacaaagcctatggcgtcccgtgggtgaacggngacagatcaag

SEQ ID NO: 25777 - DNA, 1182 bp, Oryza sativa
  Clone ID: PAT_MRT4530_30630C.1
atggagaccttcggctgggccggcggcgggcagctgatgcaccacgacgacatctacttgccgcgctcggtggggtgcgggcggccgttcgagctggacgacgcgttcctgggcgcgtgcttcggcgcccagctccagtgcgacggtggcgtcggcggcggcgacggcggcgggtgtctgcagggtacctcgggatttggcgccgtggctggagacccgttggggttgctgtgctcgggggacgtgtttgcgtctgtcgccgagggcgccggcggcgcgcacgacgacggcctcctcgacgcggcgctcgccttctcccggaatcagctcgggggcgccgcctgcgacgggagcgacggcggggccgtgtcgaacggcgccatgctgtccagctacagcggcaccaccggcggcaacatctcctccggcgagtcgaataactacagcggcggcggcggtggctacgacgccgaggtggtgtcgccgacgtccaccatgtccgcagccacacagtcgctccaccccaagcgaaagctatacgacgaccaccaccaccccgccggcatagcagccgcagccgcagcgccaccgctggcgccgtgcccacgccccaccaccggcgccgtcgccgcgaagcggagggcttccacgtcagcaacaagcatcaccttcggccaccagccgcaccaccaccacgcgggcgccaccaccgccgggtacgagcctgacatggaagccatggcgcaggtgaaggagatgatctaccgggcggcggccatgcgccccgtccacctcggcacggaggccgccgccgacaagccccgccgcaagaacgtgcgcatctcgagcgacccgcagacggtggcggcgcgtctccggcgggagcgcgtcagcgaccgcctccgcgtcctgcagaagctggtccccggcggcaacaagatggacacggcgtccatgctcgacgaggcggccagctacctcaagttcctcaagtcccaggtccaaaagctggaaaccctaggcaccaccaccaccacgtccaagttaccgcagcagtattacagcggcaacatcaacagcagcaataatcaccatggattcctcggattcgcagcaaataacaacaccatttcagctggctacgcaaattctaatgctggaaatgcaacgaaactgttgtag

SEQ ID NO: 25778 - DNA, 431 bp, Oryza sativa
  unsure (1)..(431): unsure at all n locations
  Clone ID: PAT_MRT4530_30631C.1
gtagctagctcttacggggcctcctccccttcggcctcgttcttttccggcggagcctgggcacggccgccggccttttccccttccgccgccgttcacacgcgcgcgcgcgcggnggnggtcaaaggccagggccccaaaggacgcttngcacaacggcttcttttcctttcccagatccgccctttggttcgcgcgcgcgccgccgggcctaaggttgacaggatttcctttcctctgtgaagatgagtcatatcgggtgaaaatattcaaataaaagattttgagatctccaggacccgcacaaaatttattcccactaggggggaggggaaattacaaagaagatgaggcgaagtacaactgctcatttttctgggggggagaagaagaagaaagatttcaacataaacaattttattcagcatgcc

SEQ ID NO: 25779 - DNA, 957 bp, Oryza sativa
  Clone ID: PAT_MRT4530_30632C.1
gcatgaggtcgctgcccgaatccccctcttgcgattttcgcgaaaccctaatccccctctcgcgattcgcgattccctctccctccgccatggccgccgccgccaccaccaccgtggaggtctcggacgacggcgaccaccccgtcctccgcgacgacgagcgggggatccctcgatccctctccctcctcgccgcgatcgtggaggccgacgccgcccgccacgccgccgccgccacacggcccgccgagtccgacctcgtccgcgccttccgcggcggcgcgacgcccaccgtcgcgatcggggagttcctggagcggatccacgccttcgtccggctggagagcgtccgccacgacatccggctccaggccacgtgctacgtcctcgccgggatctacctcacccggttcttggggagcgccgccgcggtggaggccgggatccgcgtcgacccgtccacggcgcaccgcctcgtcgccgcagcggtcttcgtgggcgccaagttcgggaacaccagcgacatgctcccgacgaggtggacctccgtgttcgagacgagctccgacgcggcgatccacgcgggggagatggccgggctcgagcggcgcttcctgcgcgccgtggactaccgcctgttcgtccgcagcgacaggttcgggtggttctgcggcgccatggagcaggcgctgcatcggagcagttgtttgcaggtcatcggggtggagaagacgacggacggccggccggagttggagttggatcggctagagctcgccgccgttggccggagtagttttacagagttttagccataggatgtttataattatatatattgagcaactgttagctttgtcagagtttaactgtcagattatatcgatcaatcagtaatagatttccaatgtaatcctataaccaactatataaatataaataataaaaaaagtaact

SEQ ID NO: 25780 - DNA, 1538 bp, Oryza sativa
  Clone ID: PAT_MRT4530_30633C.1
atggagaagatcatagctgaactaattgaatcaaaggagattcaggtcagtgatatcccatactcatcacctgctgtgatggtgaggaagaaggatggatcatggaggttatgtgtcgactacagacaacttaatgcacaaacagtcaaaaacaaattccctatgccaattattgaggatctgttggatgaactcaatggggccaaagttttttctaagctagacctcaggtctggatatcatcaaatcagaatggccactcaagatataccaaagactgcattcagaactcacttagggcattatgagtatcaagtaatgccctttggcctgacaaatgccccaaccacttttcagtccctaatgaatcaggtactggctccattcttgaggaaatatgtgttggtgtttttcgatgatatcttgatctatagtaaggactgggcagaacacaaggagcacatcaggcaggttatgaaggtgttggaggaaaataaattagtagttaaacttaagaagtgtgcttttggcctccctagtgttacttatttggggcacatcatatcgcaagatggagtggcaacagatcctaagaaagttgaaaagatagctacttatccaactcctaagagtgtgacagatcttagaaaattcttggggatgacaggttactataggagatttataaagaactatgggatagtgtgcagaccactgcatgatatgctcaagaaggaaggctttcaatgggaaagggaacaaactgaagcttttgaaactctaaagacacatatgtgcactagtccagttttgagtctgcctgacttcaccaaagagtttgtgattgaggccgatgcttgtggcaatggtataggggctgtccttatgcagtctggtagacccttggcctatttcagcaaaactctgggacctaaagcagctgctcaatcgatttatgaaaaagaagcaatggcaattctagaagctttaaaaaaatggagacattatgtgttaggcagtagattaatcatcaaaacagatcagcaaagcctaaaatttatgatgaatcagaggctagttgaagggattcaacacaaattgttgctcaaactgatggagtatgactactcaattgagtacaaggcagggaaagaaaacctagtggctgatgccctgtcaaggattccaccagctgaacagtgccaggccataactactgtgatacctgaatgggtgagggacatacagaggagttatgaaggagatgtgcaggctcataagatccttagtttgattgggacagagggtgacacagatgggagctatagtcaggaagctggattattaaggtataaaggcagaatttatgtgggggagaatactgaaatcagggaggagctgataagatcatatcactcctctgcttttggtggacattctggaatgagggcgacatatcacaggatcaagtccttgttttactggccgggtctgaaaaagcagtggaagggttcatccgagagtgcccgatttgtcag

SEQ ID NO: 25781 - DNA, 530 bp, Oryza sativa
  Clone ID: PAT_MRT4530_30634C.1
agatgggcacctcctttaaaggtgcagtgagggcaagaatgtccttagccccggccaaaccccagtcatacaactcttctctagcaagcagcaaggcttcatctaggttgggagaggcgccatcgaagacacaatgattccaatgtttccataatgtctaggatcccaaaacaacaatagaaataatcccttttctaaccttaccatccacccttacttctacacttgctcaccagtcatcaaaggaagcaatatctcgctgcagcgaaagagtttgtagcccaactttttgaagaaggttaaaccagaaaacatgagcgaaaatgcatgagatgagatgagcaaatgattgattgtttcttcttcttgatcacaaagaggacaacgggctggatgtggaagaccgtggcgtgtaagatggtcagcggtccagcacctgtcatgagccactaaccataagagaaaaaatggcacttgcctggagcccaagatttccaaatttgcaaaaataatttgaaatttcaggaata

SEQ ID NO: 25782 - DNA, 5931 bp, Oryza sativa
  Clone ID: PAT_MRT4530_30635C.1
atggctgagcaagcaaaggcgcccgacctctctcccagtgtgagtggcgacgacggggagccgaacccacgccgtcgagctcgtactccaccgccccctccacgccaaagtcctaagcagggggaggtgctcgaaagggtcgaaagatccgcggcttcaccgatcgcgggcgatggaggagaacggcgagatggggaccgtcgcctcctcgtctacggcgacggcagcacgccccagggcgcgctccaagctgcgggcgcgctcttacgccatccgcctgtcgtccctgacccggagtctccagcccaacgatggctggacgatgtggccaaattggtcatgacggcgcggcagcgcctagatgctggtgggcggtcctccgccaccaaggcctctggtgctgctaccaccggctccgcgtcgtcaagacagagggcacgacgagcggcagccgctgttcgccgttcggctgccactccttcgtcgactccttcgacccgggaagatctgcgtggggagcaggacgcccgcgccagcatcaagcgccggcgcaatgaccgaagtgctgcccacgcaacggagggcgcttcctcgtccagagtgtcacctcgacatggacgtgggaatcagccctccgtgcccccggttggtggtgtcggctgtagagcctttgtggcgagtcttcggaatgtccgttggcccccaaggttccggcccaccatcgccgaaaaatatgatggcagcgtcaaccccgccgagtttctccaggtctacacgaccgggattgaggccgccgggggtgacgacagggtcatggcgaatttctttcccatggccctgaaggggcaagcgcggggttggctaatgaacctgccccccgcgtcggtccactcctgggaggatttgtgccaacagttcaccatgaacttccagggcacatatccgcgcaccggtgaggaagcggacttgcacgctgtacagcgaagggacgacgagtcacttcgatcgtacattcagcggttctgtcaagtccgcaataccataccatgcatccctgcacacgcggtaatctacgcgttcagggggggcgtgcggcacaaccgcatgctcgaaaagatcgcctccaaagagccccagactaccgcagagctttttcagctcgcggaccgagtggctcgcaaggaggaggcctggacttggaacccctccggttccggtgtggcagcttcggccgcccccggatccgccgctcaggcagggcggcgtgacaggaggaggaagaagaggtcagtccgttccgacgacgagggtcatgtcctcgccgtcgagggcgcttcgcgggccacccgaaaggggaggcctgcgagcgacaaaaagaaggaggccagcgttcccagcagggagcgccctaccggcaagtggtgcgccgtccacaacacctccctccatgaccttgcggactgtcgcgcagtcaaaagcttggcagagcggacaaggaagtgggaggaggagaggaggcaggagcgccgggaaggcaagtccccggcggttccttccggccgtcggcgaagtgaggccaagcagaaggcccccgccgaggacatcgatgatggtgatgatgacttaggtttccaagagcctggggccaccattgccactgtcgatggaggagcgtgtgctcacgtttctcgccggagcctcaaggctatgaagcgagagcttctggccgcggcccctactcatgaggcgacgcgccgggcgcggtggtcggaagttgccctcacttttgaccagaccgaccacccgccgtgcgttgcccggggagggcagattgcgatggtggtttctcccaccgtttgcaacgtgaagttggggcgtgtcctcattgatggaggagcagccctcaacccgctaggtcatatcgacctcccggtcaccttcggtggacccgccaatttccgcacggagcgggtgaacttcgatgtggcggacctcagtctgccctacaacgcggtcctggggaggcccgtgttggtgaagttcatggcggcggtccactacgcctacctccagatgaagatgccgggccccgacggtcccatctctgtccatggcgacctcagagtcgcgctcgcttgtatggagcagcgtgcggaccgcctcgccgtcgtgtccaagcccgagggtggcgacgagaggctgggcacatccgcccccgccgccccgaggcagcggatagccacgtccgatgaggtcccggaagacgcgctcgtctccttcctgcgggcaaacgctgacgtcttcgcatggagaccggcggatatgcccggggtccccagggaggtgattgagcaccgtctcgccgtacggccgagcgcaaggccggtccggcagaaagtgcggcgccaggccccggaacgtcaagccttcatccgcgaggaggtggcgagacttctggaggccggattcatccgtgaggtcatccatccggagtggctggcgaacccggtggtcgttcccaaggcgaacggcaagcttcggatgtgcatcgactacaccgaccttaacaaggcatgtcctaaggatccttaccccctgcctcgcatagatcagattgtcgactccaccgcggggtgcgaccttttgtgttttctagatgcatactctggttaccatcagattcgcatggctagggaggatgaggaaaaaactgcgttcattacccctgtaggaacctattgttatacttcaatgccttttgggttaaagaatgcaggtcctacttttcaacgcgctactcgaatttctttgggtagccaattaggacgtaatgttgaggcttatgtcgatgacttggttgtaaaaacgcgcaatcaagagactttactctcagatctagcggaaacttttgagaatctccgctccgcccgcataaaactgaaccccgataagtatcgaggccaaccccgagaagatacgagctataaagcggatgcgccccccagtaaacttagggatgtgcaatgtgtcaccggttgcatggccgccctaagtcggttcatatcgaggctgggagagaaggcgctacccttatttaagctcctcaagcgctctgggccgtttacctggacggaggaagctgaacgtgccctcactcagctgaaggcatacctcagttctcctccggttttagtcgccccggagccaaatgagcccctgctgctctacttagcggcgaccccccaagtagttagtgcagcgttggttgtggagcgcgatgaggacgatcctcattccgcgcaccctcaccctgtgctgacttggcccgggagcgagcagggaggagaggcccccgagccgaacggtggcctaaggcccctgacgaccggagtcagccctctccccgctcgtcagatggtgctgggcgcccccgaccctcaggaaggccccgaggccactgcgggaaggctgcacctatcgccctctgaccccgaggctaactctgtaccgattcgacctgggagcgagcagggagaagaggcccccgagccggacggtggcctaaggcccctgacgaccagagttggccctttgcccgcttgtccgacgacgccaggagcccccgacccccaggacggccccgaggccactgtgggaaggccgcccctgtcatcctccgaccccgaggtcatcggcacagaagacgagtgcgccccgaggggccacttggacgaggagcgccccggggatatggcccttagcgaaggggatcggccccaccgaagggtgcagcggcctgtttactttgttagcgaggccctccgggacgccaagacccgataccctcaggcccagaagatgctttacgctattctgatggcctcgaggaaactgcgccattatttccaggcgcatcgggtcactgtggttacgtcttaccccctcggtcaaatcttgcataatcgagagggtacaggacgggtggtaaaatgggcaatcgagctttctgagttcgatttgcgctttgaaccacgccacgctatcaagagccaggccctcgccgatttcgtggcagagtggaccccagctccagagaccgtttcagtctctgaagccagctcggaccccttgcagctgcctcacgccgtccactgggtgatgcagttcgacggctccctgtctcttcagggcgccggcgcgggggtcacgttgacctctccgaatggtgacgtcctcaaatacttggtccgcctcgactttcgagcgaccaataatatggcagagtacgagggactccttgccggactcagagtggcagctggactggggatccaccgtctcttggtgttaggcgactcccagctagtcgttaaccaagtctgtaaggagtaccggtgctctgacccgcagatggacgcttacgtacgccaagtgcggcgtatggaacgccattttgacgggatagagcttcggcatgtgcccagacgggataacatgattgccgacgaactctcacggctcgcgtcttcgcgagcccagaccccaccgggcgcctttgaagaaaggcttacccagccgtcggcgcgacctgaccccttaggggagacgggtgtgcctgaccggcccccgaggcccgtcggagtccaggcctcgggacccgaagggagcgctccaagctcccttagattgattgcttgcatctccgagatccaagcatacctcacagataagactctacctgaggaccgcgaagggagtgaacgcgtccaacgcatttccaaacgctacgtgctggtagaagggaccctctatcggcgcgcggctaacggaatcctcctgaagtgcattcctcaggaacaaggcgttgagcttcttgccgatatccatgaaggcgagtgcggagcccattccgcctcgcgcaccttggttggcaaggcttttcgtcaaggattctattggccgacagctctcaatgacgcggtcgacctggtccggcgatgcagagcgtgtcagttccacgccaagcaaatccatcagccggcccaggccctgcagatcataccactttcatggccatttgctgtctgggggctcgatatcctgggaccgtttaggcgggccccgggcgggtttgagtacctgtatgtcgcgatcgacaagttcactaagtggcccgaggcttatccggtcatcaagatcgataagcactccgcacttaaattcattaagggcatcacagcccggtttggagtgcctaaccgtatcattacggataacggcacacaattcactagtgaactcttcggcgactactgcgaagacatgggcatcaagctctgcttcgcctcacctgcccaccccagaagcaatggtcaagtggagcgcgccaatgcagaaatcctcaaaggcctcaaaaccaagaccttcaatattctcaagaagcacggcgattcatggatcgaggagttgccagcggtgctctgggcgaaccgaaccacaccaagccgagcaactggggaaacgcctttcttcctcgtctacggcgcagaagcggttctcccatccgagctcaccctgaggtctcctcgggccaccatgtactgcgaggctgatcaagatcagcttcgcagagatgacctcgactacttggaagaacgaaggcggcgtgcggccctccgagccgcacgctaccagcagagcctgcggcgctaccatcagcgccacgtccgggcccaatcactctgcgtcgacgacctcgtcttacgccgcgttcaaacgcgtgctggattgagcaagctctcaccaatgtgggagggtccgtatcgagtgatcggcgtcccccggccgggctccatacggctggccacgggcgacggcacagagttgcctaacccatggaacatcgagcaccttcgtcgcttctacccctga

SEQ ID NO: 25783 - DNA, 5895 bp, Oryza sativa
  Clone ID: PAT_MRT4530_30636C.1
atggctgagcaagcaaaggcgcccgacctctctcccagtgtgagtggcgacgacggggagccgaacccacgccgtcgagctcgtactccaccgccccctccacgccaaagtcctaagcagggggaggtgctcgaaagggtcgaaagatccgcggcttcaccgatcgcgggcgatggaggagaacggcgagatggggaccgtcgcctcctcgtctacggcgacggcagcacgccccagggcgcgctccaagctgcgggcgcgctcttacgccatccgcctgtcgtccctgacccggagtctccagcccaacgatggctggacgatgtggccaaattggtcatgacggcgcggcagcgcctagatgctggtgggcggtcctccgccaccaaggcctctggtgctgctaccaccggctccgcgtcgtcaagacagagggcacgacgagcggcagccgctgttcgccgttcggctgccactccttcgtcgactccttcgacccgggaagatctgcgtggggagcaggacgcccgcgccagcatcaagcgccggcgcaatgaccgaagtgctgcccacgcaacggagggcgcttcctcgtccagagtgtcacctcgacatggacgtgggaatcagccctccgtgcccccggttggtggtgtcggctgtagagcctttgtggcgagtcttcggaatgtccgttggcccccaaggttccggcccaccatcgccgaaaaatatgatggcagcgtcaaccccgccgagtttctccaggtctacacgaccgggattgaggccgccgggggtgacgacagggtcatggcgaatttctttcccatggccctgaaggggcaagcgcggggttggctaatgaacctgccccccgcgtcggtccactcctgggaggatttgtgccaacagttcaccatgaacttccagggcacatatccgcgcaccggtgaggaagcggacttgcacgctgtacagcgaagggacgacgagtcacttcgatcgtacattcagcggttctgtcaagtccgcaataccataccatgcatccctgcacacgcggtaatctacgcgttcagggggggcgtgcggcacaaccgcatgctcgaaaagatcgcctccaaagagccccagactaccgcagagctttttcagctcgcggaccgagtggctcgcaaggaggaggcctggacttggaacccctccggttccggtgtggcagcttcggccgcccccggatccgccgctcaggcagggcggcgtgacaggaggaggaagaagaggtcagtccgttccgacgacgagggtcatgtcctcgccgtcgagggcgcttcgcgggccacccgaaaggggaggcctgcgagcgacaaaaagaaggaggccagcgttcccagcagggagcgccctaccggcaagtggtgcgccgtccacaacacctccctccatgaccttgcggactgtcgcgcagtcaaaagcttggcagagcggacaaggaagtgggaggaggagaggaggcaggagcgccgggaaggcaagtccccggcggttccttccggccgtcggcgaagtgaggccaagcagaaggcccccgccgaggacatcgatgatggtgatgatgacttaggtttccaagagcctggggccaccattgccactgtcgatggaggagcgtgtgctcacgtttctcgccggagcctcaaggctatgaagcgagagcttctggccgcggcccctactcatgaggcgacgcgccgggcgcggtggtcggaagttgccctcacttttgaccagaccgaccacccgccgtgcgttgcccggggagggcagattgcgatggtggtttctcccaccgtttgcaacgtgaagttggggcgtgtcctcattgatggaggagcagccctcaacgtcctttcccccgcagcctttgatgccatcaaggccccggggatgatgctccggcctctgccctacaacgcggtcctggggaggcccgtgttggtgaagttcatggcggcggtccactacgcctacctccagatgaagatgccgggccccgacggtcccatctctgtccatggcgacctcagagtcgcgctcgcttgtatggagcagcgtgcggaccgcctcgccgtcgtgtccaagcccgagggtggcgacgagaggctgggcacatccgcccccgccgccccgaggcagcggatagccacgtccgatgaggtcccggaagacgcgctcgtctccttcctgcgggcaaacgctgacgtcttcgcatggagaccggcggatatgcccggggtccccagggaggtgattgagcaccgtctcgccgtacggccgagcgcaaggccggtccggcagaaagtgcggcgccaggccccggaacgtcaagccttcatccgcgaggaggtggcgagacttctggaggccggattcatccgtgaggtcatccatccggagtggctggcgaacccggtggtcgttcccaaggcgaacggcaagcttcggatgtgcatcgactacaccgaccttaacaaggcatgtcctaaggatccttaccccctgcctcgcatagatcagattgtcgactccaccgcggggtgcgaccttttgtgttttctagatgcatactctggttaccatcagattcgcatggctagggaggatgaggaaaaaactgcgttcattacccctgtaggaacctattgttatacttcaatgccttttgggttaaagaatgcaggtcctacttttcaacgcgctactcgaatttctttgggtagccaattaggacgtaatgttgaggcttatgtcgatgacttggttgtaaaaacgcgcaatcaagagactttactctcagatctagcggaaacttttgagaatctccgctccgcccgcataaaactgaaccccgataagtgtgtgtttggtgtacctgtgggcaagcttctcgggttcttgatctctgcccgaggtatcgaggccaaccccgagaagatacgagctataaagcggatgcgccccccagaagctgaacgtgccctcactcagctgaaggcatacctcagttctcctccggttttagtcgccccggagccaaatgagcccctgctgctctacttagcggcgaccccccaagtagttagtgcagcgttggttgtggagcgcgatgaggacgatcctcattccgcgcaccctcaccctgtgctgacttggcccgggagcgagcagggaggagaggcccccgagccgaacggtggcctaaggcccctgacgaccggagtcagccctctccccgctcgtcagatggtgctgggcgcccccgaccctcaggaaggccccgaggccactgcgggaaggctgcacctatcgccctctgaccccgaggctaactctgtaccgattcgacctgggagcgagcagggagaagaggcccccgagccggacggtggcctaaggcccctgacgaccagagttggccctttgcccgcttgtccgacgacgccaggagcccccgacccccaggacggccccgaggccactgtgggaaggccgcccctgtcatcctccgaccccgaggtcatcggcacagaagacgagtgcgccccgaggggccacttggacgaggagcgccccggggatatggcccttagcgaaggggatcggccccaccgaagggtgcagcggcctgtttactttgttagcgaggccctccgggacgccaagacccgataccctcaggcccagaagatgctttacgctattctgatggcctcgaggaaactgcgccattatttccaggcgcatcgggtcactgtggttacgtcttaccccctcggtcaaatcttgcataatcgagagggtacaggacgggtggtaaaatgggcaatcgagctttctgagttcgatttgcgctttgaaccacgccacgctatcaagagccaggccctcgccgatttcgtggcagagtggaccccagctccagagaccgtttcagtctctgaagccagctcggaccccttgcagctgcctcacgccgtccactgggtgatgcagttcgacggctccctgtctcttcagggcgccggcgcgggggtcacgttgacctctccgaatggtgacgtcctcaaatacttggtccgcctcgactttcgagcgaccaataatatggcagagtacgagggactccttgccggactcagagtggcagctggactggggatccaccgtctcttggtgttaggcgactcccagctagtcgttaaccaagtctgtaaggagtaccggtgctctgacccgcagatggacgcttacgtacgccaagtgcggcgtatggaacgccattttgacgggatagagcttcggcatgtgcccagacgggataacatgattgccgacgaactctcacggctcgcgtcttcgcgagcccagaccccaccgggcgcctttgaagaaaggcttacccagccgtcggcgcgacctgaccccttaggggagacgggtgtgcctgaccggcccccgaggcccgtcggagtccaggcctcgggacccgaagggagcgctccaagctcccttagattgattgcttgcatctccgagatccaagcatacctcacagataagactctacctgaggaccgcgaagggagtgaacgcgtccaacgcatttccaaacgctacgtgctggtagaagggaccctctatcggcgcgcggctaacggaatcctcctgaagtgcattcctcaggaacaaggcgttgagcttcttgccgatatccatgaaggcgagtgcggagcccattccgcctcgcgcaccttggttggcaaggcttttcgtcaaggattctattggccgacagctctcaatgacgcggtcgacctggtccggcgatgcagagcgtgtcagttccacgccaagcaaatccatcagccggcccaggccctgcagatcataccactttcatggccatttgctgtctgggggctcgatatcctgggaccgtttaggcgggccccgggcgggtttgagtacctgtatgtcgcgatcgacaagttcactaagtggcccgaggcttatccggtcatcaagatcgataagcactccgcacttaaattcattaagggcatcacagcccggtttggagtgcctaaccgtatcattacggataacggcacacaattcactagtgaactcttcggcgactactgcgaagacatgggcatcaagctctgcttcgcctcacctgcccaccccagaagcaatggtcaagtggagcgcgccaatgcagaaatcctcaaaggcctcaaaaccaagaccttcaatattctcaagaagcacggcgattcatggatcgaggagttgccagcggtgctctgggcgaaccgaaccacaccaagccgagcaactggggaaacgcctttcttcctcgtctacggcgcagaagcggttctcccatccgagctcaccctgaggtctcctcgggccaccatgtactgcgaggctgatcaagatcagcttcgcagagatgacctcgactacttggaagaacgaaggcggcgtgcggccctccgagccgcacgctaccagcagagcctgcggcgctaccatcagcgccacgtccgggcccaatcactctgcgtcgacgacctcgtcttacgccgcgttcaaacgcgtgctggattgagcaagctctcaccaatgtgggagggtccgtatcgagtgatcggcgtcccccggccgggctccatacggctggccacgggcgacggcacagagttgcctaacccatggaacatcgagcaccttcgtcgcttctacccgctcgtgctcgatcctgccctcgggggcccggttcggccggctaaaatcgccaaaaggggcccagaaccgagccat

SEQ ID NO: 25784 - DNA, 528 bp, Oryza sativa
  Clone ID: PAT_MRT4530_30637C.1
tttcctgcaaccgcttctgtaggagaggcagcgccgcgggcagccggccggagatggccggcgccggcgccggcgagagcctggacctccccgtggtggacctagcgtcctccgacctcgccgccgccgccaaatccgtccgaaaggcttgcgtggagtacggattcttctacgtggtcaaccatggagccgagggattggcggagaaggtgttcggggagagcagcaagtttttcgagcagccgctgggggagaagatggcgctgctgaggaacagaaactacctggggtacaccccgcttggcgccgataagctcgacgcctcgtccaaattcaaaggagatatcaatgaaaattactgtatcggacctatcagaaaagaaggttatcagaatgatgctaaccaatggccttctgaagagaatttcccatgttggaaggagacaatgaagctataccatgaaactgcacttgctactggtaaaaggatactctctctaattgctctgagtttgaatctcgacgttg

SEQ ID NO: 25785 - DNA, 402 bp, Oryza sativa
  Clone ID: PAT_MRT4530_30638C.1
cggacgcgtgggctggcactttctggtactatttgtaacatttgatcgcctttagtttgtgccattttccattatccatgagctagacagttcaatttctgtcacgatgattaggcttgttccgaatctctcgagtccattgcaagtagccctcttcaggccttctactggcgatccttgggcgcctgttgaaaaaattgagtgaatccaaggggctaaaacactcccgatgcctcttatttctgcagactgcagacattgtgtgaagttggatctacaggagagctaacttataaaaatttcatgatatttcaaggttagagaagctggggttgctatgacagctagctaggctcgtgaacactttttgtagttcgagcaatgcattcatctatataattg

SEQ ID NO: 25786 - DNA, 1431 bp, Oryza sativa
  Clone ID: PAT_MRT4530_30639C.1
ctgcaggaattcggcacgaggctcctcctcctttataagctctcgcgctcgcgctggagctttcaccacgctcgctccatcgattccttgttctagtgtttctatggagattctacatctcacttatttgtgtgaaaagagtggtccaaggcccggcttacccgggatcgctagcgggcaccccgtttcttggattcaaagctcagctcaggtgggaaggaagacaaagatcccacctggtgaaaacgaggaagaagaaggagctagcgaggatgcggcacatctcgtcgctgctgcaggggctggcgcgctcgctgtcggtggggaaggagaggaaggcggcgacggcgacgacgggaaggcggcggcggcgacggcgacggcggtgctgaggacatcggggacgctgtggggcgagggctctgagacgttcgccgccgtctgctcccgccgcggcgagaagggcatcaaccaggactgctccatcgtctgcgagggattcgggtgcgaggaggggagcgtgttgtgcggcatcttcgacgggcacgggcagtggggccactacgtggcgaaggcggtgagggagtcgctgccgccggcgctgctccggcggtggcgggaggccgtgacgctggcggcgctcatcgacggcggcgagaagcggctctgcgagtgccggcccgacctgtggcgccagtcctacctggccgcctgcgccgccgtcgacgccgagctccgcgccagccgccgcctcgacgccgtccacagcggctgcaccgcgctgtccctcgtcaagcacggcgacctcctcgtcgtcgccaacgtcggcgactcgcgcgccgtcctggccaccgcctcccccgacgacggtggcggcgcccgcctcgccgccgtgcagctcaccgtcgacttcaagcccaacctgccccaggagagggagaggatcatggagtgcaacgggagggtgcagtgcctcgccgacgagcccggggtgcaccgggtgtggcggccggacagggagggcccaggcctcgccatgtcgcgcgccttcggcgactactgcgtcaaggattacggcgtcatctcggcgccggaggtgacgcaccgccggatcaccgcccaggaccacttcgtcatcctcgccaccgacggggtgtgggacgtggtgtcgaacgaggaggcggtgcagatcgtggcgtcggcgccggagagggagaaggcggcgaagcggctcgtcgagttcgccgtccgggcatggaggcgcaagcgccggggcatcgccgtcgacgactgctcggcgatctgcctcttcttccactcgccgccgtcctaaacaacacacacgctgacacgcacgcagccaacaaaaaccgcacacgccgacgacaatgtcgccgtcgtcgttgagaggcgccacaaaaaaaaaaaaaa

SEQ ID NO: 25787 - DNA, 114 bp, Oryza sativa
  Clone ID: PAT_MRT4530_3063C.1
gggaaaccaccccaaatcatgcaaagggaaagggacaaaaccccttgtatggggcccacccctaaagacaagcaaaataaattcgggaaaaagaagggcccgcgccctaaaaag

SEQ ID NO: 25788 - DNA, 760 bp, Oryza sativa
  unsure (1)..(760): unsure at all n locations
  Clone ID: PAT_MRT4530_30640C.1
gtcgcatcgcaccctcatctccgtttccgccgctcatccatcgctccnncatccgcacgctcacacacacacacacgcccacatcncacgcttcgcaacctcacncgccacaacagcgcagctccccctcatccacgccccgcgccacaacaaaacacaattccgcggncctccaaaacacaacacaacacacgctcattaattgcgntacgcctccacactctcgcacgccacaccacctcctgcgcgccacacacaacancatccccacgccgcgcatccccgcctccttcgcaccatcgctaacctgagncgccttcaccgcactcaaccgccagctacgccacgccacacaccacgcgccccaccacgcacgcccccacacacactcgcaatcccacacaccgcacgcgcgacgcaacgcaatccccctcanccaattgggtgcacacgcanactgcgcccctctccacacttcggtttgaaacaccngaaccttctgnacaccacaccacgccacacgcaacacacgccancacacgccaccacacgcactccccaataaatctacacccaaaggtttccacaataaccacgctggaaaccgcacacgcccncaacatttctttcctcgcactgggaacccgattggaggagaactcttgcaccatccggtgagaataacttgaaatctgtttgcgatcatccccccgtcccaagaaacagtgttatgtagagtcccatcctaaccatccaatga

SEQ ID NO: 25789 - DNA, 748 bp, Oryza sativa
  Clone ID: PAT_MRT4530_30641C.1
atgcgcctggctggtgggtcccacgcgggaggcgcggtcagcgcgtgtgcaacgcgcatgcgcacgcggctggctcggctcggccaggcttgggccgggcggctgggccgaggaaggccgggaggaggagaggagggagaggaggcccgggagagaaagggagggggagggagccgggccgaggggagaggaggggaagactttgggctagactcggcccaaaggaggaaggagattatttttagcgtgcggctgccggcggcgggagccgtggcggcgtgcggcgcggccgtggcgtgcagcagcgtgcggcgcggcggcggcgacagcgaccggggggcccaggaggcagccaggcaggaggctgctccaggccgtcagccgagcaggagcaggcgctgcacagctgcagcctgcaagtcggcgtccgccgttccgcgccgaggcccgaggcagccggcggctgcgcgctgccgctgcggccgtgcggcatcctgctcgccggcgactgcctgacctgcaaattccggataagcacattagcacagacaaggacatcatcaattatttccaaaatatcaagcgtcgaaaagttaatatctaaattgtaagttttcttcctaacttattattctctatcatttttgtattccatattttgacactttgatatgtttggtattagtatttctataagttaaacaatttctagtgatgatcaattctatcactgtgtgaactaatgatc

SEQ ID NO: 25790 - DNA, 157 bp, Oryza sativa
  Clone ID: PAT_MRT4530_30642C.1
gcgcgggggtttggcgatccgcgtgatgtggggtgcgcgccgtcggatcgagatgggagggaacggcaaggcggccagcggcggagcaggggcggcggcggcgggagagggggagagagacggctggcacgatggcgagctcagcggcggagagtag

SEQ ID NO: 25791 - DNA, 649 bp, Oryza sativa
  Clone ID: PAT_MRT4530_30643C.1
cggacgcgtgggcggacgcgtgggcggacgcgtgggcgcaaccctcatctgtcgacccttgccgattgcctcggcaaccagcaggagaatgctcgacacagatgcctcccaactcccatgtggtcgcgtcgttgtcggccggctcggcacgctgaccgcgtccatcagcggtaccaccgcctcccccgcccgcgctgctcctcccactttcaacgccgtcgccgcaggtgcagaagaagccaccgtcggatgctgccatcttcgagaggatgccgacatgagtccggtgacgagacgcacagcccttatgcgttcgtgggcgcggcgggagaacggcagaggcgggtgcgtcgtggccggcagagaaggcgtggagcgcagcggtggatagtgcggtggcggggccgagggtggcgaggccgaggatggcgaggacgcggccgtttctcgtggcccgttttcttcctcccgacggccaaccttccacggcggcctcgatctccgccgccgccgctgctccggcccttgcacgcacgccgccgtcgccgctttggccctggcgcgcacgccgctgtcgccgctccagtgccactcccgggtctttgccactcgcgggccactgcaccgccaccgccggcaacgacaccat

SEQ ID NO: 25792 - DNA, 368 bp, Oryza sativa
  Clone ID: PAT_MRT4530_30644C.1
atatttctctgaaagaagttggctatccctctaatcccccagattgcttaatctggccttttgacaaaaagaatcttttctctacgaagtctatgtacagactgatgaagtttgggggtgttgttgataaggatatgcaggaaatttaggggagcaaggtccctctgaaaatcaagcattttctgtttttagctgggaggggaagaatcccctgtgctgatcttttatttagcagaaattggaaggggggtgatagagtactcttaagagaaagagagcgcgtggagctgaacgtctggcttgagaagctgaagcaaaagatgaaggagctgcgaccgggagatgttttacctgataatgctttggtt

SEQ ID NO: 25793 - DNA, 321 bp, Oryza sativa
  Clone ID: PAT_MRT4530_30645C.1
atgggcaggagatacaccaagaaatcgtctctgatgatacctctcctgcttatcatccttgtcgtcgccgctgcatccactactgttgcgaggtcggcgtgggtgggggactacgcgtcgaaccacgggtgcggggagacggcggcggcggagctgtgcgatccccgcgacccggcggcgaaccgcgcgtgcgacgacgcctgccactacaacggctgcaggggcggccgctgcatactactctaccgagggcacctggacggcggcgacggcggcggcggcggccgccgaggcatcggccggggttgccactgccgttga

SEQ ID NO: 25794 - DNA, 624 bp, Oryza sativa
  Clone ID: PAT_MRT4530_30646C.1
ggcttggggaaggtcccctcctccaaaacctccttttcccttcctcctttaataaaggtgagccatcaaccaaaattggtatgttgcaaggatgttatgggggcctgataatgggggtttttcttttaagaaggaatctgaacaatcagaatttcgaacttttgtctaaattaaaagagatgctgagtggggtagaccttaataaatcctcagattgtttaatctggccttttgacaaaaagaagcttttctctacgaagtctatgtacagattgatgaagtttgggggtgttgttgataaggatatgcaggaaatttgggggagcaaggtccctctgaaaatcaagcattttctgtttttagctgggagggaaaggatcccctgtgctgatcttttagttagcagaaaatggaaaggggtggtttacagatcaattgctctggcgaatcggtggaaggtactcttaagagaaagagagcgcgtggagctgaacgtctggcttgagaagctgaatcaaaagatgaaggagctgcgactgggagatgttttacctgattttagagcctcatgggtgctggcatccccagtctgttttgtgtcgttttggctttcgttttattttt

SEQ ID NO: 25795 - DNA, 1644 bp, Oryza sativa
  Clone ID: PAT_MRT4530_30647C.1
acctaggtcacaaggacgggcggcggccggcctagcgcgctcacacgcaacggtttcccgtcctccatggccacgcccggcgtcaccggtgccgttgtctaggacagcgccgtcgtcctcgccaagttccttgagcgtgccgtcaagtcggtacgccttgctctccgagacgcgcgggcgctcgagctgggagtaggttgcggccttgctggctgcgttgctaccctttttggagtccacgtcctgctcactgccctccctgaccgcctcaagctcctcgctgttctccggttttaaagattgcttatccaggccttgtactgtggcaagcgaacaataagcacatccttgatttctggggtggattttctcggccgcctccacatcgtcgtcctcaacatccatctcctcgtcacggcggatggtggcggcaacctcaccgtcttcgtcgtctttaactatgtcgtcgtgtcctcaaggaccttgctcttgtcgacggcggcgacgtcaatccacaacaccgtgtgtacaagagggcttgatgatggcgacggaagcaggcagggcgccgccccttctccccgccggccgccgccggtcccggtgcagattgggaggaaagggaagagaggagaggagaggagagagagaggagagtactatttactggcatgccgtcttctagctcagtgtgtcgtgtatgggcttcattgttggcaagtcctactggtgcggtattcgcaagtcctactgtcatacagcagtaacaacaccgagaaagctatttgggctgtgtttagttccactctcacgctgcgtgacgaaagggacaaacgcgcgctcgacttggccgtgtcgtatcctttctccaccaggaccaaccaccacgtgccccttctggttgcggcggctgctggccaggtgcggtcgccctatccgattcacgcgatgaccaagctagctgccgtgttcgtgtgggtacagtatcttggaagacaagggagaaaggttataatcatgctcctgttgtctgtctggagcaagcacggccttgagcatcattggcgcgacgttaatcatgcatccaccaatggctacggatcaccttttgcaaaatcctcccatcctcgaatgatgatgatcttctgcctcctttgtgttcccgtcaagacttttggctacgatcatgcatacagccgatgcaaccaccgtgacgccgccgcgcgcccactggaacacgttgcgttgcagctggccgatcggtctcggagtcggagcgcaccactgacccccgtgtggccgtgtcccggtgccttttccacgcccaccgttgctagctaccgagccccccacctgctcgaacggcagaccgccacaccgcacgcgaaggctttgaaagcccccgccgcgtttggccattacccggcgccctacagcgacggacggacggacggcgtcacggcggccgaaatgaccaaaatcgagcacacagggaaagcgccgagaagaatagtggacatgggacgggagccggagatggaggaagcacgggagaatgggggcgtcggcggctctgtgctgcctctggcctcgctcatctctccaactgggaacgaggtgctcgtcccgttcatgctttgtttc

SEQ ID NO: 25796 - DNA, 189 bp, Oryza sativa
  Clone ID: PAT_MRT4530_30648C.1
atggattcgcttgagggaggtggtatactggggaagcagtcggaatcggcgatcctggcgacgctgggtccgaaatgtgaaaccctgcctccagcttctcgccgcttgcagccgccctccatcgccaacgggggagagggacgacgcaccacggggccgagccatcctcttcaacacttcaaaccatga

SEQ ID NO: 25797 - DNA, 2063 bp, Oryza sativa
  Clone ID: PAT_MRT4530_30649C.1
tggatccccgggctgaggaatcggcacgaggccgtctcccgccttcgtcctcccctccagccgccgaccgaccgagcgcgatggcggcggcgcggctccggctgctgtccgcggggctcctctcgccggcggtgtccagggcgcggcactcttcttccctgcagggtctccgcgcgctgtccacgctctccactacgctcgggtccggcgcgggggaggacgagatcgagcgcatccgccgcgagttcgaggacgccaagcggaactacctcagcatccccgtcgccatcaaggacatggccaagatgaacccgcaaggcatttatgtgaacaagaacgtcaaactggatgacctgcaagtctatggttttgactatgactacacgctgtcccactactccgagcacctgcagtgcttgatctacgatctcgccaagaagcacttggtcaatgagttgaagtatccggagagctgcttgaagtatgagtatgaccacggctttcccatcagggggctctattatgacagattaaaaggttgccttttgaagcttgattttttcgggtctatcgaaccagatggttgcttctttgggcggcataagctgagtttgagtgagataaaagaactctatggcacacggcatattggcagagatcaagctcgccagcttgttgggctaatggatgtcttctgttttagtgaggcatgccttcttgctgatatagttcagcactttgtagatgccaggctggagtttgatgcatcctatgtatatgaagacgtaaaccaatcgattcagcatgtccacagaagtggtctgattcacaggaaaattctttcggagcctcagaaatatctgataaaaaatgatgagcattttgatgggaattcctggagggagctctttgacgttgtcattgcgcaggcaaataaaccgactttctataattcagaccacccattcagggtatatgacactcaaaaggatacactagcttttactgcagttgacaagtttctgccaaatgaagtttattatcacggttgcttaaaatcatttctgcagattacaaagtggagaggcccagaggttatatactttggtgatcatcttctcagtgacttgagagggcctgcaaaagctggctggcgaacagctgctgtaattcgtgaacttgaggatgaaatagaaatccagaatggtgacagctaccggttccaacaggttgctttaactagtcttacactgcaggcaaaattaagtataatacatgatctacttgggaaagttcatgcaactgtggttagcactgagaaaggacaagtttaccgagcattgcttgatgagttgaatgcagaaaggcgtcaatgtcgatctgcgatgcgagatcttttcaatagctcttttggtgcaaccttccttacagatactggaagggaatcatcgtttgcttatcacatccatcaatatgcagatatttacaccagcaagcttgagaattttttgtcatatgcccctgaatcatggctccatccacctcatgacataaagataatgccacataatgcgaaggtagcttatatttcctcccatatgtggtcccagcgagtttgttcagtggctcgtagctcattctatccatttccgatggagaaccgtaacacccattatggtttctgtgtccgacccgagagtatgaactgccatgccactgcatctgtgaatgttagatggtatgccaaaaaactagtccacgctatcctgtggggacatgatagctttctcatcctcatccacccgtattctcatacacccgatcgctctgcctccgtcgccatccttcttctcgcaggtgccggtctctctctctctcgggagaaggttgagaaggtggagacgaagccagtcgagaggaaggggtcatcgtcgtcgtctcccacggccgaggaggatgacgacggcgcggcctcggtatcagtcgtgatacctcagtatcaggcctggtacccacaagtatcaggcatggtacctaggtaccagtcggtactaaggtactag

SEQ ID NO: 25798 - DNA, 2434 bp, Oryza sativa
  Clone ID: PAT_MRT4530_3064C.1
ttgggcgcctacgttttcaccgaccggctcgcattggccgccgccgactggtgtcctcgcctgcacggttggcctattatgccgccgttgttgggcgcttacgtcttcaccgaccggctcgccttcaccgccgccgactggtgtcctcgcctgcacggctggcctattatgccgccgttgttgggcgtctacgtcttcaccgaccggctcgccttcgtcgccgccgactggtgccttcgcctgcacggctggcctattatgccgccgttgttgggcgtctacgtcttcaccgaccggcttgccttcgtcgccgccgactggtgtccacgcctgcacggctggcctattatgccgccgctgttgggcgtctacgtcttcaccgaccggcttgccttcgtcgccgccgactggtgtttccgcctgcacggctggcctattatgccgccgttgttgggcgtctacgtcttcaccgaccggcttgccttcgtcgccgccgactggtgtccacgcctgcacggctggcctattatgccgccgctgttgggcgtctacgtcttcaccgccggcctgcctccgtcgccgccgactggtgtcatcgcctatacggttggtcggtcacaccaccgttcatgggcgtccatgtcttcaccgaccggctggccttcgtccgccgccgactggtgcttccgcctgcacggctggcctattatgctgccgttgttgggcgtctacgtcttcaccgaccggcttgccttcgccgccgccgactggtgtttccgcctgcacggctggcctttatgccgccgttgttgggcgtctacgtcttcaccgaccggcttgccttcaccgctgccgactggtgtttccgcttacacggctggcctattatgccgccgttagtgggcatcttcgctttcaccgtcgaccgccttcgtcgccgccgactggtgtcttcattgttattgatggacgactttgttcccacgaatggatcagtcagaacatcaccaccggctcgccgtcgtcgccgccgactggtgtcttcgcctatacggttggttggtcacaacaccgttgtcaggcgtctacattttcaccgaccggccgccacgtccgccaccgactggtgtttccgcctgcacgctggcctattatgccaccgttgttgggcgtctacgactccaccaccggcctgcctccatcgccgccgactggtgtttccgcctgcacgctggcctattatgccaccgttgatgggcgtctacgactccaccaccggcctgcctccatcgccgccgactggtgtttccgcctgcacgctggcctattatgccaccgttgatgggcgtctacgtcttcaccgaccggcttgccttcgccgccgccgactggtgtcttcgcctgcacggctggcctattatgccgccgctgttgggcgcctacgtcttcaccgaccggctcgccttcgccgccgccgactggtgtcctcgcctgcacggctggcctattatgccgccgttgttgggcgcctacgtcttcaccgaccggctcgccttcgccgccgccgactggtgtcctcgcctgcacggctggcctattatgccgccgttgttgggcgcctacgtcttcaccgaccggctcgccttcgccgccgccgactggtgtcctcgcctgcacggctggcctattatgccgccgttgttgggcgcctacgtcttcaccgaccggctcgccgcatccgccgctgactggtgtcaccgcctgaacggctggcctgttataacgccaactgatgctaccttcttcacggctggctacatcgctgtcactactaataggcatcagtatcgtcaacacaagctgcctacgtttgccatggctgccgactggtttcttcacttccatggctgcatgattctgccagtgttgattggccttatcttcttcaccgacggtcgtctcgtctgctgctgactagtgccctcacctctacgtctggtttatacagctaccactactgatggacatcatcgtcttccgttgccgactggttatgccgacgccgactagtgcttttatcttcacaactgcgcgtcttcgctaccagtttgcttctgttgccgccgactcgtgttcacttcatcacggcgaatgcaactttgtcataatggtggagcgacttcatctttattatcttcggcactggcaaactctattgctgctacttcgcaagttttactacttcaccaaccacgacgtctttgtgaacctcgacatctcggcatgcaatgccatgatattttactacaaccagtgactcttcaatattcaggatttctacttggacaccttcagcacatatcttcaatcaagcaatgactactcgacgacaagaagctataattctggactatatgttcagttgtttcccaac

SEQ ID NO: 25799 - DNA, 325 bp, Oryza sativa
  Clone ID: PAT_MRT4530_30650C.1
tttttgggtttttctgatagaaatgagtatagtcagtcactgtttttttcatgcaaattatgtgtaaaaggattgagaacaaacagtatcaagacctaaaaaggtttaaatggatacaaaattcaagaaataagaaaaacttttttgcatcttggaatatactgcttttgttattgatccagccactgatcttttcatttgtccatcagaatccagttactaacatgagccactgatccacctgattgagtaaaggatatatatgcttcctctctacaaaatgatgggcaaatctcctacgtaatcgagaacaaaaaagggattt

SEQ ID NO: 25800 - DNA, 525 bp, Oryza sativa
  Clone ID: PAT_MRT4530_30651C.1
ggactaaatttgtttagtagtggtagtgctacatataactgctaaatcaacttaaaaaccaaaatatcaattctaacaaatatatggaacaatattaaatttatacgagtcccatactacaaatgatccatccatgagaatatttttcataattagtgatcttcctaagtacacaaacacaccacgattatatcatccctcttgatttaatttacttgtagcagagactaattaatagaagcccacagtactatgaaagctatgttcgcaaatggccaaaaggaatccgggcgctccacctcgggttgaaaggcctgtgataaattattttctagcagtgtaatagttattctaagaatctcatagatatatagggatttgtgtatttctttcttatcaaatactaccaactatatgattacgatattaaaatctcttatagttcagttttttaatccacagaatcaccaaaattatatgatccatggtattaggtggtaggactacctattcatccttcggcaa

SEQ ID NO: 25801 - DNA, 483 bp, Oryza sativa
  Clone ID: PAT_MRT4530_30652C.1
gggccaaaggggaaatcccaaaaaaaaaaggggcccaaaaaaaaaggggggggaaaaaaaaaaaaccccccttaaagggttcccccgggcaaaaaaaaaaaaaaaaaagggggggccccaaaaaaccccgggggaaaatcccccccgggggcaaaaaaacagggccccaaaaggggggggggaaaaaaaagaaaacccctccccccccaaaaaaaaggggacccctttggaaaaaatcccttttgggcccaaacgttcccccccccccggggggacccccccacctgacccaagaagttccccttggaacgaaccaaaagggcctttggggcggcccccaagttttgggggcccccccgccttgttttaaaaccccttttttggaaaccccgggcgtaaaaaaaaaacccccccccggggttggggttttgggccaccgggtcaaggttaagggttgcccccccccaaaatgcccccccaaaa

SEQ ID NO: 25802 - DNA, 3717 bp, Oryza sativa
  Clone ID: PAT_MRT4530_30653C.1
atggctcaggagtaccagacaatgccttcttctgctcacgacaagaggtactcaggactgtcgaatggtggtgacaaagaacaattgccatctcaaggtgtttgtgtcactctttcatgtttaacggttggaaaatcagaagttcctttgactactagatttgatgggaatgcaatgcaagtagatggactcctaaaaaatgtttctcccacaactaagattgtggtgaaaccaaatgaggagttgaagtcaccgttcttggtaaagcgccacctatttcttaagaggcctgatcctattatactagacgaattgtacagcttgactacaaaagtaaccgatgaagagtccagacagtctgtttgggtatcaggcaacctgccgatcaatttaaagcttgtagatatccaggaaacaataaaacctgaaggagtcatgggtataaattgcatggacttggctgttagaattatgtcaagacaggatgctgaaatttttaaaaacacaaaatgtctaggttggaggcattatgttgattcaaattggaagcaatatatcaatgatcccaacaatctgaggaacgagtattcccgtttgtctactatgtatgatccttcaggttcacatctggtattaatccctgtatcatctgatggccactggactctatatgctttcaacatgcatgataagaagctctgcattctggattctcgacgagataccagtgaaggcggtgatcaggatccagtgaagcgtcatgagaaaatccgaaaagaagtctgccatgctcttaacgaaaccatggatgttgatttcaattttctctcttggaagcatgagtttcccaaagtgcctaggcaacagaacagttgtgactgtggattctttgtattcaattttatgcgattatgggatggtcatcgactgattcggtggttttcaactgaaacaaaggagttgcggaagaactttctagcatacatactctccagtttggatgatcattcagtcctgcctactaatgtctctgagttgatcaaaaagctccctggggaaacaatgatgaatgttgagctattagaagctgcacgggcaggcaacgcaaatgcattttgtgaacttgttatagatcctgcaagaagtattaatcatgagcccttcagatctgcctcctgttcttgtcttctttttcggagcacatcatctggcagctattgtctctgttttgagtgcacatcctcacgcaattccgatcaagaaaagagtccaaacaagcataatgcattaacacgatcagatgcaccatcaacatttacgagagatacaagggacatgctacatgctattcagggtgtaacggttgaaggtgacggggtgctccacatcgctgcaagctttggtgttttggaacctgtgaaaaccgtcttggaagcgcagaatggagctttcgcaacggcgcttctgcaagcagagaacaacaaaggagacaggcccctgcactgcgcagccaccacagggagtatagttactgtcaaactcatcgttgatgaagctgagaaaattatgcgggcccaatccgatacctttgcctggtttctgcgtgcgaaaaatctcgatggccagacgtgcttgcacgaggctgtgcgccacggtcacgaagatgttgtgaaatatttggtttcgaaagatgcagatttgggggatgtcccgttgccgctggtgcagatagtggacaacgagggcacttctccgctctacttggcgaccacattacgcagagacagcattgttaaggtgctcacagaagcagcgccatcaggcatgcctagagccgcgtcctattctgggcctgcagggaaaacagctttacatgctgctgttctcttcagtgaagaactgagtagaacactggtgaattggaaccatagtctcattaagatccgggatgaatctgggagcaccccgcttcactatttggcagacgggaagtatactactgaacccagttgcatttctgttactgaacttctccttaagaaggatccatcgtcaggctactgtgaagattcagagggctcattgcccattcacattgctgctgcaaatggcacgcttggcatcattgatcagctgataaaattgtgtcctggctgtgagtcatcatgcaatgcttctggccagacaatcctccacatcgctgtccaaacggaaagccatgatgtggtgcgatttgtttgttcgaatgaaatgttcaaaatggttctgaatatgaaggattacgatgggaatacagcactccatttggctgtacagaagggacataacaagacctttggcattttgatgggatgcaagaatgtctctttaagtatcagaaacagaaatgggtatacgcctcttgatcatgccgtactgaacaaaacaagcggactgacgtatgccacatattggccaggtcaccagcgatgggtatgcaatagtttgctcgctgctggagctgattttggtactttccgtgcggaccatttgtccagcaagatcccagaacaagccaaggctgacagggaagcattctccgacacactgagcaaatctgccgcggtcatggccacatgcgcggctctgcttttcaatgcggcgcttaacatctttctgaatgtgcaagccatctaccacaacaataacaccagcaccaacaacaacaatgcaactcaaggaagcgatcagctcaagcaaattcagaaagttaagaaactcagtggagactcactgagcatctctgcatgtgccatccttttatttgcgattgctggatttcccatcttgcccggtgtcataggacgcacctttgctcttatcttgggactaggggtgctcattgggtcgtccatgattagcctgcaggcgttagcagcacggcttgatctagccaaggtttatggcacaggaatcggtgccttctgcgttatattttcgctgttgtgcgtaacgctgtgcaccaaccttttgcggaagatagtgcagcacgcgcgtccgctgtgggataggtgtggtgcccgtggattcttccgtagcattctgaatgtgcgcagagctcaaaactactctgccatcccgttgttgcaggttgttaatttgaaaacagtagaggagataactgaatgggagttgagaggagggaagggaaatggcagtacacgcatatggcgggatgagcctttttttttccttaatggagaagtggaaggaaagcgtatgtacacaaatggtctgatgggtggggagcagtggggatctagtaggttgatgggctttctaggcccgaatgccgtactattaagagggatcaacgccgaggtgtttgttgttggcctctatcggctagcacgacttgatctagccaaggtttatggcacaggaattggtgccttctgcgttatattttcactgttgtgcgtaacgttgtgcaccaacctattgcggaagatagtgcagcacgcgcgtccactgtgggctaggtgtggtgcccatggattcttctgtagcattctgaatgtgcgcagagctcagaactactctgccatcccgttgttgcaggttgtgatatctgtgcccagaaacggttgttttgtcttattgtgtgcagatggcttgaggtcagccttggttaatggtgaggaccgggactatgctcagagaggagtagaggtctag

SEQ ID NO: 25803 - DNA, 295 bp, Oryza sativa
  Clone ID: PAT_MRT4530_30654C.1
attgccgccactggccgatctcctcttccacagctctgcaagccaagtccttgcgccatcatgtttgcctcgactggttcttatttaagtcctcgcgcaggaggcaaatttatgccgcgaagggcaatattgtgatatttaccgaggcgcagatctctctaaagaccccgggaacgccataactcctctcactgctgataatgttacgttcagagcgtatggggattatagttcatggaacagttgatacagttaaatatgtcggtttctgaatcattagttttgggacccaaca

SEQ ID NO: 25804 - DNA, 551 bp, Oryza sativa
  unsure (1)..(551): unsure at all n locations
  Clone ID: PAT_MRT4530_30655C.1
aaaattacagcgttgaaacagaaaccgatctcgtcgctgattctcttttcttcggatccttctagataatggctcgatctttctctcgttcactttctctatccaaaggccgtttcgccgccgcgtcatcctctctcctcccttcgtcgcaccttgtttcattccgatctcaatcttccgatcgtcggggagatctgtacgagattgatacctccgcggcttctcaatcgccgtcggatcctttaatacagaagctagaagacgccgttcaccggatttttgtgcgccgagctcagcctgattggctcccttttgttcctggtgcgtcttattgggtccctcctcctggatctggatctcagtctcatggaatcgctcagctcgttgtgaaactcgcgaatccgttaacacacgaagaatctttatctaccaattcttctcatggatggccttcctccgattatttccttaaaggttcttatgggtcattctctctctgggtntttatgggataagctgggattggaatctcaatatgttactcatgcttt

SEQ ID NO: 25805 - DNA, 592 bp, Oryza sativa
  Clone ID: PAT_MRT4530_30656C.1
tccccgggcgcggggatccccccggcggcgggggggaacgcacgaccttaataatgcatgcgtaactgttctcccgtctcgacctcaagagagctcagcctaaggcgggcagcagctaagccagaggccgggatggagctctgcgccgtcttcttctcctcggtcttctccctcctcctcctcctcctcctctcagcagccaatgacgtcgtcgtgtcggcggcgacgtcgccgccgctcaagttcgggatcaactacggccagatcgcgaacaacctgccgcacccgacgcaggtgtccggcctcctccagtcgctgagcgtcaaccgggtgaagctctacgacgccgacccggccgtcctcgccgccttcgccggcaccggcgtggagttcatcgtcggcaacgaggacctccacaacctgaccgacgcgcgcaaggcccgggcgtgggtggcgcagcacgtgcagccgttcctcccggccacccgcatcacctgcgtcaccgtcggcaacgaggtgctctccggccaggacacggcggcgatgcagagcctcctcccgggcatgcagtccgtccaccaggcgctgctcg

SEQ ID NO: 25806 - DNA, 833 bp, Oryza sativa
  Clone ID: PAT_MRT4530_30657C.1
catatatacaatataattggtcgtttaaagcaaacaagttataaattgtgatacccctgttaactggtcagtgttagaagcttagacttaacattgcactgtaaccgtttctgcgttaaagattttggcctcaaaccactgatggcctctctctccccctccctccctctctctggggtacttgtattacctatacttggttgcttggattggtccccctctttttttttgacaaattgatccttttcaaaagcttacttcgaaattagaccatgcaaaaaactttaaccaaaatggtggcatgctctattgtatcaaatgctttttcaaagtctagtttgagaatcaagatctcccatttcatttttgactgttggcactgatggatatactcaaatgaacatgcaagatagtcatgaattgttctccctttgacaaaaccgcaaaaccatatcgtttttcacgtattattttcttaattaccccttataatccgttagccatcagcttagtcagaatcttcaaactaatactcataagagatattggtgtgaagtcattaacaccttcagggttaacttttttagggacaagggtgatgaaggaagaattaatacactgtagatcaacattcttatcatgaaaatgggaaactagcctgtaaaaatcttgagctattattggccaacattccttgataaaacatccattgaacccatcttgctcaggtgctttatcaattgggagtctcctgacaagatcatcaattcccgtgaataaaaaaatatccccaaactatccagattttaaaattcagccaaatcaaaggtcat

SEQ ID NO: 25807 - DNA, 1161 bp, Oryza sativa
  Clone ID: PAT_MRT4530_30658C.1
gtcctttttttttttttttacaaataaaatcctctgttaccaatctaattgccaacaatattaaggaaacaatgtcgtattgcgaatacattagtataggctgaaaccgaagaactgcccaactagaagagctattcccatgcatattgctacaagtgaagccgcccaggtcagtttctctgttatcctagggaccttttctttcaaggcctcactacaagaacctacaaaagcagtgtaactccccatcgaaaatacagtccccatcaaaaacatgccaagaaatgctgcaccagcgaagcgtgagggaagggccaatgaaggcaacaccatcagtagagcatctggttggagaccatgaacaactccagtggcaaatgttgcaaaaccaactttcttcttcctgggagcagcaggggtttgtaaaggctcactgctggttatgttgcagtccacgccttccagggcgagcgacgattcctgaacctctgtagcttctcggatgcccatacctcctatgattagaagggtcagaccaaccactcttgttccccatgtccggagaatctcaatgtgcaatcgatccttgagtaataagaatagcaggccaaaaataacttgtcctgcatcatgaccacaaccccaaagggcaccgaccagtccactttccagtcttgatcttccaatcgacagtggtgccaaagcaacgagatggtcaggcccagacaaggtatgcaagcatccagcaatgaaaccagcccaaccactgcttagtatctctgatgtaaatagtccaccagttttggttattgattgcactgatgcatgggcaggataaggaatgctagattgcagggtgccggtaacaagcgccaccaataggaaaagagcagctctggaagccttggggagcagactccacagcaacttccacggaggtccaaccgccgccgccggagcggcctcccgcggcggggccgacacaccatcgtgcggccgcgccgcgatcggcccgagacgcggctgcgcccgtagcctccccgcccacggctcgacgccgccgccgccgccgagacccgcgacggcgaggcggcgggatggggatccgccccccggcagagggatccgggcggcgacggacttggagatcagccgctccat

SEQ ID NO: 25808 - DNA, 231 bp, Oryza sativa
  Clone ID: PAT_MRT4530_30659C.1
atggagatggaggacatcgaggatgtgctggggccatctaggctcaccggcggcggggcgcctccgggactccgtctcccactcaccgttgtcgccatgaagcccaagcatctgagatcatctagggtcacgcagacccggccgcagcccgaggcctggatcctcaggatgcagttggcgcggagggagtggggggtcgatgacgacagcgacgagaaggcgacccagtag

SEQ ID NO: 25809 - DNA, 1914 bp, Oryza sativa
  unsure (1)..(1914): unsure at all n locations
  Clone ID: PAT_MRT4530_3065C.1
gcactcactagaagtctagaacacacaacagcccaaccacccaataatcccgaaagatgctggtcatggactcgaggcgtctcagctttccggtcgatcggccgcgagtccactccgccggcttgtcctcgccaccgccattgctgatagcaacaacgacttcaccgtcggccaccaccgttgatgggcatcgtcatctacgccgccggtctgcctccgtcgccgccgactggtgtccccgcctatacggtcggttggtcacaccaccgttgatgggcatcgtcatctacaccgccggcctgcctccgtcgccgccgactggtgtcctcgcctatacggtcggttggtcacaccaccgttgatgggcatcgtcatctacaccgccggcctgcctccgtcgccgccgactggtgtccccgcctatacggtcggttggtcacaccaccgttcatgggcgtccacgacttcaccgccggcctgcctccgtcgccgcagactggtgcctccgcctacacggctggcctattatgccgccgctgttgggcgtctacgacttcaccgccggcctgcctccgtcgccgccgactggtgtccccgcctatacggttggttggtcacaccaccgttcatgggcgtctacgacttcaccgccggcttgcctccgtcgccgccgagtggtgcctccgcctacacggctggcctattatgccgccgctgttgggcgtctacgacttcaccgaccggccgcttcgtccgccgccgactggtgtctctgcctgcacggctggcttattatgccgccgctgttgggcgtctacgacttcatcgccggcctgcctctgtcgccgcagagtggtgcctccgcctacacggctggcctattatgctgccgttgttggatgcctacatcctcaccgttggctcaccttcgttgccgtcgactggtgtttccgcttacacggctgacctattatgccgccattagtgggcatcttcgctttcaccgtcgaccgccttcgtcgccgccgactggtgtcttcattgttattgatggacgactttgttcccacattggccacttctgccatcaccaaggggaatattacaaagctaagatccagatccagatatgcataaaagggattcatggctttaagcttatctcttacgctccaggaatggatcagtcagaacatcaccaccggctcgcctcgaccgccgccgactggtgtttccgcctgcacggctggcctttatgccgccgttgttgggcgtctacgtcttcaccgaccggcttgccttcgccgccgccgactggtgtttccgcttgcacggctggcctattatgccgccgttgttgggcgcctacgtcttcaccgaccggcttgccttcgccgccgccgaccgatgtccccgcctgcacggctggcctttatgccgccgttgttgggcgtctacgtcttcaccgaccggcttgccttcgccgccgccgactggtgtttccgcctgcacggctggcctattatgccgccgttgttgggcgtctacgtcttcaccgaccggcttgccttcgccgccgccgactggtgtccccgcctgcacggctggcctttatgccgccgttgttgggcgtctacgtcttcaccgaccggcttgccttcgccgccgccgactggtgtttccgcttgcacggctggcctttatgccgccgttgttgggcgtctacgtcttcaccgaccggcttgccttcgccgccgccgactggtgtttccgcctgcacggctggcctttatgccgccgttgttgggcgtttacgtcttcaccgaccggccgcttcgtccgccgccgattggtgtttccgcctgcacggctggcctagtaaacagccgcccaccaaattaaaaaananccccc

SEQ ID NO: 25810 - DNA, 4025 bp, Oryza sativa
  Clone ID: PAT_MRT4530_30660C.1
atgtctttcgtgattagtctcacccttctcaccataatagaagatgctataactggtaataatttgattagctcctggtttggaatggtatattcctggtttggagatagaactgtgcagccgggatggttgttcagaatggttgggcctatgcaacaggtcaacttatgcaaagggctctggctcaagaaagccgggttaaggataataaaaaacttgttagatcatatgacaaaaagcctaatgttaatgtgattgattaccctgaggctagtgatagtgaggaggaaggtgatcatgatatatatgttgccgaatggtcatggactaataaaaacaagccttttgtttgctctaacctaatgccgactcctcgcaaagatcggcaaagtgaggttcaatcggccatagatgaaggacgattgaagttcaccgatggctccaagatgaagcttgatcatgatccttttctggtgaacacaattaatttcaatgataagaagaagtatgagaagcaaggtggtgagagggttcacaacaaaggaaaaagaccaagatcacctcctagggaacaatttggtcattcaccaagacggtcgcattcacctccatatcatcatccacaagacatgtcatggggttcttatccaatgcagccgccgggttatccttatccttattacatgccatggggggcaacgccgccaatgttcaatcatatgcctccaatgcaattcaaccaagggtggggaggatcaagaaggccaattcatgagcgtttgtcttcaccaaataatggccggttttatggcaggaaccgggccaatgaagaaaggagggaaggaaagcgcatcaaggtggaggcaaggacttcagaagtaattaccatcaaagtggggtctcatgatgtgccaataccttctggagatggaattggagtatcttcaaacaaaaaatccgaagccgaaaccagctcctcgcagtcggccggtctgaccaagccttctggccggtccgaccgcagccatgcggccggtctgaccgggccatcaggccggtctgaccgccgacccgacagcggtccgaccgacgcctcaggccagtctgaccgttcgccaagtgtcgatctgaccggcgcatctggtcggtctgaccggtggtctacggccggtctaaccgggctccagcgccggtttaacaggagaattgcaaagggcgatgtgagggcttcatcgttttcaaacaaaattattaggggacattatttacctcctggaacagagccgaatcctagatggatgcctaaggatttgacggctactcaaaagagaaggttgcaacgtcttcgggctcaagaaataagagagaaaaaggctgaagaacaaagagataaaagattcaatgagttgcgaccaccaccggtatggaggcataaatccatagagaaggaaaagccggttgatgtagaagagaaggagaaacaatcggttgataaaagtgaatcatctccaaaagaagacatggatatcaacatggtttgtatgttgcctatggagttttgtgctatggatgaagccgaggttgctcaactttcattaggtcctaaagatgcggtttttgagaagcccgatgaatcaaaccgtcatatgaagcctctctatctcaaaggccatgttgatgggaagccggtctctaggatgctagtggatggaggtgccaccgtgaatttgatgccgtactcattattcaagaaattggggcgtgaggatgatgagttgaagaagaccaacatgattctcaatggcttcaatggtgaaccaacggaggcaaagggtatcttttcggcggagctcaccgtgggaaacaagacgctaccaaccgctttcttcatcgtcgatgtgcaaggtatcgagctacttaaagagtatgttgattgctttgcatgggagtaccatgagatgccgggtcttagccgtgagcttgttgagcatcggcttccaattaaaccgggttttaggccttataagcaaccacctcgtcgttttaatcctttgctatatgaccgagtcaaagaggagattgatcggttgttgaaggtggggtttattaggccatgtcgttatgcggagtgggtttctagcatagtcccggtggagaagaaggggagtgccactcccaaagatgagtatcctatgcctatagccgacatgatgattaatgatgcctcgggtcataaggtgattagctttctagatggtaatgccggctacaataaaatctttatggcggaagaggatatgtacaagacggcttttaggtgtccgggatttgttggtttgtttgagtgggttgtcatgacttttgggttgaagaacgccggtgcaacgtatcaaagggcaatgaatttgatcttccatgatttgctaggcattatcttagagatctacattgatgatattgttgtcaaatcggatgtggaccatcatatagatattgcttatgagggagaagttggcttagttgaagttataccttggaagatttattttgatggttcttcttgcaaagaaggtcaaggcataggggtagttttgttttcacctaatagcatgtgttatgaagcatcggttcgtttggagtattattgtacaaataatcaagccgaatacaatgctttattgttcggcttacaagttatggagatggttggagctaaatacgtggaggcttttggtgattcggaattgatggtgcaacaagtcgccggagtctacaaatgcttggacagatcactaaataggtaccttgattcatgtttagatattattgccaattttgataattttgctattagacatattgctaggcatgataattctagagcaaataatttggcacaacaagcatctggctataatgtgaagaagggattatttctgatattagaagagccggtgcttgattttaaatctttgtgcgaaattggcaaaactggagaccaggggcggtctgaccggcattgctcggccagtctgaccggtgaccaggggcagtctgaccggccgcatgccgccggtctgaccggcgactctgagcggtctgaacggccctgtgtggccagtctgaccggttctgggcagagcgctggggggcacgtttcaatcaatatagtggccgaattaactgtgaattcggacatttgtgcccaggaagcagaaggagattggagaattcttttgattcgatatttgaaaaatcccacacttaaggttgatcggaaaattctgcggcaagcgttcaaatacacattgcttgatgaggatttataccgccgaaatatagatggtgtcttgttgaagtgcttagatgaagatcaatctaaagtggctatgggagaggctaatggacaagccgagtcgagtaataagacattgttgaagttagtgaaaaagaagattgaggaacacccaaagaggtggcatgaggtgctttctgaagcattgtgggcgcataggatatctaaacatggtgctactaaagtcactccttttgagttggtttatggtcaagaagccattttaccggtggaggtaaatcttggttctcttcgttatatcaagcaaaatgatttgtcaagtgaagattacaagacgttgatgggagataatcttgatgaagtcatcgacaagcgcttgaaggcattggaagagatagagaaagagaagaagagggtggccaaggcgtacaacaagagggtgaaagcaaagttgtttcaagttggagacttggtttggaagacaattttgcctttgggtactcggtccaaggagttcgacggtcccatgccccttgctcctgaatatgtaagacgtttaattgggccttcaaagcccattaggagtctgatgacgagaaacgcggcggcctgggagttcggcttagttccagtacaggtccaaaacgcttttagttttgaagcattatgcttcgacaagataattgggcccaatgagagtgttgattga

SEQ ID NO: 25811 - DNA, 4989 bp, Oryza sativa
  Clone ID: PAT_MRT4530_30661C.1
atgacgaagccatcatccaagacggaggtggagccatctcatgtgataccagtcacattagatgactttgaaggagaggatcgcaaagccatggaggagtatatcaacgagctcacacgggaggcgttgatgagagcaactactaggactcgtcaaggcgtgatcatcaagcccgggccacgtcctaagctcgctcccgacgtggtaagtaataatgaggtatcacaatctatcgaccaacaaattgcaaatacaatagattcatctatggctaattttaaagatagattagatatgatgtttaaggaaaaagttgatgggtttttaaggagtaggctaggttcttttatggatgattacacattaaaggataaagcctataccactgctgatcaacctcctgtagatccaatagggtctaaaaccgacggggcggtgttcacggccggtccgaccagccagatggccggtccgaccgggtattatcccgtcggtccgaccggccagatggccggtccgaccgggtattatcccaccggtcagaccggccctcaggccggtccgacagcgcaacctgacgccggtcagaccgcgccctggaccggtcagaccggcgcaattgtcccaatacaggggattgacccaatgactaatgctagttatttgtatcactttagaacatttgattcccctgtatctacaaccaccactagtcctcaaattcccccgcatattcctaatgtttacaatgatgtctctaggggatatcctcccgatactaggcaaggccaatataatcatattgcgtcgcaaacccaacctattaggccaccaaacccaccaccaaatccacaagggcctaataacatggaaaacatgatttgtgatattatgaggactaaattcgggatcgaaactaggaatcgtgctagagcttacaaaagaccatatccggattattatgataatgtgcagtttcctagaaattatagagttcccgaatttaccaaatttagtggtgaggatggtaagcccacatgggaacatgtaggtcaatttttagcgcaatgtggtgaggctaatagtgatacttttaaattgcgcttattttctttatctttatccggtaatgcttttacatggtttacttctttgccggcaaattctattcatacttgggctcaattagaagaacaatttcatgattatttctatactggagaaactgagcttaggttatgtgatttaacatcggttaagcaaaagtataatgaatctgttgttgattacattaagaggtttagagatgttagaaaccgatgttatactttgagtataactgatagagatttggccgggcttgcttttaatggtttagttgctcctcttagagagaaattagatggccaacaatttcttgatgttagtcaactcatgcaaagggctctggctcaagaaagccgggttaaagatgataaaaaatttgttagaccattcgacaaaaaacctaatgttaatgtagttgattactctgatgttagtgatagtgaggaggagggtgatcatgatatttatgttgccgaatggtcatggactaacaaaaataaaccttttgtttgctctaacttaatgccgactcctcgtaaagatcggcaaagtgaggttaagtatagttttgatgtggccaagtgtgataagatttttgattatcttttgcaagagaaacaaattagattacctaaaggccatgtcataccttctcaagaagaattgaaacgtcgagcatattgtaaatggcatgattctcattctcactctactaatgattgcaatgtgtttcaacgacaggttcaatcggccatagatgagggacgattgaaattcaccgatggctccaagatgaagcttgatcatgatccttttccagtaaatacaattaattttaatgataagaaggtgttgattcggtcggagcaagccgaatctactaaaggaaaggaagtggtcattggtaagccaaggcctaagatgatggtgccaaagaagccggaagttggtgtttggaaggaaaataaaagtggagcttcaacttccaaagcccctaggaagaccaaggtgacttttaatatgcttttggaaaagtatgagaagcaaggtgagaagagggaaggaaagcgcgtcaagatagaagagaggacttcggaggtgattaccatcaagatagggtcccatgatgtgcctataccttttggagatggagttggaaagtccccaaacaagaaatccgaagccggtaccagctcctcgcagtcggccggtctgaccaggccctctggccggtctgaccgcggccatgtagccggtctgatcgggccatcaagccggtctgaccgccgacctgacgacggtctgaccgatgcctcaggccggtccgaccgtgcgccacacgtcggtctgaccgacgcgtctggccggtctgaccggtggtctgcagccggtcagaccgggctccagcgtcggtttgatgagagggctgcaaagggcgatgtgagggcttcatcgtcttcaaacaaggttaatagaggatactatttgcctcctggaacagagccgaatcctgggtggatgcctaaggatttgacggctacacaaaagagaaggttgcaacgtcttcgagcccaaaaattaagggagaaaaaggccgaagaacaaagggataaaaggttcaatgagttgcgaccacctccggtatggaggcctaaatccatagagaaggcaaaaccgattgatgtagagaagaaggaagaacaatcggttgacgaaggtgaatcatctccaaaggaggacatggatatcaatatggtgtgtatgttgccaatggagttttgtgctatggatgaagccgaggttgcccaattctcattaggtcctaaagacgcggtttttgagaagcccgatgagtcaaaccgtcacatgaagcctctctatctcaaaggccatgttgatggaaaaccggtctctaggatgctagtggatggaggtgccgccgtgaacttgatgccgtattcgctattcaagaagttggggcgtgaggatgatgagttgaagaagaccaagatgattctcaatggcttcaatggtgaaccaacggaggcgagaggtatcttttcggcggagctcaccgtgggaaacaagacgctaccaaccgctttcttcatcgtcgatgtgcaagattttgatgaagtggagaagcttggacaaggatttacatcggccgatccattggaagaagtagatataggtgatggaactaaaccaaggccgacttttttaaacaaaaacatgaaagccgattataaggttaaggatggtatggaaggccatatagccgatttgagattggcttttgagaggatgcgccggtatggtttgaagatgaacccacttaaatgtgcttttggtgtgtcggcggggaagttcttaggattcatggtgcatgagagaggagttgagattgatcctaagaagatagaaaaaattcgtgatttcaaagcgccgagatgcaagaaagaggtccaaaagttgctagataaggtgaattatttgaggaggtttatttctaacctagcgggtaaaatcgatgcttttgttcctatacttcgcttgaaaaaggaagccgattttacttgggggacaaaacaacaagatgcgtttgaagagttgaagagatatttgtctactccacccgttgtgcgagcgcctaaagccggaaagccttttcggttatatattgcctccgaagacaaagtcattggtgccgttttgacgcaagaggaagatggcaaggaatatatcattacatatttgagccgccgtcttttagatgccgaaacaagacatattgctaggcatgataattctagagcaaatgacttagcacaacaagcatctggttataatgtgaagaagggattatttctgatattagaagagccggtgcttgattttaaatctttgtgcgaaattggtaaaattggagaccaggggcggtctgaccggcgttgcacggccggtctgaccggtgaccaggggcggtctgaccggccgcatgccgccggtctgaccggtgaccccgagcggtctgaccggccctgcgtggccggtctgaccggtgttgggcagaaagctggggggcacgcttcaatcaatttggaggccgaattaattgagaattcggacatttgtgcccagaatgcagaagaggattggagaattcctttgattcaatatctaaaagatcccacacttaaggggcataggttcgtgctagtcgctacggattacttcaccaagtgggccgaagccgtgcctttgaagaatatgactcatacggaggctaatggacaagccgagtcaagtaataagacattgttaaagctagtaaaaaagaagattgaggaacacccgaagaggtggcatgaggtgctttccgaagcattgtgggcacataggatatctaaacatggtgccactaaagtcactccttttgagttggtttatggtcaagaagccgttttaccggtggaggtaaatcttgattctcttcgttatatcaagcaagatgatttgtcaagtgaagattacaagacgttgatgggagacaaccttgatgaagtcattgacaagcgcttgaaggcattggacgagatagagaaagagaagaagagggtggccaaggcgtacaacaagagggtgaaagcaaaattgtttcaagttggagacttggtttggaagacaattttgccttcgggtactcgatccaaggagttcggtaagtggtctcctagttgggaaggtccttatcgaatatgtggcattgttcgagggaacgcatactttttggagacacttcagggggagcgttttcagcgagcaataaccgggaaatacttgaagaaatacttcccgagcgtttggcaagacgcttaa

SEQ ID NO: 25812 - DNA, 1146 bp, Oryza sativa
  Clone ID: PAT_MRT4530_30662C.1
atggcggcatcggcggcggctgcggcggcggtgagccaggcgctgagggaccgcgacgtcctcgacgccgtcggcacctccgccgccgcgctttcgctcgcgggctcttccttcatcgtgctctgctacctcctcttccgcgagctccgcaagttctccttcaagctcgtctacttcctcgcggtctcggtgagcggctcagatctggaactacttggttttggggggttctgggttcgggaggctagcctcgtgatctgcgtaactgcgttgggttgcgatttggaattggggagcgcaaagtggggatctgagggcagtgcggtgttcatttcgcctccgattgagaaatattgggggttcacgcctgaaccgtgtgaggatgtttatgtcatagacccttacttcaatgtggcaagtgatgtccctataagtatccatgtaggcaattgctgggagatcacatttcgtgctactgtcttcttggattggaagtacagttggggcccatcaaatgcattctactgttttgctcatgactacagtgcacacttcttctgtgtggcttcttttctatggacaaccactatagcgttcactcttcatcgcaccgttgtcaaacataaaacggatgttgaggagtttggatcaattttccacctgtatgtcttgcacttggtaaccttttatcttccattgtggggtgccattctctacaatgggtatacatactttcaggttaatcgcatgataaacaacgcgacaaggatggctgttggcataagtgatcgatcaattcaatctgacgtgagggcagacaagaaggcgtttaatcggtggggttattaccctctcattctaataggttcatgggctttcgcaacaatcaatcgtgtgcatgactttgctaatccaggccacaagatattttggctctctattcttgatgttgggtttgccggacttatggggctttttaattccatcgcttatgggctcaactcgtcagtgcgcagagcgattgctgaaagacttgacatgtatctacctgagagatttaaaaggagcctccctactctgacacgatttaaaagtcagcaagaaaatgaacttacttctcttattgtcgatgcgagtaacacatag

SEQ ID NO: 25813 - DNA, 2754 bp, Oryza sativa
  Clone ID: PAT_MRT4530_30663C.1
atgtggtacacctctgatcagagtaaaactattcgaatagccgtgcccgcggttatggaaattctgggcgtgacagccggtctgaccaggcctcctggccggtctaaccgcagccatgcggccggtctgaccgagccattaggccggtctgaccgccgaccagacagcggtccgaccgaggcttcaggccggtctgaccgtgtgcccaacgtcggtctgaccggtgcatctggccggaggattgcaaagggcgatttaagaacttcatcatcttcaaacaaagttaatagaggacattatttacctcctggaacagagccgaatcctaggtggatgcctaaggatttaacggctactcaaaagagaagattgcaacgtcttcgggcccaagagttaagagagaaaaaggccgaagaacacagggataaaaggttcaataaattgagaccaccaccgatttggaggcctaaatccatagagaaggcacgaccgattgatgtagaggagaaggaagaacaatcagttgctaaaagtgaatcatctccaaaagaagacatggataacaacatgcctctctacctcaaaggccatgttgatgggaagccggtctctatgatgctagtggatggaggtgccgctgtgaacttgatgccgtactcgttattcaagaagttggggcgcgaggatgatgagttgaagaagagattctcaatggcttcaacggctagtttagaatggttacaaaaaagggtgcaagaatatcggtctacaaagaatgatattggagaaaccgttgaagattttgatgaagtagagaagcttggacaagggtttacatcagccgatccattggaagaagtagacataggtgatggaactaaaccaaggccgacttttgtaaacaaaaacatgagagccgattataaggttaagataatcgagctacttaaagagtatgttgattgctttgcatgggagtaccatgagatgccgggtcttagccgtgagctcgttgagcatcggcttccaattaaaccgggttttaggccttataagcaaccacctcgtcattttaatcttttactatatgaccgagtcaaagaggagattgatcggttgttgaaggcggggtttattaggccatgtcgttatgcggagtgggtttctagcatagtcccggtggagaagaaggggagtggtaagattagagtttgcatagattttagagatttaaataaagccactcccaaagatgagtatcctatgcctatagctgacatgatgattaatgatgcctcgggtcataagggtatcatcctagagatctatattgatgatattgttgtcaaatcggatagtatgaaaggacacatagccgatttgaggttagcttttgagaggatgcgccggtatggtttgaagatgaacccacttaaatgtgcttttggtgtgtcggcggggaagttcttaggattcatggtgcatgagagaggagttgagattgatcctaagaagatagaaaagattcgtgatttcaaagcgctgacatgcaagaaggaggttcaaaagttgctaggtaaggtgaattatttgaggaggtttatttctaacctagcaggtaaaatcgatgcttttgttcctatacttcgcttgaaaaaagaagccgattttacttggggggcaaaacaacaagaggcgtttgaagagttgaagagatatttgtctactccacccgttgtgctagcgcctaaagccagaaagccttttcggttatatattgcctccgaagacaaagtcattggtgccgttttgacacaagaggaagatggcgaggaatatatcattacatatttgagccgccgtcttttggatgccgaaacgagacatattgctaggcgtgataattctagagcaaatgacttggcacaacaagcatctggttataatgtgaagaagggattatttctaatattagaagagccggtgcttgattttaagtttttgtgcgaaattggcaaaactagagaccatgggcggtctgaccggcgttgcacggtcggtttgaccggagaccaggggcggtctgaccggccgtatgctgccggtctgaccggcgaccccgagcggtctgaccggccctacgtggccggatacataagaggattggagaattcctttgattcaatatctaaagattccacgcttaaggttgatcggaaaattcggcggcaagcattcaaatatacattgcttgatggagatttgtatcgccgaaacatagatggtgtcttgttgaagtgcttagatgaagatcaatctaaagtagctatgggagaggggcataggttcgtgctagttgctacggattacttcaccaagtgggccgaagccatgcctttgaagaatatgactcatacggaggctaatggacaagccgagtcgagtaataagacattgttgaagttggtaaagaagaagattgaggaatacctaaagaggtggcatgaggtgctttctgaagcattgtggacgcataggatatccaaacatggtgccactaaagtcactccttttgagttggtttatggtcaagaagccgttttactggtggaggtaaatcttggttctcttcgttatatcaagcaagatgatttgtcaagtgaagattacaacatgttgatgggagacaaccttgatgaagtcatcgacaagcgcttgtgtcacgaccggaaatcacccaacaggcgttcctga

SEQ ID NO: 25814 - DNA, 432 bp, Oryza sativa
  unsure (1)..(432): unsure at all n locations
  Clone ID: PAT_MRT4530_30664C.1
caagcaaccactcgaacttgctgaactttgttaggattatattgttggttccatcatggcagacaagcaaatggccagtttgatcattaaggcaaatctcgagtgtgaaaagtgttgcaagaagatccagaaagtccttaacaaactcaaagacaaggagaagatcattaacatcgtttatgagaactcgaacaatagggtgatcatatcgggccatttcaagccagaggagctcgcccataagctaagatgcaaggcctgcggggtcatcaaagacattgaatttgggaagcttgcagaggcaaagaaggaggagaagaagccggatcaggccaagaaggaggagaagaagcagcctgaggaaaagaacctgaggagangagaatccgaggaggagaagagnaggcgcgagaagaaccggggaagcaagag

SEQ ID NO: 25815 - DNA, 202 bp, Oryza sativa
  Clone ID: PAT_MRT4530_30665C.1
gccccaaatgcaaaattctgtgcatatgcactggcaattaattcacagcaactgtactcctgttcatatcaatcaaaacacaattatttggataaaaaattccgacactatctatctaacctactacttgcactgtccatggttgaattcctgtcttgttttaccggccttcagtggtgaaggagatcgagatggagttcct

SEQ ID NO: 25816 - DNA, 5700 bp, Oryza sativa
  Clone ID: PAT_MRT4530_30666C.1
atgacgaagccgccatccaagacagaggtggagccatccaatatgatcccggtcacattggatgacttcgaaggagaagatcatcagttagatgcaacttttgagggtaaatttgatgagtttttaagggttaaattcggccctcttttggccgatcacatggtgaaaaataaagcctcttccactgctaaccaacctcctataggtcaaaccgaaggaacggtgtatacggccggtccgaccggccagacggccggtcagaccgggtattaccccggcagtcagaccgggactcaggccggtccgaccgcgcctcttgacgccggtcagatcgggcattgggccggtcagaccagcgcaattattcctatacaggggatagatcctatgactaatgctagttatttgtatcatcttagaacatttgattcccctgtatctactgctacgagtagtccccaagttcccccacatgttcccaatgcttataacgatgttgctaggggatatcctcccgatactagacaaggccaatataataatattgcgccacaaacacaacctattaggccaccaaatccaccgccaaatcaacaagggcctaataatatggaggatataattagtgatattatgaggaatagattcgggatcaaaactaggaatcgtgctagaacttacaaaaagccgtatcctgattattatgataatgtgccgtttcctcgtaattatagagttcccgaatttgccaagtttaatggtgaggatggtaagaccacatgggagcatgtaggtcaatttttggcgcaatgtggtgaggctaatagtgatacttttaaattgcgcttgttttctttatctttgtccggtaatgcttttacatggtttacttctttaccggcaaaatctattcatacttgggctcaattagaagaaaaatttcatgattatttctatactggagaaactgagcttaggttatgtgatttgacatcggttaagcaaaaatacaatgaatctgtcattgattatattaagagatttagggatgttagaaaccgatgttatactttgaatataactgatagagatttggctggtcttgcttttaatggtttaattgctcctcttagagaaagactagatggccaagaatttcttgatgttagtcaactcatgcaaagggctctggctcaagaaagtcgggttaaggataataaaaaatttgctagaccatttgacaaaaagcctaatgttaatgtagttgattaccctgaggctagtgatagtgaggaagagggtgatcatgatatttatgttgccgaatggtcatggactaataaaaataagccttttgtttgttctaacttaatgccgactccacgaaagatcggcaaacaagccgaatctattaagggaaaggaagtggtcattggtgaaccgaggcctaagatgatagtgccaaagaagccggaggtgggtgtttggaaagaaaataagagtggagcttcgacttctaaggcccctaggaagaccaaggtgacttttgatatgctcttggagaaatatgagaggcaaggtggtgagaagattcgcaacagagggaaaagaccaagatcacctcctagggagcgatttggtcattcaccaagacggtcgcattcaccttcatatcatcatccacaagacatgtcatggggtccctatccaatgccgccgccgggttatccttatccttacttcatgccatggggggcaacgccgccaatgtacaattatatgcctccaatgcaattcaaccaagggtggggaggaccaaggaggccaatccatgagcgtctgtcttcaccaaacaatagccggttttatggtaagaatcgggctaatgaagaaaagagggaaggaaagcgcgtcaagatggaggaaaggacttcggaggtgattactatcaaagtggggtctcatgatgtgccaataccttctggagatggagttggagtgtccccgaacaagaaatccgaagccggtaccagctcctcgcagtcggccggtctgaccaggccttctggctggtctgaccgcggccatacggccggccggtctgaccacgcgccacatgtcggtctgaccggcgcgtctggccggtctgaccggtggtctacggccggtctgaccgggctccagcgccggtttgatgagagggctgcaataggcgatgtgagggcttcatcgtcttcaaacaagattaatagagggcattatttacctcctggaacagagccgaatcctaggtggatgcctaaggatttgacggctacgcaaaagagaaggttgcaacgtcttcgggcccaagaactaagagagaaaaaggccgaagaacaaagagataaaaggttcaatgagttgcgaccaccactggtatggaggcctaaatccatagagaaggaaaaaccgattgatgtagaggagaaggaagaacaatcggttaacaagggtgaatcgtctccaaaagaagacatggatatcaacatggtatgtatgttgtctatggtgttttatgctatggataaagccgaggttgctcaactttcattaggtcctaaagatgtggtttttgagaagcccgatgagtcaaaccgtcacatgaagcctctctatctcaaaggccatgttgatgggaagccggtctctaggatgctagtggatggaggtgccgccgtgaacttgatgccgtactcgttattcaagaagttggagcgtgaggatgatgagttgaagaagaccaacatgattctcaatggcttcaacggtgaaccaacggaggcgaagggtatcttttcggcggagcttaccgtggggaacaagacgctaccaaccgctttcttcatcgtcgatgtgcaagaggctaatttagagtggttacaaaagagggtgcaagaatatcggtctacaaagaacgatattggtgaaaccgttgaggattttgaggaaatagagaagcttggaaaagggtttacatcggccgatcctttggaagaagtagacataggtgatggaactaaaccaaggccgacttttgtaaacaaaaatatgagagccgattataaggttaaagtaatcgagctacttaaagagtatgttgattgctttgcatgggagtaccatgagatgccgggtcttagccgtgagcttgttgagcatcggcttccaattaaaccgggttttaggccttataagcaaccacctcgtcgttttaatcatttactatatgaccgggtcaaaaaggagattgatcggttgttgaaggcggggtttattaggccatgtcgttatgcggagtgggtatctagcatagtcccggtggagaagaaggggagtggtaagattagagtttgcatagattttagagatttaaataaagctactcccaaagatgaatatcctatgcctatagccgacatgatgattaatgatgcctcgggtcataaggtgattagctttttagatggtaatgccggctacaatcaaatctttatggcggaagaggatatgtacaagacagcttttaggtgcccgggatttgttggtttgtttgagtgggttctcatgacttttgggttgaagaatgccggtgcaacatatcaaagggcaatgaatttgatctttcatgatttgttaggtattatcctagagatctatattgatgatattgttgtcaaatcggatggtatggaaggacacatagccgatttgaggttagcttttgagaggatgcgccggtatggtttgaagatgaacccacttaaatgtgcttttggtgtgtcggcggggaagttcttaggatttatggtgcatgagagaggagttgagattgatcctaagaagatagaaaagattcgtgatttcaaagcgccgacatgcaagaaagaggtccaaaagttgctaggtaaggtgaactatttgagaagatttatttctaacctagcgggtaaaatcgatgcttttgttcctatacttcgcttgaaaaaagaagccgattttacttggggggaaaaacaacaagaggcgtttgaagagttgaagaggtatttgtctactccacccgttgtgcgagcgcttaaagccggaaagccttttcggttatatattgcctccgaagacaaagtcattggtgctgttttgacgcaagaggaagatggcaaggaatatattattacatatttgagccgccgtcttttagatgccgaaacgaggtcaattctaagtgggagaattggcaagtgggcatatgctttgatagaatatgatttggcttatgaaccattgaaatctatgaaaggccaaattgtatgtgattttatagtagaccatcatatagatattgctcatgagggagaggtttgcttagttgaagttataccttggaagatttattttgatggttcttcttgcaaagaaggtcaaggcataggggtagttttgttttcacctaatggcatgtgttatgaagcatcggttcgtttggaatattattgtacaaataatcaagccgaatacaatgctttattgttcggcttacaagttatggagatggttggagctaaacatgtggaggcttttggtgattcggaattggtggtgcaacaagtcgccggagtctacaaatgcttggacggatcactaaataggtaccttgattcatgtttagatattattgccaattttgataattttgctattagacatattgctaggcataataattctagagcaaatgacttggcacaacaagcatctggctataatgtgaagaagggattatttttaatattagaagagccggtgcttgattttaaatctttgtgcgaaattagcaaaactggagaccaggggtggtctgaccggcattgcacggccggtctgatcggtgaccaggggcggtctgaccgaggatgcgaggcttgtcaacggttcggcaatgttcaattggcgcccgccgccgtgttgaaccccataatcaaaccatggccattccgaggatgggctttggatttcattggtcaaatttatcctttgtcatcaaaggggcataggttcgtgctagttactacggattacttcaccaagtgggccgaagccgtgcttttgaagaatatgactcatacggaggaacacccaaagaggtggcatgaggtgctttccgaagcattgcgggcgcataggatatctaaacttggtgccactaaagtcactccttttgagttggtttatggtcaagaagccgttttaccggtagaggtaaatcttggttctcttcgttatatcaagcaagatgatttgtcaagtgaagattacaagacgttgatgggagataatcttgatgaagtcatcgataagcgcttgaaggcattggaagagatagaaaaagagaagaagagggtggccaaggcgtacaacaaaagggtgaaagcgaagttgtttcaagttggagacttggtttggaagacaattttgcctttgggtactcgatccaaggagttcggtaagtggtctcctagttgggagggtccttatcgagtatgcggcattgttcgagggaacgcgtattttttggagacacttcaaggggagcattttcagcgagcaatcaacgggaaatacttgaagaaatacttcccgagcgtttggcaagacgcttag

SEQ ID NO: 25817 - DNA, 885 bp, Oryza sativa
  Clone ID: PAT_MRT4530_30667C.1
atgccgaaatggattccgaaagggatggatccgaactctgcatgtagagttgtggttagggttgttgcttatgttgagtatatggataatggtagccaagattatcatgtttcatcttcatataagtgggttgtagataaagacacccaagtcaggctgacaatgttcctaccagagatgctaccacaaaaaaggttcccacaaaataggcatgccatctcttttattggatccctgagagaagtggagctagaagactatgtcagcccctactattcagtggccatgttcaggactgcctgttccacaactgtgcctccaatgccagacaagagcctatgggacaaagtggacacaggattcaagatgtggccaccaatactgaagagatcagctggaagacctagaacaaggaagttcattggtgttgaagaaggtggttcaggaaagaaaagaaggagatgcaagaggtgccatggctttggccacctacaaaagacatgcaatgaacctgtatatgatccagatgcctctcccccagctccacccaagcctaagagagttagaaagaagaaatctaagcctgaacaagtgcctacttgtggtaacaacactatgcctcctactgctattgctgatagtgctgatcaagccacatctactgctgcccctgctgctgatcaagcccatgctgctgctgctgatcaagcccttgctggtgctactgctgctgctgatcaagcccctgcacaagttgctatgcaggtggatgacagccctggaccagttacaaggagcaggagtgttgcatccccagtacatgcaagtccatttaaagccaacaaaaggaaggctgtggttaccaggactgcaaagaagctgtaa

SEQ ID NO: 25818 - DNA, 1842 bp, Oryza sativa
  Clone ID: PAT_MRT4530_30668C.1
atgacgaaaccgccgtcatccaaggtggaggtggagccggcctatgtgataccaatcacattggatgatttcgaaggagaagaccgcaagtccatggaggagtacatcaaggagctcacacaggaggcgttgatgagggcgtctactaggactcgtcaaggtgtgatcatcaagcccaggccacgtcctaggctcgctcccaatttggtattaccccggcggtcagaccgggactcaggctggtctgactgcgcctctggatatcggttagaccgggccctggaccgggagtatcctcctgatactaggcaaggccaatataaccatattgcgtcgcaaacacaacctattaggccaccaaatacaccaccaaatcaacataggcctgataatatggaggaaataattagtgggattattatggataaattcaggattgaaactaggaatcgtgctaaggtttaccaaaagtcgtatcctgactattatgataatgtgctgtttgctgtaattatagagttcccgaatttaccaagtttagtggtgaagattgtagaaccacatgaaagctgggttaaggataataaaaaaattgttagaccatatgagaaaaggcctaatgttaatatgattgattaccttgaggcgagtgatagtgaagataagggtgatcatgatatgtatgttgctgaatggtcatggactaacaaaaacaagccttttgtttgttctaacctaatgccgactcctcgcaaagatcggcaaagtgaggttcaatcggccatagatgaaggacgattgaagttcaccgatggctccaagatgaagcttgatcatgatccttttccggtgaatataattaatttcaatgacaagaaggtgttgattcggcccgagcaagccgaatctactaaggaaaaaggaataatcattggtgaatcaaggccaaagatgatagtgccaaagaagccggaggttggtgttttgaaagagaataaaagcgaagcttcgacttctaaagctcctaggaagaccaaagtgacccttgatatgcttttggagaaatatgaaaagcaaggtggtgagagagcttgcaacaatgggaaaagaccaagatcacctcctagggagcgatttggtcactcgccaagatggttgcattcacctccatatcatcattcacaagacataccatggggtccctatccaatgccgccgctgggttatccttatccttattacatgccatggggggcaacgccgccaatgttcaatcatatgcctccaatacaattcaaccaaaggtggggaggaccaaggaggccaattcatgaacatttgtcttcaccaaacaacggctggttttatggtaagagccgggccagtgaggaaaggagagaaggaaagcgcattaaagtggaggcaaggacttcagagtcggctggtctgaccgggccttctagccggtctgaccgcagccatacggccggtctgaccgggccatcaggccggtctgactgccgacccgacaatggtccgaccgacgcctcaggccggtctgaccgcccaccgaatgttggtctgaccggcgcatctggccggtctgaccggtggtctacgtccggtctgaccgggctccaccgccggtttgataagaggtttgcaaatggcgatgtgagggcttcatcgtcatcaattagacctaatagggggtattatttacctcctggaacagatccgaaacctagttgtcacgcccaaaaatttagcccaaatcttcagactattttgtgtattaaatccctatccaggaccagccagggtacacaaaacgacaagtga

SEQ ID NO: 25819 - DNA, 249 bp, Oryza sativa
  Clone ID: PAT_MRT4530_30669C.1
tcgtttatattcagagagtaagatatgcatagggagtccacctttcaattggagcacaggaacaagaacgggatgcaatcataagagactaccctgtctggccagaacattacatatgaagtagactagttggacattattgtacaccttaattcaaagatctggaataaggaagagattggcctctaccagatagatatgctatatgatgatcagaattttcaggatggccgcatgaaatttgattac

SEQ ID NO: 25820 - DNA, 3153 bp, Oryza sativa
  Clone ID: PAT_MRT4530_3066C.1
aatgttaaaaatgaccttggacccacatgtcagctctcctacctctcttctctctctatcccacatgtcagcgatgacgtcgtcttcctcctcctccggccattgtggaggatctacgccgccgccgttggtcgtcgtcatgaccatcgatttttgtggcgttgcttgtgtagtggtgtgcatatgcgggtgtgtcactcacagggtcagtgttggtgatatacgatttcaccaccggccagcctccgtcgccgccgactggtgtccccgcctatacggtcggttggtcacaccaccgttgatgggcatcgtcatctacactgccggcctgcctccgtcgccgccgactggtgtcatcgcctatacggttggtcggccacaccaccgttcatgggcgtccacgtcttcaccgaccggctcgccttcatcgccgctgactggtgtctccgcctgcacggctggcctattatgccgccgctgttgggcgtctacgacttcaccaccagcctgcctccgtcgccgccgactggtgtcatcgcctatacggtcggttggtcacaccaccgttgatgggcatcgtcatctacactgccggcctgcctccgtcgccgccgactggtgtcatcgcctatacggttggtcggccacaccaccgttcatgggcgtccacgtcttcaccgaccggctggccttcgccgccgccgactggtgtttccgcctgcacggctggcctattatgccgccgctgttggcgcgtctacgacttcaccaccggcctgcctccaccgccgccgactggtgtttccgcctgcacggctggcctactatgccgcagctgttggtgctctacgacttcaccaccggctcgccgtcgtcgccgccgactggtgtcttcgcctatacggtcggttggtcacaccaccgttgatgggcatcgtcatctacaccgccggcctgcctccgtcgccgccgactggtgtccccgcctatacggtcggttggtcacaccaccgttcatgggcgtccacgtcttcaccgaccggctggccttcgccgactggtgtttccgcctgcacggctggcctattatgccgccgttgttggatgtctacatcttcaccgttggctcaccttcgttgccgtcgactggtgtttccgcttacacggctagcctattatgccgccgttagtgggcatcttcgctttcaccgtcgaccgccttcgtcgccgccgactggtgtcttcattgtcattgatggacgactttgttcccacattggccacttctgccatcaccaaggggaatattacaaagctaaatttttccttttcctctgcctcactacaccaattggtcttccattgagtagtgagtcgggggctacagatgttatatcatatttttcataatatttatcttgattgcttgcgacataatctgagtacaaaagtacctatcgagttatggagttctatcttcctatgctttccgtttggtttgccaatggatggttgcctttgggccgattcctagcacccgggggctcgttggatggaccgagtaacgcaaggtgctaagtatttatatgtttgttctgcaggatccagatccagatatgcataaaagggattcatggctttaagcttatctcttacgctccaggaatggatcagtcagaacatcaccaccggctcgcctcgaccgccgccgactggtgtttccgcctgcacggctggcctactatgctgccgttgttgggcgtctacgtcttcaccgaccggccgcctcgtccgctgccgactggtgtttccgcctgcacggctggcctttatgccgccgttgttgggcgtctacgtcttcaccgaccggcttgccttcgccgccgccgactggtgtttctgcctgcacggctggcctttatgccgccgttgttgggcgtctacgtctttaccgatcggcttgccttcgccgccgccggctggtgtttccgcctgcacggctggcctttatgccgccgttgttgggcgtctacatcttcaccgaccggcttgccttcgccgccgccgactggtgtttccgcctgcacggctggcctttatgccgccgttgttgggcgtctacgtcttcaccgaccggcttgccttcgccgccgccgactggtgtttccgcctgcacggctggcctttatgccgccgttgttgggcgtctacgtcttcaccgaccggcttgccttcgccgccgccgactggtgtttccgcctgcacggctggcctttatgccgccgttgttgggcgtctacgtctttaccgaccggcttgccttcgccgctgccgactggtgtttccgcctgcacggttggcctttatgccgccgttgttgggcgtctacgtcttcaccgaccggacgcctcgaccgccgccgactggtgcttccgcctgcacggctggcctttatgccgccgttgttgggcgtctacgtcttcaccgaccggccgccgcatccgccgctgactggtgtcaccgcctgcacggctggcctgttataacgccaactgatgctatcttcttcacggctggctacatcgctgtcactactaataggcatcagtatcttcaacacaagctacctacgtttgccatggctgccgactggtttcttcacttccatggctgcatgattctgccagtgttgattggccttaccatcttcatcgctggtcgtctcgtctgctgctgactagtgccctcgcctctacatctggtttatacagctaccactactgatggacatcatcgtcttccgccgccgactcgtcttcactaccggtttgcttctgttgccgccgactcgtgttcacttcatcacggcaacacaactttgtcatcatggtggagcgacttcatctttattatcttcggcactggcaaactctattgctgctacttcacaagttttgctacatcaccaaccatgacgttgttgtgaatctcgacatatcggcatgcgatgccgtgttatttaattacaacaagtggctctccaacattcatgatttctacttggacatcttcaacacatatcttcaatcaagtgatgactactcgacaacaagaagctataattctcgactctatgttcagttgtttcccaac

SEQ ID NO: 25821 - DNA, 285 bp, Oryza sativa
  Clone ID: PAT_MRT4530_30670C.1
atggagctcaagaacgccctctcgacctcttcagaggcatctcttctaagcaggcacaagacatactccatcaccgacgcatcgcacggcaacgtgatcctaccgtcgtcgccggcgaagccgaactcctcccgggacatggtcaggagctcgccgaagaccgccgtgccgaggtacagcaatggcacctcgaaccgcgccccgtcggcaaatggctccaaatggaagcaatctgactaccaaatggctccggcaggcagtcttactccgttcgtcaaaatctga

SEQ ID NO: 25822 - DNA, 162 bp, Oryza sativa
  Clone ID: PAT_MRT4530_30671C.1
gggggggtattattttgtttgcattgtaccaaattactctgatattgatagtaacacgaaaaaggttaaaaccaccatctcatagccaggaaccaaatgaccaccgcacagatctgggatggtactagttagcatagagtgacgattaacagctgagaccac

SEQ ID NO: 25823 - DNA, 1884 bp, Oryza sativa
  Clone ID: PAT_MRT4530_30672C.1
atgaacccacttaaatgtgcttttggtgtgtcggtggggaagttcttaagattcatggtacatgagagaggagttgagattgatcctaagaagatagaaaaaattcgtgatttcaaagcgccgacatgcaagaaagaagttgaaaagttgctaagtaaggtgaattatttgaggaggtttatttctaacctagcagtagaccatcatatagatgttgcttatgagggagaggtttgcttagttgaagttataccttggaagatttattttgatggttcttcttgcaaagaaggtcaaggcataggggtagttttgttttcacctaatggcatgtgttatgaggcatcggtttgtttggaatattattacacaaataatcaagccgaatacaatgctttattgttcggcttacaagttatggagatggttggagttggagaccagaggcggtctgaccggcgttgcatggccggtctgaccggtgaccaggggcggtctgaccggccgcattctgccggtctgaccggcgacctcgagcggtctgaccggccctgtgtggccggtctgaccggttttgggcagaatgctggggggcacgcttcaattgatttggaggccgaattaattaaaaattcgggcatttgtgcccaggatacagaagaggattggagaattcctttgattcaatatctaaaggatcccacacttaaggttgatcggaaaattcggcggcaagtattcaaatatacattgcttgatgaagatttgtatcgccgaaacatagatggtgtcttgttgaagtgcttagatgaggatcaatctaaagtagctatgggagaagtgcatgaaggaatttgtggaactcatcaatcggcccacaagatgaattggttgcttagaagagcgggattctattggccgaggatgattgatgattgcttcaaatattataggggatgtgaggcttgtcaacagttcggcaatgttcaattggcgcccgccgccgtgttgaaccctataatcaaaccatggccgttccgaggatgggctttagatttcattggtcaaatttattcttcgtcatcaaaggggcataggttcgtgctggtcgctacggattacttcaccaagtgggccgaagccgtgcctttaaagaatatgactcatacggaggtaattgactttattttgaagcatattattcatagattcggtattccgcaaacattaactacggaccaaggtgcttcttttatgtctaaggaagtgaagagttttaccaaatcttatggcattaaattgttgagttcttctccttactacgctcaggctaatggacaagccgagtcgagtaataagacattgttaaagctagtaaaaaagaagattgaggaacacccgaagaggtggcatgaggtgctttctgaagcattgtgggcgcataggatatctaaacatggtgccactaaagtcactccttttgagttggtttatggtcaagaagccgttttaccggtagaggtaaatcttggttctcttcgttatattaagcaagatgatttgtcaagtgaagattacaagacgttgatgggagacaatcttgatgaagtcatcgacaagcgcttgaaggcattggaagagatagagaaagagaagaagagggtggccaaggcgtacaacaagagggtgaaagcaaaattgtttcaagttggagacttggtttggaagacaatttcgcctttgggtactcgatccaaggagttcggtaagtggtctcctagttgggaaggtccttatcgaatatgcggcattgttcgagggaacgcatactttcgggtttcctttggattctaccccgagttggacgtggaggaggacctgtag

SEQ ID NO: 25824 - DNA, 5406 bp, Oryza sativa
  Clone ID: PAT_MRT4530_30673C.1
atgaagaagccatcatccaagatggaggtggagccatctaatgtgatgccggtcacattggatgacttcgaaggagaagatcgtaaagctatggaggagtacatcaacgagctcacacgggaggcattgatgagagccactactaggactcgtcaaggcgtgatcatcaaacccgggccacgtcccaagctcgctcccgacgtggtaagtaatgacgaggtatcacaatctatccaacaacaaattgcatctacaatagattcatctatggctaattttaaagatagattagatgtaatgtttaaggataaggttgatggatttttaaggagtaggctaggttcttttatggatgattacacattaaaggataaagcctataccactgttgatcaatctcctatagatccaatggttagtaaaaccgacgggacggcgttcacggtcggtccgaccgggcctgacggccggtcagaccgcaacatagccgtcggtccgaccggccagacggccggtcagaccgggtattaccccagcggtcagaccggctctcaggccggtccgaccgcgcatcatgacgccggtcagaccgggccctgggccggtcagaccggcgcaatcgtcccaatacagggtatagatccaatgactaatgctagttatttgtaccactttagaacatttgatcctcctgtatctactgctacaagtaatcctcaagttcccccacatattcctaatgcttataatgatgtttctaggggatatcctcccgatactaggcaaggccaatataatcatattgcaccacaaacccaacctattaggccaccaaacccaccaccaaatccacaagggcctaataacatggaggatatgattagtgatattatgaggaatagattcgggattgaaactaggaatcgtgctagagcttacaaaaagccatatcctaattattataataatgtgccgtttcctcgaaattatagagttcccgaatttgccaaaaatttagtggtgaggatgagatttagggatgttagaaaccgatgttacactttgaatataactgatagagatttggccggtcttgcttttaatggtttagttgctcctcttagagaaaaactagatggccaacaatttcttgatattagtcaactcatgcaaagggctctggctcaagaaagccgggttaaggataataaaaaatttgctagaccatttgacaaaaagcctaatgttaatgtagttgattaccctgaggctagtgatagtgaggaggagggtgatcatgatatttatgttgcccaatggtcatggactaacaaaaataaaccttttgtttgttccaacctaaagccgactcctcgcaagatcgacaaagttcaatcggccatagatgaaggacgattgaaattcaccgatggctccaagatgaagcttgatcatgatccttttccggtgaatacaattaattttaatgataagaaagtgttgattcggccggagcaagctgaatctactaagggaaaggaagtggtcattggtgaaccaaggcctaagatggtggtgccaaagaagctggaggttggcgtttggaaggagaataggagtggagcttcaacttctaaggcccctaggaagaccaaggtgacttttgatatgcttttggagaagtatgagaagcaaggtggtgagaagattcgcaacaaagggaaaagactaagatcaccccgtagggagcgatttgttcattcaccaagacggtcacattcaccctcatatcatcgtccacaagacatgtcatggggttcctatccaatgccgccgccgggttatccttatccttactttatgccatggggggcaacgccgccaatgtacaatcatatgcctccaatgcaatttaaccaagggtggggaggaccacggaggccgattcatgagcgtttgacttcaccaaacaatagccgattttatggtaaaaatcgggctaatgaagaaaagagggaaggaaagcgtgtcaaggtggaagagaggacttcggaagtaattactatcaaagtggggtcccatgatgtgcctataccttctggagatggagttggagagtccccaaacaaaaaatccgaagccggtgccagcttttcgcagtcggccggtctgaccaggcctcctggccggtctgaccgcagccatgcggccggctggtctgaccgtgtgcccaacgtcggtctgaccggcgcatctggccggcttgaccggtggtctactgccggtctgaccgggctccagcgccagtttgacaggaggattgcaaagggcggtgtggaggcttcatcgtctccaaacaaggttaatagagggcattatttacctcctggaacagagccgaatcctaggtggatgcctaaggatttgacggctactcaaaagagaaggttgcaacgtcttcgggcccaagaactaagggagaaaaaggccgaagaacagagagataaaaggtttaatgagttgcgaccaccactggtatggaggcctaaatccatagagaaggcaaaaccgattgatgtagaggagaaggaagaacaatcggttgataaaagtgaatcatctccaaaagaagacatggatatcaacatggtatgcatgttgcctatggagttttgtgctatggatgaagccgaggttgctcaattctcattaggtcctaaagatgcggtttttgagaagcccgatgaatcaaaccgtcacatgaagcctctctacctcaaaggccatgttgatgggaggccggtctctaggatgctagtggatggaggtgccgctgtgaacttgataccgtactcgttattcaagaagttggagcgcgaggatgatgagttgaagaagactaacatgattctcaatggcttcaacggtgaaccaacggaggcgaggggtatcttttcggcggagctcaccgtgggaaacaagacgctaccaaccgctttcttcattgtcgatgttcaagtcaaagaggagattgatcggttgttaaaggcggggtttattaggccatgtcgttatgtggagtgggtttctagcatagtcctggtggagaagaaggagagtggtaagattagagtttgcatagattttagagatttaaataaagccactcccaaagatgagtatcctatgcctatagccgacatgatgattaatgatgcctcgggtcataaggtgattagctttttagatggtaatgccggctacaatcaaatctttatggcggaggaggatatgtacaagacggcttttagttgtccgggatttgttggtttgtttgtgttggttgttatgacttttgggttgaagaatgccggtgcaacatatcaaagggcaatgaatttgatctttcatgatttgttaggtattatcctagagatctatattgatgatattgttgtcaaatcggatggtatggaaggacacatagccgatttgaggttagcttttgagaggatgcgccggtatggtttgaagatgaacccacttaaatgtgcttttggtgtgtcggcggggaagttcttaggattcatggtgcatgagagaggagttgagattgatcctaagaagatagaaaaaattcgtgatttcaaagcgccgtcatgcaagaaggaggttcaaaagttgctaggtaaggtgaattatttgaggaggtttatttctaacctagcgggtaaaatcgatgcttttgttcctatacttcgcttaaaaaaggaagccgattttacttggggggcaaaacaacaagaggcgtttgaagagttgaagagatatttgtctactccacccgttgtgcgagcgcctaaagccggaaagccttttcggttatatattgcctccgaagacaaagtcattggcgccgttttgacacaagaggaagatggcaaggaatatatcattacatatttgagccgccgtcttttggatgtcgaaacgagtacatgcatagttacttgtcaagccgatgttattaaacacatgttgcaacggccaattctaagtgggagaattggcaagtgggcatatgctttgatagaatatgatttggcttatgaaccattgaaatctataagaggccaaattgtatgtgattttataatagaccatcatatagatgttgcttatgagggagagaagagtcggtgcttgattttaaatctttgtgcgaaattggcaaaactggagaccaggggcagtctgaccggtgaccaggggcggtctgaccggccgtatgctgccggtctgaccggcgaccccgagcggtctgaccggctctgcgtggccggtctgaccggttttgggcagagtgctggggggcacgcttcaattgatttagaggccgagttaattgagaattcagacatttgtgcccaggacacagaagaggattggagaattcctttgattcaatatctaaaagatcccacgcttaaggttgatcggaaaattcggtggcaagcattcaaatatacattgcttgatggagttttgtatcgccgaaacatagatggtgtcttgttgaagtgcttagatgaagatcaatctaaagtggctatgggagaggtgcatgaaggaatttgtggaactcatcaatcggcccacaagatgaattggttgcttagaagagcggggttctattggccgaagatgattgatgattgcttcaaatattatagagattgcgaggcttgtcaacggttcggcaatgttcaattggcgcccgccgccgtgttgaatcctataatcaaaccatggccgttccgaggatgggctttggatttcattagtcaaatttatccttcgtcatcaaaggggcataggttcatgctagttgctacggattacttcaccaagtgggccgaagccgtgcctttgaagaatatgactcatacggaggctaatggacaagccgagtcgagtaataagacattgttaaagctagtgaaaaagaagattgaggaacacccgaagaggtggcatgaggtaaatcttggttctcttcgttatatcaagcaagatgatttgtcaagtgaagattacaagatgttgatgggagacaaccttgatgaagtcatcgacaagcgcttgaaggcattggaagagatagagaaagagaagaagagggtggccaaggcgtataacaagagggtaaaagcaaaattgtttcaagttggagacttggtttggaagacaattttgcctttgggtactcgatccaaggagttcggtaagtgtctcctagttgggagggtccttatcgagtgtgcggcattgttcgagggaacacatactttttggagacacttcaaggggagcgttttcagcgagcaatcaacgggaaatacttga

SEQ ID NO: 25825 - DNA, 1003 bp, Oryza sativa
  Clone ID: PAT_MRT4530_30674C.1
atggtgcatgagagaggagttgaaattgatcctaagaagatagaaaaaattcgtgatttcaaagcgccgacatgcaagaaagaggttcaaaagttgctaggtaaggtgaattatttgaggaggtttatttctaacctagtgggtaaaatcgatgcttttgttcctatacttcgcttgaagaaagaagccgattttacttggggggcaaaacaacaagaggcgtttgaagagttgaagagatatttgtctactccacctgttgtgcgagtgcccaaagccggaaagccttttcggttatatattgcctccgaagacaaagtcattggtgccgttttgactcaagaagaagatggcaaggaatatatcattacatatttgagccgccgtcttttggatgccgaaacgagaggatgcgaggcttgtcaacggttcggcaatgttcaattggcgcccgccgccgtgttgaaccctataatcaaaccatggccgttccgaggatgggctttagatttcattggtcaaatttatccttcgtcatcaaaggggcataggttcgtgctagtcgctacggattacttcaccaagtgggccgaagccgtgcctttgaagaatatgactcatacggaggctaatggacaagccgagtcgagtaataagacattgctgaagctagtaaaaaagaagattgaggaacacccgaagaggtggcatgaggtgctttctgaagcattgtgggcgcataggatatctaaacatggtgccactaaagtcaccccttttgagttggtttatggtcaagaagccgttttaccggtggagacattgatgggagacaaccttgatgaagtcatcgataggcgcttgaaggcattggaagagatagagaaagagaagaagagggtggccaaggcgtacaacaagagggtgaaagcaaaattgtttcaagttggaaacttggtttggaagacaattttgcctttgggaactcgatccaaggagttcg

SEQ ID NO: 25826 - DNA, 195 bp, Oryza sativa
  unsure (1)..(195): unsure at all n locations
  Clone ID: PAT_MRT4530_30675C.1
cgttgtttntcggncttttgtgcnttttttttttcgtgtttgantggttttcancgtgtaangggtncgtttctganagtanattgtctgtctctatgtgtgtncganntcanccgttcatggccgtgttccaaccatttctcgccgtcggtnaaaaaaaaaaaaaaaaaaaaaaaaaaaaaaaaaaaaaaaaaa

SEQ ID NO: 25827 - DNA, 333 bp, Oryza sativa
  unsure (1)..(333): unsure at all n locations
  Clone ID: PAT_MRT4530_30676C.1
atgcggcctccgggcagcgggggtgcgccgcgccccgcggaacccaaccaccgccgcagggccgccccggcgaacggaaacgggcgggagtggagaatccccccacccaaacgacggaccggagtccgccacaccaaaacgggggagacggtgcaggcggcgggggcgtcgccgggcaggagcccaagcttgggtaaggtggaggacccccgtcgccgcgtgcgtgtaggagtagagcagccgtggccgcgacgcgcgcagatggtgtggaagncggaggaggcggccgaggaacacgccgccgccgccgccgcacgtggccctggcccctga

SEQ ID NO: 25828 - DNA, 417 bp, Oryza sativa
  Clone ID: PAT_MRT4530_30677C.1
ttttttttttttttttttttttttttttttttttttttttttttttttttttttttttttttttttgggcattaattaacaactaattaaacaagggtcgtttttacacctacacgtacacagtacatatacacttgaaaaaaagtctcaatgatgcccaagcacaacaatggggggaaaacctcgggaaaacgatcgatcctcgtaattttactttttgtcgtcgtcgcttacaaactttccggtgccggggtttatggcggccataaaaaaaaaaaccacctttaaaaggacaaacggttttatttttttgatggggacccccgtcttaatttttaacttcccgagggccccctttccggtgatgatctcccccattatggaaaaggggatgcccaacttcccaagccggccaac

SEQ ID NO: 25829 - DNA, 5157 bp, Oryza sativa
  Clone ID: PAT_MRT4530_30678C.1
atgacgaagccgccatccaagacggaggtggagccatctaatgtgatgccggtcacattggatgacttcgaaggagaagatcgcaaagctatggaggagtacatcaatgagctcacacgggaggcgttgatgagagcaactactaggactcgtcaaggcgtgatcatcaagcccgggccacgtcccaagctcgctcccgacgtggtaagtaatgacgaggtatcacaatctatccaacaacaaattgcatctacaatagattcatctatggctaattttaaagatagatttgatgtaatgtttaaggataaagttgatgggtttttaaggagtaggctcggttcttttatggatgattacacattaaaggataaagcctataccactgttgatcaacctcctatagatacaatgggtagtaaaaccgatggaacggcattcacggtcggtccgaccgggcctgacagccagtcagaccgcgacatagccgtcggttcgaccggccagacggccggtcagaccgggtattaccccagcggtcagaccggctttcaggctggtccgaccgcacatcatgacgccggtcagaccgggccttgggccggtcagaccggcgcaattgtcccaatacagggtatagatccaatgactaatgctaattatttgtaccactttagaacatttgatcctcctgtatctactgctacaagaatcgtgctagagcttacaaaaagccatatcctgattattatgataatgtgccgtttcctcgaaattatagagttcccgaatttgctaagtttagtggtgaggatgagatttagagatgttagaaaccaatgttatactttgaatataactaatagagatttggccggtcttgcttttaatggtttagttgctcctcttagagaaaaactagatggccaacaattttttgatgttagtcaactcatgcaaagggctctggctcaagaaagccgggttaaagataataaaaaatttgctagaccatttgacaaaaggcctaatgttaatgtagttgattatcctgaggctagtgataatgaggaggagggtgatcatgatatttatgttgtcgaatggtcgtggactaataaaaataagccttttgtttgctctaacttaatgccgactcctcgcaaagatcggcaaagtgaagttaagtatagttttgatgtggccaagtgtgataagatttttgattaccttttgcaagaaaaacaaattagattacctaaaggccatgtcataccattgcaagaagagttgaagcgtcgagcatattgtaaatggcatgattctcattctcactctactaatgattgcaatgtgtttcgacgacaggttcaattggccatagatgaaggacgattgaagttcaccgatggttccaagatgaagcttgatcatgatccttttccggtgaatacaattaatttcaatgataagaaggtgttgattcggccggagcaagccgaatctactaaggggaaggaagtggtcattggggaaccaaggtccaagatggtagtgccaaagaaggcggaggttggcgtttggaaggagaataagagtggagcttcaacttctaaggctcctaggaagaccaaactgacctttaatatgcttttggagaaatatgagaggcaaggtggtgagaaaattcgcaacaaagggaagagaccaagatcacctcctagggaacgatttggtcattcaccaagacggtcgcattcaccttcatatcatcatccacaagatatgtcatggggtccctattcgatgccgccgccgggttattcttatccctacttcatgccatggggggcaacgccgccaatgtaccatcatatgcctccaatgcaattcaaccaaggccggttctatggtaagaatcgggttaatgaagaaaagagggaaggaaaacgcgtcaaggtggaagagaggacttcggaagtaattactatcaaagtggggtcccatgatgtgcctataccttctggagatggagttggaaagtccccaagcaaaaaatccgaagccggtaccagctcctcgcagacgaccggtctgaccaggccctctggccagtctgaccgcggccatgttgccgagccgaatcctaggtggatgcctgaggatttgacggctactcaaaagagaaggttgcaacgtcttcgggcccaagaactaagggagaaaaaggccgaagagcaaagggataaaaggttcaatgagttgctaccaccaccaatatggaggcctaaatccatagagaaggcaaaaccgattgatgtagaggagaaggaagaacaatcggttgataaaagtgaatcatctccaaagaaagacatggatatcaatatggtatgtatgttgcctatggagttttgtgctatggatgaagccgaagttgctcaattctcattaggtcctaaagatgcggtttttgagaagcccgatgaatcaaaccgtcacatgaagcctctctacctcaaaggctatgttgatgggaagccggtctctaggatgctagtggatggaggtgccgctgtgaatttgatgccgtactcgttattcaagaagttggggtgcgaggatgatgagttgaagaagactaacatgattctcaatggcttcaacggtgaaccaacggaggcgaggggtatcttttcggccgagctcaccgtgggaaacaagacgctaccaaccgctttcttcatcgtcgatgtgcaagtgagtaaagaggataatttagagtggttacaaaaaagggtgcaagaatatcggtctacaaagaacgatattggagaaactgttgaagattttgatgaagtggagaagcttggacaagggtttacatcggccgatccattggaagaagtagacataggtgatggaactaaaccaaggctgacttttgtagacaaaaacatgagagccgattataaggttaagataatcgagctacttaaagagtatgttgattgctttgcatggaagtaccatgagatgccgggtcttagcctgggtttccagcataatcccggtgagaagaaggggagtggtaagattagagtttgcatagattttagagatttaaataaagctactcccaaagatgaatatcctatgcctatagccgacatgatgattaatgatgcctcgggtcataaggtgattagctttttagatggtaatgccggctataatcaaatctttatggcggaagaggatatgtacaagacggcttttaggtggccgggatttgttggtttatttgagtgggttgtcatgacttttgggttgaagaatgccggtgcgacatatcaaagggcaatgaatttgatcttccatgatttgctaggtattatcttagagatctatattgatgatattgttgtcaaatcggatggtatggaaggacacatagccgatttgaggttagcgtttgagaggatgcgccggtatggtttgaagatgaacccacttaaatgtgcttttggtgtgtcagcggggaagttcttaggattcatggtgcatgagagaggagttgagattgatcctaagaagatagaaaagattcgtgatttcaaagctccgacatgcaagaaggaggttcaaaagttgctaggtaaactgaattatttgaggaggtttatttctaacctagcgggtaaaatcgatgcttttgttcctatacttcgcttgaaaaaagaagccgattttacttggggggcaaaacaacaagaggcattcgaagagttgaagagatatttgtctactccacccgttgtgcgagcgcctaaagccggaatgccttttcggttatatattgcctccgaagacaaagtcattggtgccgttttgatgcaagaggaagatggcaaggaatatatcattacatatttgagccgccgtcttttggatgctgaaacgagacatattgctaggcgtgataattctagagcaaatgacttggcacaacaagcatctggttataatgtgaaaaaggggttatttctgatattagaagagccagtgcttgattttaaatcttcgtgcgaaattggcaaaactggagaccaggggcggtctgaccggcgttgcatggccggtctgaccggtgaccaggggcggtctgaccggctgtatgctgccggtctgaccggcgaccccgagcgaggatgcgaggcttgtcaatggttcggcaatgttcaattggcgcccgccgccgtattgaaccctataatcaaaccatggccgttccgaggatgggctttggatttcattggtcaaatttatccttcgtcatcaaaggggcataggttcgtgttagttgctacggattacttcaccaagtgggccgaagccgtacctttgaagaatatgactcatacggaggtaattgactttattttgaagcaaattattcatagatttggtattccgcaaacattaactatggaccaaggtgcttcttttatgtctaaggaagtgaagagttttatcgaatcttatggcattaaattgttgagttcttctccttactacgctcaggctaatggacaagccgagtcgagtaataagacattgttaatgctagtgaaaaagaagattgaggaacacccgaagaggtggcatgaggtgttttctgaagcattgtgggcgcataggatatctaaacatggtgccactaaagtcactccttttgagttggtttatggtcaagaagccgttttaccggtggaggtaaatcttggttctcttcgttatatcaagcaagatgatttgtcaagtgaagattacaagatgttgatgggagacaaccttgatgaagtcatcgacaagcgcttgaaggcattggaagatatagagaaagagaagaagagggtggccaaggcgtataacaagagggtgaaagcgaaattgtttcaagttggagacttggtttggaagacaattttgcctttgggtactcgatccaaggagttcggtaagtggtctcctagttgggagggtccttatcgagtgtgcggcattgttcgagggaacgcatactttttagagacactacaaggggagcgttttcagcgagcaatcaacgggaaatacttgaagaaatacttctga

SEQ ID NO: 25830 - DNA, 1088 bp, Oryza sativa
  Clone ID: PAT_MRT4530_30679C.1
cccgggctgcaggaattcggcacgaggctcactcctctaccgtctcttcatgtgctatctgcctctaccacctccctcctgcttcggcgaaattttctaccagcaaaggtttgtttaaagatctgtgcactggtaagagtttatctgccgggaagcttaaatttagtggccaattggtctgtcgaaaatgtctttttctgttggcaaagaattttattgacatgttctttcccactcacttgtttcctattgagaaaagcctttactgacaggccgaatgacatcataaacacataacctttgccgacaattgagctgttggtgcatttaggtcatggtgcagtgatgtaatgaagtttccagtctaagtccaccaaacacacaagtatcttggacctccaatggccttcggcgacgggatggccaagggcgtggcgctgtggggacgggcgacggcgccgcagcccatgggatggtggtgggctgctggcggcgctagggagattgagattgggcggcggcgtggtgataggaatgcacttacatatgacaacaacgggatgccaatacaagctaatggaagagttcaaaagattgctgatccttttgattatggagcagggtttgttaatccggtcatggcagctgatccaggccttatctacgacatcaccgcatctgattacctcaaattcttcaactgcatgggaggattaggctcaggggacaattgcaccacagcgaaaggatcacttactgacctgaacctcccatccattgccatccctaacctcaggacattccaagctatgacacgcactgtcaccaatgttggccaagttaatgccgtgtataaggcattcttccaagctccagctggtgtcgagatggccgtcgagccaccagtgctggtgttcaacaagaacagaagagtgcagagcttcagggtgaccttcaaggctacacgaaaggtgcagggtgactacaggtttggaagcttggcgtggcatgatggaggcagccactgggttcggatccccatcgccgttcgcatcgtgattgaggagatctactccaagatctcctaa

SEQ ID NO: 25831 - DNA, 234 bp, Oryza sativa
  Clone ID: PAT_MRT4530_3067C.1
caacctgaatcgaacttttgcgcagagaagctcagaggcgtccataaatttctgagagaagcttcatcgttgaagaattatgctttaactctttttttataatacatgttatatgtactgactgtactaagcgaacgttgtataaagctgatatttctaattcataaattcatcaatcgatagactagctcatttttacgctgagtatgcttaataactgctaatgactataaa

SEQ ID NO: 25832 - DNA, 639 bp, Oryza sativa
  Clone ID: PAT_MRT4530_30680C.1
atgccgcatcccaatattgctgctagctgctccccctcctgcttgctcctcgccgtagccgtcaccttcttctcggctacagccagcatctcccatggcgccgcccatcacgcgcggcgcgtgcccgcaccgccggcggcgtgcgtggcgcgcgagagggacgcgctgctggccttcaagcagcgcgtcaccgcgcgcgacccagcgagcgctatctcgtcgtggcggcgaggggaggccgctgcagactgctgccagtgggacggtgtcgagtgcgacagccgcaccggccgtgtcatcggcctcgacctcgccaatcgcgagttcgatggtaggacgggcgtgctcgatgaccaggtgtctcttgttggtgacataagccgctctttgctctctctggagcacctgagtgacctccaactcggctggaatttcctggaggggcgcactggtcgtctcccggacttccttggctctttcaaaaggctggaatctcttggcctcaccggcataccattttctggcaccgtgcctcctaagctcgaaatcgttttatactgggacaacttctccactctagaaatcgtcttttctcataagggcatccacaatgtgttgagaaaccaggagaagatttaa

SEQ ID NO: 25833 - DNA, 162 bp, Oryza sativa
  Clone ID: PAT_MRT4530_30681C.1
atgtcgtcgacccccgaggctctccccttcgccttagtgactcacgaggatgtctacgggcatcatagactaggcttcccgagtggaagcggattgttgtgctgctgggcagctggactctgggagtcggagaaattgaaaaaggttctgggagccgcctaa

SEQ ID NO: 25834 - DNA, 330 bp, Oryza sativa
  Clone ID: PAT_MRT4530_30682C.1
atggcgcgacgtcgcatcctacccctcctcctcgtcctcctcctcaccgtcgccgtggcaacgtcgtcggcgtccgcctacggcgccgatgatggcgtgaccgtgatgaggcgcgttctggacaccgccgcgcctgcaccggccccgggccccgcccccggcggcgccatggcgaacacgacgacgagcgggtacatcagctacgacgccctgttcgcggaccgcgtgccgtgctcgctgcgcggcgcgtcgtactacaactgccatcccggcgcggaggccaacccctacacgcgcggctgctccgccatcacgcagtgccgcggctag

SEQ ID NO: 25835 - DNA, 1185 bp, Oryza sativa
  Clone ID: PAT_MRT4530_30683C.1
atggccgcagccgccgcctcaactgtgccccagtcgtcttccaccagcagcacaccgcaaaacaccatctccactcactccactgagcttgtcaggggctcgcatgagttcaccgtcgccggctacagcctacagaagaggaagggcgccgggcactccatcaggtccggctcattcgaggtcggtggatacagctgggcgatccgattctaccctgctggcagcacgaaggaagaagaaagacacgtgtccgtgtacctcgagctgcgaagcactgtggtagagaaagttaccgcgaggttcagtttccacgtccatggcgctagcgcgagctcgttgcatatgcgcggtagttttgacgactacacgcctaccagcaaatcatgggggtacccgaaatttatggagatagaaaccgtggagtcggagtacctgatcaacgactgcctgacgttgctctgcgacgtggaggttgtcaagacggtgaagaccggagcaaccattagctgcttcatcacggttccgccgccggccatctgccgtgatctcgagctgctggtggggagcaaggagggctccgacgtgacgctccagttggagcagagcgagtacgacgctcacagagcggttctcgcggcgcggtctccggtgttcagcgctcagttcttcggcccaatggcggacgaggacgccgccgccgccggcagccggaggaacgtgcggatccacgacatcaaaccggcggtgttcgaggccgtgctccactttgtctacaccgacacgttgccgccggccaccacgagctggtccgcgagccaccgcgacaagcgtcctaagctcagcgacgtcgcggccgccagctgctcggaagaagaggtgagagtgatgatcggagagcggctcgcggcggccgacagatttgacctggagaggatgaggctgctgtgcgaggacgcgctgtgggagaccatcgacgtggcgaacgcggcggcgacgctgcggctggctgaccggcaccattgcccgcagctcaaggagctctgcatggagtacatcgcctcggctggggtgttggcggccgtgatgacaaccgaggggttcagggagctcaagctggactgcccctcacttctgatcgagatcctggagaactttggaaaacgcagcgaggccgatgaggaataa

SEQ ID NO: 25836 - DNA, 597 bp, Oryza sativa
  Clone ID: PAT_MRT4530_30684C.1
atggcgaggatgggcggtgggcgtgggcaggcggcgcggatgacaccacgccggagcgtcgacaggctcacggtggagttcattgacaccaacagctcgaaccacatcaaccgcctgatcaacctccgggagcttgtcgtcgtcgacggcggcgacctgaccatatgcttcctccactacgtacctccccaatctcgagacggccagcgtccagaggacagcttggagctgtactgccccgacgctgcgccgcacctcgcgcacgccagcatcgcctttcgcgtcggccagcaggaagggaacgatggcttgctgccattgctggagaggttcaagcgcgacgccgcgctgtccgcgctcgagataaggacagcgggcggtggtgccgtggtggatgcggctggagggatacacctaggcgcgtccgtggtcctcgaagatgagcggatggaggtggggcttgggatggggcggcggctggcatcccgagcggtcgccgcctccgtgtccctcgccgccactgctccctcccagaccgcggcgcagtccacgccgcccgtgcacgcccaccgcccgttctcgcgctgtcctcgctga

SEQ ID NO: 25837 - DNA, 692 bp, Oryza sativa
  Clone ID: PAT_MRT4530_30685C.1
atggagctagcaaccgcggcgatgggcagcctgctctctaggctggccgagctgctcagtttggaggagaaccagctgcaggagggcgtaaggaaccgggtcaggcagttctctaggggtctcaagaccatggataccaccctacgcttggtggccaacattccacgggatcatcagcttgacgagcaggtcaggctctgggctcacgatgtgcgcatgctgtcctacgacctggaggacgtcgtcgacaccgtcctcatctccttgcgtgtcggctctgaccccgagcaagccgaccttgagatgctgatgcgcctcgtggcgaagatgaatgatcagctgttcaatgggagcgtggagtacggtcagatgttctccgacgccgtcgcgaagcagcgacttcgatatgtggctaccaagcatggcgcaggcaattacactgctgttggtcatcctacccatgatccatacacaaaggcaatgtcaacaaagcttgttggcattgacggaccaagggatgaggtcatagagatgctgtccatgggggatcagagcaagttgaagatcgtctccgttttcggatttggaggcttgggcaagaccactcttgtgaaagtaatctatgacaagcttgcatgcctgcaggtcgactctagaggatccccgggtaccgagctcgaattcgccctata

SEQ ID NO: 25838 - DNA, 1249 bp, Oryza sativa
  Clone ID: PAT_MRT4530_30686C.1
atgtttacggtctatttttctcagaagctatcatcactcgctaaattatttattcaattacagcaaagcaatcctaatcctaatccatttgaagcagaaattgttttagtgcaaagtgtaggaatggcacaatggttacaaatgcaaattgccaatcaaatagggatcgcaggtaactatgaattcccttttcctacgagttttttatggcaacaatatcgtgtcctctttcctgaacttcctactgaaaatatttttgaacgtgaaacggttacttggcgtttaatacgtttaattccagattatttatctttacctgaatttcaatctttacagcactatttaactaaagattcgcgtcaataccaattaaagctttatcaattagctaaaaaagtagcggatttatttgatcagtatttagtttatcgtccacattggttggttcattgggaaaatgatcggcttgagattgttcaagatgaaattctgacccatgcaaatttaaaagtgaaaaataccaaagatatttggcaaaatttaagttggcaggctattttatggcgcgcattaattaatgatattaaattagattgtgatgaatcggtgtttgtgacttcacatcgtgcttatttgcaagaacagtattttaataaattagataatttaacagaaatagaaaaatcaaaattacctaagcgggtctttatttttggtatttcctctttgcccgcgacgcaattagctgttttaaaaaagctcagtgaacattgtcaaattcatctcttctttttgaatccaagtgcagaatattggggagataatgttgaagatcgggtattagagaaattagcacttaagcagaaaatgaccgctaaagaattagaagcgttatttgtacagaaaaataatcagttattatcaatgtggggtaagcaagggcgtgattttttagcacaaattcttgagcaagaacccgaccaaattcttgatgtttttgatgcttgtgaaggcgattcaaatctgattaagttaaagaacgccattctttcttttgataatcctcaacaattattgcttgcttcgcaagatgattcagtacagtttcactcttgccatagcattatgcgagaagtggaagtattgcataaccgtttattgcaaatgtttgctcaagatccaacattggctgcaaaagatattattgtcatgtcagccgatattaaccaatatgcgccttatattgaag

SEQ ID NO: 25839 - DNA, 561 bp, Oryza sativa
  Clone ID: PAT_MRT4530_30687C.1
atgggtgcgaccaacaaaaccatgcacccacagcccaccatggctgacgtcatcaaagggggggtggtgccgacaggcggggcccgcatgtcagcggctcaaggggagagaggggcgccggcaagtggggcccccgggtcagcggctcaaggctgccggtccaccggaccgacggcccagatcgcccccgaggccgatcggacgggcggcggcgacggcgtggggcgggattccgccggccaacgcggggaggtggaggtggagagagaggtgggattcggaattcgaatcctggccatctcgggcgcgggcgcgagcgggagagagggggagtgggtgcgggaggcgcggcgcatgcgcgggcgtggccgacatgacccggaggaggcggggacgttggcacagcggcggtttcggcggtggtggcgacgtggggcgggcagccggaggaaggggacgaccccgacaggtggggcccacctgtcggcgtcccggggagagagggaggggcggcttgggccggcccacaaggaggagggcgcgcgcggcggcggggcttag

SEQ ID NO: 25840 - DNA, 984 bp, Oryza sativa
  Clone ID: PAT_MRT4530_30688C.1
atggcgagcgtttgttccgcggcggcggtgtcgctcgacggcgccgtggcgggcgcgacgacgacgacggccatcgaggacattccgggcgacgtgctctccctcgtgctacgccggctcgacgacggcgcctccctggccgcgctcggctgcgcgtgctccgccttccgcgagctcgccgccgacgcggagacgtggcgcggcctctgcctcgcgacgtggccgtcgctgcgtgacgtcgacggcctagacgaatgcggcggcgtcaccggcggaggagggtaccgggcgctcttcgccgacgcgttcccgctcccggcggaggcccgcggcttggtgccgtcgtcggcctccctcctcccggcccggctcgtctccgccgtcgacctgcaccacggcgaagtctgcctcatgtcgcgcgtcgtggagacggacgcctcgtcggagtggttcttgggctcgccgttccgcgtcgacgcgctcgtccaggagggcttctcggcgccggcgccgatcacgccggccgagctgacgctaagctggatactcatcgaccccgccaccggccgcgccgtcaacgcctcgagccggcgtccggtgtccgtggaccgggagtggctcgccggggagaccgtggcgcggttcaccggggtgctcggcggcggcgtcgtcgcgctcgacgcggcggtgacatgcgacgaccggcacggccacgtccgggaggtgagcctgcgcgcggaggacggcgatggcggcggcgtcagcgggcggggcgtgctggccgcggtggcggcggccatggagggcgcgaggcacggccgcggtgcggaggcggcggcgtggcggcggtacgaggcgttcgcgagggggagggcggcgaggaaggtgaagaaggcgaggcgagacggcgccgtcgacttcttctgctccggcgtcgccgcggcggcgttcgtcggggtcctctcgacgctgacgctccggtga

SEQ ID NO: 25841 - DNA, 2868 bp, Oryza sativa
  Clone ID: PAT_MRT4530_30689C.1
gttattgctatcagtcagtctaacagccatcatgtccatttaacaaaatatctaacaacccagatatgaatcgctttgtaaattcaactcaagcagattaacaaatcctaattccaactgaacttgcagataaggaatgagcaagtaataataagaagaaaaaattggtttaaaggcatgttgcccatatttagagggaaaaaagtgaaaatgtcttctagctctagtcattcctctccgaccaactactgtaaatagtgcataataaaaagataaatccaatgaaatatattacttgtgcaacccaacatcaggatggcctcaattcattcatcgcgccttgtatatatcagctaactcattcatatccctcaataattaacatccatcattcaaaaaaaaaacacccactctaaaaaaatctattgcactcctagcactgcaatcagcatacatgtgtactgcattttgttctattgcactcctagcatgtccactttgttagctgtgtgcttcaaaatcttaggtgctggcattttcagaaaataaacatgaagcacccacttgccatgtgtagatataagaaaaataagggcaacagatgattaaatatagttgtggtttgcacagtattaaggatttaaggtggggatttctaccagatcatttgaagtgtgcctctgaatttgctgagtttgttgcctagttaaaacaacaacaattaggcatcacattcataagttgttccactttgtttatcatatacttcaaaccctcctataagatttacagcaaatgaaagcacacactatacaacaataatttgcttctgtagaacagaaatagcatatttcagaaaaatataggtattatagttccagctaattaagatgagttaatcaggatgttgatggtactaataatgacatacctgataatgtctaagttgattctcaaatgttttcatgaccaaaggctgacagtgttgtattggcatccaaagttcttactcttagttttgtaccatcctgaggcatttcaatttcttgccagttatttatctgtttggtagtcaccgaatccaaattcagttttctttttaaataaatagataatatctatgtgcaccaaggtaatcaagatgactgatggcaaactaaaccagcagcatctactggtatgcaattgccgctatgctgtggagcttcattggtggctcttgtgtgagaggcaaagcaactgtagatggtcgaccacctcttatacctcttaaacttttatcctgaaagataaaagaaatttgagttacttgccaagaacctttttggctgcgtacaatgctattcttgcttgatgccgtcgccggccagagcggcttcaagcttccgtgcagcaccgtattactcatcttgccaaatccagcacagtgttggaaagaagaaagatgagggtggggagcagagcatttccccatggagcttaccgcgacactgccgatgagcctcatgtgctagccctgcccttgcctccgggtgaccggatccgccggcaaggaggtcgtggctacccgaatccggcgagcacggtctaccctccgccggaactggcctcgcggtggcaagggggagcggtgacacaggtggtgaccaccaccgccttcctccctcctccgcctcgccgccgcccgcgcagaccgccggaaaccacgcggctgagaggaaggcggcaacagggccttccatctccctcgaggtcgcgggtcggtgcctacgaccccgaccagatgggggtgacgacgaagctacagaggccgtcgcagggcccgccccgctccatcacgcccacccttgcctgggagcgtcggctagagaaaagctacactacaagcccagccgttgcccacgctggcttgtgggctgacgtcatcaaaaagggggagtggtgccgacaggcggggcccgcatgtcagcgactcaaggggagagaggggcgccggcaagtggggcccccgggtcagcggctcaaggctgccggtccaccggaccgacggcccagatcgcccctggggccgatcggatgggcggcggcgacccggctcggctcggctcaaggccggccgaccggccacggcgatggcgatggcgacggcgcgcgcgcgcacgcgttgccggcgacggcaaccggcggcgcaaaggcggcggctcgacccggcgcggctaggagggagagggaggggaataaaggagggggaatgcctcaccaagagtggccggcgtggaggaggacgacggcgaacggcgacggcgagccacgggaggacaacgacagcgggcggacgagctccgagatgccctaagagaggcaaagagagagattagagggagaggggtggaccacggcgagcggaaaccatggccgaaggcggcggtagaggtggtgctcaccggagtgcaaggggatgcgggttccggcgacggacctcgatggaggaggggcggacggggtaacccacgtggccggtaggggcgggattccgccggccaacgcggggaggtggaggtagagagagaggcgggattcggaattcgaatcccagccatctcgggcgcgggcgcgagtgggatagaggaggaatgggtgcgggaggcgcggcgcatgcgcgggcgtggccgacgtggcccggaggtggcggggacgttggcgcggcggcggtttcggcggtggtggcgacgtggggcgggcggccagaggaaggggacgaccccgacaggtggggcccacctgtcggcgtcccggggagagagggaagggaggcttgggccggcccacaagaaggagggcgcgcgcggcggcggggtggactgggcc

SEQ ID NO: 25842 - DNA, 192 bp, Oryza sativa
  Clone ID: PAT_MRT4530_3068C.1
atggcgcagaaatactcctgtacagacgaccacggtgacctctggagcgtgaatccctcatcgctcgggaaggagcgacgacggcaacagccgcggcctcaggagcatggatccaccaccgccaggaatgggagcggcgacaacgacctcaacatcctgggagcgtggatctgccgctatcggcttctgtag

SEQ ID NO: 25843 - DNA, 186 bp, Oryza sativa
  Clone ID: PAT_MRT4530_30690C.1
atgcccgccggattcggtagccacgacctccttgccggcggatccggtcacccggaggcgagggtagggctagcacaggaggctcatcgacagtacggcggtggtcgaccatctacagttgctttgcctctcacacaagagccaccaatgaagctccacagcatagcggcaattgcataccagtag

SEQ ID NO: 25844 - DNA, 458 bp, Oryza sativa
  Clone ID: PAT_MRT4530_30691C.1
ctggatgcgtcggctaaagaaagggaatcccggacatggccggtaggggcgggattccgccggccaacgcggggaggtggaggtggagagataggtgggattcggaattcgaatcctggccatctcgggcgcgggcgcgagcgggagagagggggagtgggtgcgggaggcacggcgcatgcgcgggcgtggccgacatgacccggaggaggcggggacgttggcacagcggcggtttcggcggtggtggcgacgtggggcgggcagccggaggaaggggacgaccccgacaggtggggcccacctgtcggcgtcccggggagagagggaggggcggcttgggccggcccacaaggaggagggcgcgcgcggcggcggggtggactgggccgacggcccaagaagaggaaaaggagggaaaagaaaaagaaaaggaggaaaagattttccctgggatt

SEQ ID NO: 25845 - DNA, 122 bp, Oryza sativa
  unsure (1)..(122): unsure at all n locations
  Clone ID: PAT_MRT4530_30692C.1
agtcaaagggtttcattgaattcatnnnctttactcaaaataacctggctgataataggctgcttgcacaaattatcaatacacactgatactgaaccaggtacgccatctgactatacaca

SEQ ID NO: 25846 - DNA, 630 bp, Oryza sativa
  Clone ID: PAT_MRT4530_30693C.1
ggcccagtccaccccgccgccgcgcgcgccctccttcttgtgggccggcccaagcctcccttccctctctccccgggacgccgacaggtgggccccacctgtcggggtcgtccccttcctctggccgcccgccccacgtcgccaccaccgccgaaaccgccgccgcgccaacgtccccgccacctccgggccacgtcggccacgcccgcgcatgcgccgcgcctcccgcacccattcctcctctatcccactcgcgcccgcgcccgagatggctgggattcgaattccgaatcccgcctctctctctacctccacctccccgcgttggccggcggaatcccgcccctaccggccacgtctgggattcccctcccctatttaagctccatcgccactccctctctctttttccccatctcgccgaactccctcgtgctccccatcgctcccgcgccgtgcttccacccgccgccgccgcttccgctactccgaccgccgctagccgccgctaggctcgccgccgcaccacgccgtcgccgccgccgggttcgcgtggccaagggttaccccgtccgcccctcctccatcgaggtccgtcgccggaacccgcatccccttgcactccggtga

SEQ ID NO: 25847 - DNA, 668 bp, Oryza sativa
  Clone ID: PAT_MRT4530_30694C.1
ctgcaggatcggcacgaggatttggatttgttaatctgcttgagttgaatttacaaagcgattcatatctgggttgttttatattttgttaaatggacatgatggctgttagactgactgatagcaataacaacacttctttgaaaataagaggggtagacaaagatagttcctccatcctccctcttgtttcttccccacatgcagttgaggctaacggtgatttttgacggaaaacgcgatggagtggcacggttctaatttccccaaattccagtagcatgtagccgatatcgtgaatagtagtaacatttatctaaaatggcgtatttgtagtggcatggatccaattaacccatataaaaatgagatctgttactttgttttctagatgctactggccacccccatatttatcttgcatgtggcaatgaataatgtattgtattgcatttgtccacaatttgatcatgcaaagttataaaaagtggtgtggtggtcttgccgaggtgggtttcaaagtttctatatcatttttttattgatgtggttcaagtgttaaagttgcttggatttttcattgctcagaattgtagattttcattagtgaaaattgcaagtgacaagtttggttctattggtcaatataatgtttttttgtgatattg

SEQ ID NO: 25848 - DNA, 1181 bp, Oryza sativa
  Clone ID: PAT_MRT4530_30695C.1
aggcggggcccgcatgtcagtggcgcacggggtggtcggtctaccgtggaccgggaccacgcggatggtccaccgccggtccacgggatcgacggcccggatcggcccggggccgatcggacagtacggcggcgacctggctcggctcggctcggctcaaagccggccggccggccatggcaagggtgccggcgcgcgcgcgcgtgttgccggcgacggcaaccgacggcgtgggcagcggcagcgaacggcgccccggcggcggcgagcgcgggtggtggcggcgcacggggaaacggggaaggaaaggaaaggggagggagtcctcaccggagggggtggcgactaccggcgacgaggagcgatggagggaggtcgacaagcggcggacagggtccgggacgacctaaagaacaaaaaggaaaagattagagagggagagaggggccatagaaggcgggaacgctggccgaaggcggcggacatggcggctctcaccgtagcacggcgggaatggcgctccggcggcgaacctcgacggaggaggggtggacggggtggaccttggccacgcgaacccgacggtggcgacggcgcggtgtggcggcgagcctagcggcggctagcggcggccggagtagcgggagcggcggcggcggatgggtgcacggcgcgggagcggtggagagctcgggagagggaggaggaactcggacgtggccggtaggggcgggattcgtcggccgacgtggggaggtggaggtggagagagaggcgggatttggaattcgaatcccggccatctcaggcgcgggcgcgagcgggagagaggaggagtgggtgcgggaggcgcggcacatgcgcgggcgtgaccgacgtggcccggaggagacggggacgtgggcgcggcggcggtttcggcggtggtggcgacgtggggcgggcggccggaggaaggggacgaccccgacaggtggggcccacctgtcggcgtcccgagggagagagggaggggcggcttgggccggcccacaaggaggagggcgcgcgcggtggcagggtggactgggccgacggcccaagaagaggaaaaggagggaaaagaaaaagaaaaggaggaaaagattttaggaccatctagatcagcatcaacagtactggaacccgacgaacctggccgg

SEQ ID NO: 25849 - DNA, 2188 bp, Oryza sativa
  Clone ID: PAT_MRT4530_30696C.1
atgtgttgggcggtcagaccgccggttgagggccggtcagaccggcggtgtgtgaacggtctgaccggcaggtccgagttcgaccctgtttcgtcaggtttcgagccatctcatgtgataccggtcacattggatgactttgaaggagaggatcgtaaaactgttgaggagtacatcaacgagctcacacgggaggcgttgatgagattgactactaggactcgtcaaggcgtgatcatcaagcccgggccacgtcccaagctcgctcccgacgtggctagggcggcgctcacggccggtccgaccgggcctgacggccggtctgaccgcgacacagccgtcggtccgaccggccagatggccggtcggaccgggtattatcccgtcggtccgaccggccagatggccggtcagaccgggtattatcccactggtcagaccggctctcaggcaggtccgaccgcgcaatatgacgccagtcagaccgggccctgggccgagaagagagaaggaaagcgcaccatggtggaagaaaggacttcggaggtgattactatcaaagtagggtcccatgatgtgcttataccttctggagatggagttggaaagtccccaagcaaaaaatccgaagccggtaccagctcctcgcagtcgaccggtctgaccaggccctctggccggtctgaccgcggccatgtagccggtctgaccgggatatcaggccagtctgaccgccgacttgatagcggtccgaccgacgcctcaggccggtctgaccgtgcgccaagtgttggtctgaccggcacatttggccggtctgaccggtggtctgcgaccggtctgaccgggctccagcgccggtttgatgggagggctgcaaagggcgatgtgagggcttcatcgtcttcaagcaaggttaatagaggatattatttaccttctggaacagagccgaatcctatgtggatgcctaaggatttgacggctacgcaaaagagaaggttgcaacgtcttcgggcccatgaattaagggagaaaaaggccgaagagcaaagagataaaaggttcaatgagttgcgaccaccaccggtatggaggcctaagtccatagagaaggcaaaaccgattgatgtagagaagaaggaagaacaatcggttgatgaaagtgaatcgtctccaaaagaagacatggatatcaacatggtatgtatgttgcctatggagttttgtgctatggatgaagccgaggttgcccaactctcattaggtcctaaagacgcggtttttgagaagcccgatgaatcaaaccgtcacatgaagcctctctacctcaaaggccatgttgatggaaaaccggtctctaggatgctagtggatggaggtgccgctgtgaacttgatgtcatactcgttgttcaagaagttggggcgcgaggatgatgagttgaagaagactaacgtgattctcaatggcttcaacggtgaaccaacggaggcgaggggtatcttttcggcggagctcaccgtgggaaacaagacgttaccaaccgctttcttcatcgtcgatgtgcaagatggtaatgccggctacaatcaaatctttatggcggaagaggatatgtacaagacggcttttaggtgcctgggttttgttggtttatttgagtgggttgtcatgacctttgggttgaagaatgccgccgatttgagattagcttttgagaggatgcgccggtatggtttaaagatgaacccacttaaatgtgcttttggtgtgtcggcggggaagttcttaggattcatggtgcatgagagaggagttgagattgatcctaagaagatagaaaagattcgtgatttcaaagcgccgacatgcaaaacggaggttcaaaagttgctaggtaaggtgaattatttgaggagacatattgctaggcgtgataattctagagcaaatgacttggcacaacaagcatctggttataatgtgaagaaggggttatttctgatattagaagagccggtgcttgattttagatctttgtgcgaaattggcagaattggggaccaagggcggtctgaccggcattgcacggccggtctgaccggtgaccaggggcggtctgaccggccgcatgccgccagtctgaccggcatccctgagtggtccgaccggccctgcgtggccg

SEQ ID NO: 25850 - DNA, 1536 bp, Oryza sativa
  Clone ID: PAT_MRT4530_30697C.1
atgctgctccacatcctcggctcctccaccctggccccggcgaggccctcccctctcaggcagagcggcgctgggacgggggccgcgacggtgaggtgcgcgtcctcctcctcgaacccgtcgccatcgtcgtcgtcgtcggcggccgcggcggcggggaagcaggtggcgaaggtgcacagctacggtgcgctggactacgagcggagagccgcgctgcggtggagcagcctgtaccggcgcatcgcggtggggcacggcggccggccggtggggcgcacgctgggggcctgggatgagggcgagcgccgtctcgacaagtgggagctctgccgcatcgcgagggagctgcgcaagttccgccgcttcaacctcgcgctccaggtgtatgattggatgacagagcgcagagatagattttcactctcatctagtgatatggcaatccagttggatctgattgcaaaagtacgtggtgtttcacatgctgaagaatacttcgaggagcttcctgatccattgaaagacaagcggacatatggttctcttctcaatgtttatgcccaagctatgatgaaagagaaaacagaaagcacatttgagcagatgagaaaaaagggatttgcaactgatacattaccttttaatgtgttgatgaatttttatgtggatgctgaagaggctgagaaagtgtccatacttattgatgagatgatggaaagaaacgttgcttttgatgtctgcacttacaacatttggataaagagttgtgcggctatgcaagatgctgatgcaatggaacaagtctttaaccagatgattcgcgatgagactgttgttgcaaactggactacttacacaactcttgctagtatgcatattaagttggggaactctgagaaggcggaagaatccctgaaagaagctgaaaagagaacgacaggacgggagaaaaaatgttttcattatctcatgacactctatagccacctcggcaagaaggaagaagtctaccgcgtttggaattggtacaaagcaactttccccacaattcataacctgggttaccaggaggtactatctgcccttgttaggctaggagatattgagggagctgaacttctttacgaggaatgggcatccaagagttccagttttgatcctaagactatgaacattttattagcgtggtatgccagagaaggctttgttaccaaggctgagcaaactctgaacagatttgttgagaaaggtggaaatccaaaaccaaacacctgggaaatccttggcacagcatacctgaaggacggtcaatcatctgaagcactgtcatgtttggagaaagccactgcagttgcaagtccaagcaaatggagaccaagacccaccaatgttgagagcctccttgcgaatttcaaggagaaaaacgatgcagaaagcgcagacaggttgatgaatgtacttagaagtagacggtgcgaggagaatgaagagtacaagtcattgatcaatacctatgcctttcaagacacatga

SEQ ID NO: 25851 - DNA, 4717 bp, Oryza sativa
  Clone ID: PAT_MRT4530_30698C.1
atggacccaattaatgggaatgataagaaggctgaaaaatattggggagatgttgctacagaatacaataaaaccacaccacagaatagatggagaagcccaaagcaagccaaggagcgttggcacaaactcaacacacggacggatctgttccaaggctgttggttgaaggctaagcgcacatatactagtggttactctgaccaaatgtggattgacatggcccataagttcaatgaggccgataacaaaaaattaggatggttcgttctaatagatgtatggtacgcatgccgtgatcagcctaagtggaatgcatataatgatgcactcaagagagatctaaaaggaagtcgtctaataacagatgttgaagaaaccccacggccaatcggacaaaaggctgctaaaagagctgcacgtgaaagcaagggaaagtccaacgatatttctgatgctgaagagatatacaagttagaccaagtccaatctgatattcacacaagacgcatgaagatgatggaaatgcaagagaagttatctagtcgtcagttttctcttagtttgtccatctttgtcggtttgcaccgtacaccgtacgccgacactgcgagagtgcgacacctctttgtagatcgagttggttggcgactccatatcaccgcaaggcgtttaggtgttgcgatcgtgcttgtcgacttgtcacaaaaagttaccaacacgatttttggcgactccgctagggaagtcctatggccggagtacatcaacgagctcacacgggaggcgttgatgagggcaagcactaggacccgtcaaggcgtaatcatcaagcccggaccacgtcctaagctcgctcccggctcggtaagcaatgatgaggtatcacaatctatccaacaacaaattgaatctacaatagattcatctatgattatttttaaagatcagttagatgcaacttttgagggtaaatttgatgagtttttaagggttaaattcggccctcttttggccgatcacatggtgaaaaataaagcctcttccactgctaaccaacctcctataggtcaaaccgaaggaacggtgtatacggccggtccgaccggccagacggccggtcagaccgggtattaccccggcagtcagaccgggactcaggccggtccgaccgcgcctcttgacgccggtcagatcgggcattgggccggtcagaccagcgcaattattcctatacaggggatagatcctatgactaatgctagttatttgtatcatcttagaacatttgattcccctgtatctactgctacgagtagtccccaagttcccccacatgttcccaatgcttataacgatgttgctaggggatatcctcccgatactagacaaggccaatataataatattgcgccacaaacacaacctattaggccaccaaatccaccgccaaatcaacaagggcctaataatatggaggatataattagtgatattatgaggaatagattcgggatcaaaactaggaatcgtgctagaacttacaaaaagccgtatcctgattattatgataatgtgccgtttcctcgtaattatagagttcccgaatttgccaagtttaatggtgaggatggtaagaccacatgggagcatgtaggtcaatttttggcgcaatgtggtgaggctaatagtgatacttttaaattgcgcttgttttctttatctttgtccggtaatgcttttacatggtttacttctttaccggcaaaatctattcatacttgggctcaattagaagaaaaatttcatgattatttctatactggagaaactgagcttaggttatgtgatttgacatcggttaagcaaaaatacaatgaatctgtcattgattatattaagagatttagggatgttagaaaccgatgttatactttgaatataactgatagagatttggctggtcttgcttttaatggtttaattgctcctcttagagaaagactagatggccaagaatttcttgatgttagtcaactcatgcaaagggctctggctcaagaaagtcgggttaaggataataaaaaatttgctagaccatttgacaaaaagcctaatgttaatgtagttgattaccctgaggctagtgatagtgaggaagagggtgatcatgatatttatgttgccgaatggtcatggactaataaaaataagccttttgtttgttctaacttaatgccgactccacgaaagatcggcaaagttcaatcggccatagatgaaggacgattgaagttcaccaatggttccaagatgaagcttgatgatgatccttttccggtgaacacaattaatttcaatgataagaaggtgttgattcggccggagcaagccgaatctactaagggaaaggaagtggtcattggtgaaccgaggcctaagatgatagtgccaaagaagccggaggtgggtgtttggaaagaaaataagagtggagcttcgacttctaaggcccctaggaagaccaaggtgacttttgatatgctcttggagaaatatgagaggcaaggtggtgagaagattcgcaacagagggaaaagaccaagatcacctcctagggagcgatttggtcattcaccaagacggtcgcattcaccttcatatcatcatccacaagacatgtcatggggtccctatccaaagccgccgccgggttatccttatccctacttcaagccatggggggcaacgccgccaatgtacaattatatgcctccaatgcaattcaaccaagggtggggaggaccaaggaggccaatccatgagcgtctgtcttcaccaaacaatagccggttttatggtaagaatcgggctaatgaagaaaagagggaaggaaagcgcgtcaagatggaggaaaggacttcggaggtgattactatcaaagtggggtctcatgatgtgccaataccttctggagatggagttggagtgtccccgaacaagaaatccgaagccggtaccagctcctcgcagtcggccggtctgaccaggccttctggctggtctgaccgcggccatacggccggccggtctgaccacgcgccacatgtcggtctgaccggcgcgtctggccggtctgaccggtggtctacggccggtctgaccgggctccagcgccggtttgatgagagggctgcaataggcgatgtgagggcttcatcgtcttcaaacaagattaatagagggcattatttacctcctggaacagagccgaatcctaggtggatgcctaaggatttgacggctacgcaaaagagaaggttgcaacgtcttcgggcccaagaactaagagagaaaaaggccgaagaacaaagagataaaaggttcaatgagttgcgaccaccactggtatggaggcctaaatccatagagaaggaaaaaccgattgatgtagaggagaaggaagaacaatcggttaacaagggtgaatcgtctccaaaagaagacatggatatcaacatggtatgtatgttgtctatggtgttttatgctatggataaagccgaggttgctcaactttcattaggtcctaaagatgtggtttttgagaagcccgatgagtcaaaccgtcacatgaagcctctctatctcaaaggccatgttgatgggaagccggtctctaggatgctagtggatggaggtgccgccgtgaacttgatgccgtactcgttattcaagaagttggagcgtgaggatgatgagttgaagaagaccaacatgattctcaatggcttcaacggtgaaccaacggaggcgaagggtatcttttcggcggagcttaccgtggggaacaagacgctaccaaccgctttcttcatcgtcgatgtgcaagaggctaatttagagtggttacaaaagagggtgcaagaatatcggtctacaaagaacgatattggtgaaaccgttgaggattttgaggaaatagagaagcttggaaaagggtttacatcggccgatcctttggaagaagtagacataggtgatggaactaaaccaaggccgacttttgtaaacaaaaatatgagagccgattataaggttaaagtaatcgagctacttaaagagtatgttgattgctttgcatgggagtaccatgagatgccgggtcttagccgtgagcttgttgagcatcggcttccaattaaaccgggttttaggccttataagcaaccacctcgtcgttttaatcatttactatatgaccgggtcaaaaaggagattgatcggttgttgaaggcggggtttattaggccatgtcgttatgcggagtgggtatctagcatagtcccggtggagaagaaggggagtggtaagattagagtttgcatagattttagagatttaaataaagctactcccaaagatgaatatcctatgcctatagccgacatgatgattaatgatgcctcgggtcataaggtgattagctttttagatggtaatgccggctacaatcaaatctttatggcggaagaggatatgtacaagacagcttttaggtgcccgggatttgttggtttgtttgagtgggttctcatgacttttgggttgaagaatgccggtgcaacatatcaaagggcaatgaatttgatctttcatgatttgttaggtattatcctagagatctatattgatgatattgttgtcaaatcggatg

SEQ ID NO: 25852 - DNA, 4470 bp, Oryza sativa
  Clone ID: PAT_MRT4530_30699C.1
atgacgaagccgccatccaagacggaggtggagccatccaatatgataccggtcacattggatgatttcgaaggagaagaccgcaaagctatggaggaatacatcaacgaactcacacgggaggcgttgatgagggcaagcactaggactcgtcaaggcgtgatcatcaagcccgggccacgtcctaagctcgcccccgatttggtaagtaatggtgagataacacaatctatccaacaacaagtagcatctacaatagattcatctataattgcttttaaagataagttagatgcaacttttgagggtaaatttgatgaatttttaagggttaaattcggccctcttatggccgattacatgtcaaaagataaagcctctaccactgctaaccaacctcctatagatcaaacgggtagtagaaccgatggagcggcgcacacggtcggtccgaccgggcctgacgaccggtcagaccgtgacctagccgtcggtccgaccggccaaacggccggtcagaccgggtattatccccgcggtcagaccaggactcaggcaggtctgaccgcgcctctggatgccagtcagaccgggccctgggccggtcagactgacgcgattataccgatacaggggatagatctgatgactaatgctagttatttgtatcatcttagaacatttgatccctctgtatctactgctgcaaataatccccaagttcccccacatgttcctaatgcttataatgatgttgctagggggtatcctcccgatactagacaaggccaatataatcatattgcgccacaaacacaacctattaggccaccaaatccaccgccaaatcaacatggacctaataacatggaggatataattagtgagattattaggaatagattcgggattgaaactaggaatcgtgctagagtttacaaaaagccgtatcctgattattatgataatgtgtcgtttccccgtaattatagagttcccgaatttaccaagtttagtggtgaggacgaaactgagcttaggttatgtgatttaatatcggttaagcaaaagtataatgagcctgtcattgattatattaagagatttagggatgttagaaaccgatgttatagcttgaatataactgatagagatttggctggtcttgcttttaatggtttaattgctcctcttagagaaagactagatggccaacaatttcttgatgttagtcaacttatgcaaagggctctggctcaagaaagccgggttaaggataataaaaaacttcttagatcatatgacaaaaagcctaatgttatgattgattaccctgaggctagtgatagtgaagaggagggtgatcatgatatatatgttgctgaatggtcatggactaacaaaaacaagccttttgtttgctctaacctaatgctgactcctcgcaaagatcggcaaagtgaggttaaatatagttttgatgtggctaagtgtgataagatttttgattatcttttacaagagaaacaaattagattacctaaaggccatgtcataccatctcaagaagagttgaaacgtcgagcatattgtaaatggcatgattctcattctcattctactaatgattgcaatgtgtttcgacgacaggttcaatcggccatagatgaaggacgattgaagttcaccgatggctctaagatgaagcttgatcatgatccttttccagtgaatacgattaatttcaatgataagaaggtgttgatccggccggagcaagccgaatctactaagggaaaaggagtggtcattggcgagccaagacctaagatgatagtgccaaagaagccggagattggcgtttggaaggagaataagagtgaagcttcaacttctaaagcccctaggaagaccaaagtgacttttgatatgcttttggagaagtatgagaagcaaggtgacatgtcatggggttcttattcaatgccgccaccgggttatccttatccttattatataccatggggggcaacaccgccaatgttcaaccatatgcctccaatgcaattcaaccaagggtggggaggaccaagaaggccaattcatgagcgtttgtcttcaccacacaatggccggttttatggtaggaaccgggccaatgaagaaaagagggaaggaaagcgcatcaaggtggaggcaaggacttcggaagtaattaccatcaaagtggggtttcatgatgtgccaataccttctagagatgatgttggagagtcctcaagcaaaaggtccgaagccggtaccagctcatcgcagtcggccggtctgaccaggccttctggccggtctgaccgcagccatacggccggtctgaccgggccatcaggccggtctgaccaccgacccgatagcggtccaaccgacgcctcaggccggtctaaccgtgcgccaaatgtcggtctgaccggcgcatctggccagtttgaccggtggtatacgtccggcctgaccgggctccagcgccggtttgataggaggtttgcaaagggcgatattggattcatcgtcttcaagcaagaaatgagagagaaaaaggccgaagaacaaagagataagaggtttaatgagttgcgaccaccaccgttttgtgctatggatgaagccggggttgctcaattctcattaggtcctaaagacgcggtttttgagaagcccgatgagtcaaaccgtcacatgaagcctctttatctcaaaggccatgttgatgggaagccggtctctaggatgttagtggatggaggtgccgctgtgaacttgatgtcgtattcattactcaagaagttgaggcgtgaggatgatgagttgaagaagaccaacatgattctcaatggcttcaatggtaaaccaacggaggcaaagggtatcttttcggcggagctcaccgtgggaaataagatgctaccaaccgctttcttcatcgtcgatgtgcaagagtggttacaaaagagggtgcaagaatatcggtctacaaagaacgatattggtgaaaccattgaagattttgatgaagtggagaagcttggacaagggtttacatcggccgatccattgaaggaagttaagataatcgagctacttaaagaatatgttgattgctttgcatgggaatatcatgagatgccgggtcttagccgtgagcttgttgagcatcggcttccaattaaaccgggttttaggccttataagcaaccacctcgtcgttttaatcctttgctatatgaccgagtcaaagaggagattgatcggttgttgaaggcggggtttattaggccatgtcgttatacggagtgggtttctagcatagtcccggtggagaagaaggggagtggtaagattagagtttgcatagattttagagatttaaataaagccactcccaaagatgagtatcttatgcctatagccgacatgatgattaatgatgcctcgggtcataaggtgattagctttctagatggtattatcttagagatctacattgatgatattgttgtcaaatcggatagaatggaaggacacatagccgatttgaggttagcttttgagaggatgcgccggtatggtttaaagatgaacccacttaagtgtgcttttggtgtgtcggcagggaagttcttaggattcatggtgcatgagagaggggttgagattgatcctaagaagatagaaaagattcgtgatttcaaagcgccgacatgcaagaaggaggttcagaagttgctagggaaggggcggtctgaccggcattgcgtggccggtctgaccggtgaccaggggcggtctgaccggccacatgccgccggtctgaccggcgaccccgagcggtctgaccggccctgtatggaagcagaagaagattggagaattcctttgattcgatatttgaaagatcccacgcttaaggttgatcggaaaattcggcgacaagcgttcaaatacacattgcttgatgaggatttatatcgccgaaatatagatggtgtcttgttgaagtgcttagatgaagatcaatctaaagtgactatgggagaggggcataggttcgtgctagttgctacggattacttcaccaagtgggccgaagccgtgccgttgaagaatatgactcatacggaggctaatggacaagccgagtcgagtaataaaacgttgttgaagttagtgaaaaagaagattgaggaatacccaaagaagtggcatgagatgctttctgaagcattgtgggcacataggatatttaaacatggtgccactaaagtcactccttttgagttggtttatggtcaagaagccgttttaccagtggaggtaaatcttggttctcttcgttatatcaagcaagatgatttgtcaagtgaagattacaagacattgatgggagacaaccttgatgaagtcatcgacaagtga

SEQ ID NO: 25853 - DNA, 1206 bp, Oryza sativa
  Clone ID: PAT_MRT4530_3069C.1
atggcctattatgccgctgtttttgggcgcctacgtcttcaccgccggcctgcctccgtcaccgccgactggtgtcctcgcctatacggttggttggtcacatcaccgttgttgggcgtctacgtcttcaccgatcggttgcctcgtcgccgccgactgatgttaccgcctgcacggctggcctattatgctgtcgttgttgggaaactacgtcttcaccgaccggctaccacgtcgccgccgactggtgtctccacctacacggatggcctattacgccaccgttggtgggcatcttcgctttcaccgtcaaccgcctacgtcgccaccgactggatccagatccagatatgcataaaagggattcatggctttaagcttatctcctacgcttcaggaatggatcagccagaacattaccaccggctcgccgccgtcgccgccgactggtgtcctcgcctatacggttgggtggtcacaccaccgttgttgggcatcattgtcttcaccgaccggccgcctcgtccgccgccgactggtgtccttgcctatacggttgggtggtcacaccaccgttgttgggcgtcattgtcttcactgaccggccgcctcgtccgccgccagctagtgtcttcgcctatacggttggttggttacaccgccgatgttgggcatctacgtcttcaccgaccggccgccttgtccgccgccgactggtgtttccgtctggacggctggcctattatgccgccgatgttgggcgtctacgtcttcaccgaccggccgcctcgtccgtcgccgactgatgtttccgcctacacggcaggcctattatgccaccgattgtgggcgtctacgtcttcaccgaccggccacctcgtccgtcgccgactggtgtttccgcctgcacggcaggcctattatgccgccgatgctgggcgtctacgtcttcaccgaccggcttgccttcgccgccgtcgactggtgtctctgcctgcgcggctggcctattatgtcaccgttgttgggcgtctacgtcttcaccgaccggcttgccttcgccgccgccgactggtgtctctgcctgcacggctggcctattatgccgccgtttgttgggcgtctacgtcttcaccgtccggcttgccttcgctgccgccgactagtgtcttcgcctgcacggctggcctattgtgccaccgttga

SEQ ID NO: 25854 - DNA, 140 bp, Oryza sativa
  Clone ID: PAT_MRT4530_306C.1
acgcgtcgacgaggaagcctaatgttgccgccactttcatcgacgagggcatggcatgggacctcgccggcctactcatgccaaacaaggaagcagcgggaaggccgacgtcgtcagctacgagggcggtgaggcattaa

SEQ ID NO: 25855 - DNA, 348 bp, Oryza sativa
  Clone ID: PAT_MRT4530_30700C.1
atgccggcagacagcgacggcgaaagcgatccggagaaaccgctggcaaaagatactgttatcactgtaaccgtcaacgacgatgacgacgcattccccctcctccctcccggctcctgctgcccgcaggctcgcctcgcgacctcagagcaaaaaatgaaaatgggttatatctccggcttctctcataagacacacaatcataaatttaatagtaataaaaatcgaaatcccatgcgaaaaccgaagacggcaaagcgtctagctagcttgtcgcggggcagcagagttagcgggcaaaattccgtgcttgtacccatgcccgacgggtacccaatagatctcgca

SEQ ID NO: 25856 - DNA, 5898 bp, Oryza sativa
  Clone ID: PAT_MRT4530_30701C.1
atgacaaagccaccatccaagacggaggtggagccatccaatatgatactagtcacattggatgatttcgaaggagaagaccgcaagaccatggaggaatacatcaatgagctcacacgggaggcattgatgagggcaagcactaggactcgtcaaggcgtgatcatcaagcccgggtcacatcctaaactcgctcctgatttggtaagcaatgaagaggtaacacaatctatccaacaacaagtagcatctacaatagattcatctatgactgtttttaaagataagttagatgcaacttttgagggtaaatttgatgagtttttaagatttaaattcggccctcttatggccaattacatgtcaaaagataaagcctctaccactgctaaccaagctcctatagatcaaacgagtagtggaaccgatggagcggcacatacaaccggtccgaccgggcctgacggccggtcagaccgcgacttcgccatcggtccgaccggccaaacggccggtctgaccgggtattaccccggcggtcagaccgggactcaggccggtctgaccgcgcctctggatgtcgaacatttgatcctcctgtatccactgctgcaaatagttcccaagttccccccacatgttcctaatgcttataatgatgttgctatggggaatagtgctagggtttacaaaaagccgtatcctgactattatgataatgtgccgtttccccgtaattatagagttcccgaatttacaaaatttagtggtgaagatggtaggaccacatgggagcatgtaggtcaatttttagcgcaatgtggtgaggctaatagtgatacttttaaattgcgcttgttttctttatctttgtctggtatcgcttttacatggtttacttctttaccggcaaattctattcatacttgggctcaattagaagaaagatttcatgattatttctatactggagaaactgagcttcggttatgtgatttaacatcggttaagcaaaaatataatgagcttgtcattgattatattaagagatttagggatgttagaaaccgatgttatagcttgaatataactgatagagatttggctggtcttgcttttaatggtttaattgctcctcttagagaaagactagatggccaacaatttcttgatgttagtcaacttatgcaaagggctctggctcaggaaagccgggttaaggataataaaaaaattggtagaccatatgaaaaaaagcctattgttaatctggttgattaccctgaggctagtgatagtgaagatgagggtgatcatgatatatatgttgctgagtggtcatggactaacaaaaacaagccttttgtttgctctaacctaatgccgattcctcgcaaagatcggcaaagtgaggttcaattggccatagatgaaggacgattgaagttcaccgatggctccaagatgaaacttgatcatgatccttttctggtgaatacaattaatttcaatgacaagaaggtgttgattcggccggagcgagccgaatctactaagggaaaaggagtaatcattggtgaaccaaggccaaagatgatagtgccaaagaagccggaggttggtgtttggaaggaaaataaaagtgaaggttcaacttctaaaacccctaggaagaccaaagtgacccttgatatgcttttggagaaatatgaaaagcaaggtgggtggggaggaccaaggaggccaattcatgagcgtttgtctttaccaaacaatggccggttttatggtaagaaccgggccaatgaagaaaggagagaaggaaagcgtattaaggtggaggcaaggacttcggaagtgattaccatcaaagtagggtctcatgatgtgccgataccttctggagatgaagttggagagtcctcaagcaaaaaatccgaagccggccggtctaaccgccgacacgacgatggtccgaccgacgcctcaggccggtctgaccgcccgctaaatgtcggtctgaccggcgcatctggccggtctgaccggtggtccacgtccggtctgactgggctccagcgccggtttgataggaggtttgcaaagggagatgtgagggcttcatcgtcgtcaactaaacctaatagggggcattatttacctcctggaacagagccgaaacctaggtggatgcctaaagatttgacggctactcaaaggagaaggttgcaacgtcttcgggcccaagaaataagagagaaaaaggccgaagagcaaagggataaaaggttcaatgagttgcgaccaccaccggtatggaggcgtaaaaccatagagaagggagaaccggttattgtagagaagaaggaagaacaatcggttgctaaagatgagtcatctccaaaagtagacatggatatcaacatggtatgtatgttgcctatggagttttgtgctatggatgaagcagaggttgctcaattttcactaggtcctaaagatacggtttttgagaagcccgatgaatcaaaccgtcatatgaagcctctctatctcaaaggtcatatcgatggaaagccggtctctaggatgcttgtggatggaggtgccgctgtgaatttgatgccatacttgttgttcaagaagttggggcgtggagatgatgagttgaagaagactaacatgattctcaatggcttcaatggtgaaccaacagaggcgaagggtatcttttcagcggagcttaccgtggggaacaagacgttaccaaccgctttcttcatcgtcgatgtgcaagaggctaatttagagtggttacaaaagagggtgcaagaatatcggtctacaaagaacgatattggtgaaacagttgaagattttgatgaagtggagaagcttggacaagggtttacatcggtcgatccattggaggaagtagacataggtgatggaaccaaaccaatgccgacttttgtaaacaaaaatatgagagccgattataaggttaagataattgagctacttaaagagtatgtcaattgctttgcatgggagtaccatgagatgccgggtcttagccgtgagcttgttgagcattggcttccaattaaaccagcttttaggccttataagcaaccacctcgtcgttttaatcctttgctatatgaccgaatcaaagaggagattgatcggttgttgaaggcagggtttattaggccatgtcgttatgcggagtgggtttctagcatagtcccggtggagaagaaggggaatggtaagattagagtttgcatagattttagagatttaaataaagccactcccaaagatgaatatcctatgcctatagccgacatgatgatcaatgatgcttcgggtcataaggtgattagctttttagatggtaatgccggctacaatcaaatttttatggcggaagatgatatgtacaagacggcttttagatgcccaggatttgtgggtttgtttgagtgggttgtcatgacttttgggttgaagaacgccggtgcaacatatcaaagggcaatgaatttgatctttcatgatttgctaggtattatcttagagatttatattgatgatattgttgtcaaatcggatggtatagaaggacacatagccgatttgaggttagcttttgagaggatgcgccggtatggtttgaagatgaacccacttaaatgtgcttttggtgtgtcggcggggaagttcttaggattcatggtgcatgagagaggacttgagattgatcctaagaagatagaaaaaattcgtgatttgaaagtgccgacatgcaagaaggaagttcaaaagttgctagcgagtaaaatcgatgcttttgttcccatacttcacttgaaaaaagaagccgattttacttggggggcaaaacaacaagaggcgtttgaggagttgaagaggtatttgtctactccacccgttgtgcgagtgcctaaagccggaaaaccttttcggttatatattgcttccgaagacaaagtcattggtgccgttttgacgcaagaggaagatggcaaggaatatatcattacatatttgagccgccgtcttttggatgccgaaacgaggccaattctaagtgggaggattggcaagtgggcatatgctttgatagaatatgatttggcttatgaaccattgaaatatatgaaaggccaaattgtatgtgattttatagtagaccatcatgtagatattgcttatgaggaagagatttgcctagttgaagttataccttggaggatttattttgatggttcttcttgcaaggaaggtcaaggcataggggtagttttgttttcaactaatggcatgtgttatgaagcatcggttcatttggaatattattgtacaaataatcaggccgaatacaatgctttgttatttggcttacaagtcatggagatagttggagctaagtacgtggaagcttttggtgattcggaattggtggtgcaacaagtcgccggagtttataaatgcttggacggatggtacctcgattcatgtttggatattattgccaattttgataattttgctattaaacatattgctaggcatgataattgtagagcaaataacttggcacaacaagcatctggctataatgtgaagaaaggattatttctgatattagaagagccggtgcttgattttaaatctttgtgcgaaattggcaaaactggaaaccaggggcagtctaatcggcattgcatggccggtctaaccggtgaccaggggcggtctgaccggccacatgccgtcggtctgaccggtgaccccgagcggtctgaccggccctgtatggctggtctgaccggttctgggcagagcgctggagggcacgtttcaatcaatttagaagccgaattaattgtgaattcggacgtttgtgcccaggagacagaagaagattggaggattcctttgattcgatatttgaaaaatcccacacttaaggttgatcggaaaattcggcggcaagcattcaaatacacattgcttgatgaagatttatatcgccgaaatatagatggtgtcttgttgaagtgcttagatgaagatcaatctaaagtggctatgggggaggtacatgaaggaatttgtgaaactcatcaatcggcccacaagatgaattggttgcttaggagagcgggattttattggccgaggatgattgatgattgcttcaaatattatagaggatgtgaagtttgtcaacggttcggcaatgttcaattggcgcccgccgccgtgttgaatcctataatcaaaccatggccgttccgaggttgggctttggacttcattggtcaaatttatctttcatcatcaagggggcataggttcgtgctagttgctacggattacttcaccaagtgggccgaagctgtgccgttgaagaatatgactcatacggaggctaatggacaagccgagtcaagtaataaaacattgttgaaactagtgaaaaacaaaattgaggaacatccaaagaggtggcatgaagtgctttccgaagcattatgggcgcataggaaatctaaacatggtaccactaaagtcactccttttgagtttgtttatggtcaagaagccgttttaccggttgaggctttggaagagatagagaaagagaagaagagggtggccaaggcgtacaacaagagggtgaaagcaaagttgtttcaagttggagacttggtttggaagacaattttgcctttgggtactcgatccaaggagttcgatacttcaaggggagcgttttcagcgagcaatcaacgggaaatacttgaagaaatacttcccgagcgtttggcaagacgcttaaggatgtactatggccggtaa

SEQ ID NO: 25857 - DNA, 2619 bp, Oryza sativa
  Clone ID: PAT_MRT4530_30702C.1
tttttttttttttttataaattaacagctatcttttttgttctttgtcttgttaatggaagattgtgatacaaaggacagtacctaaaacaataatgtaaagcaagtccaaaaacttattccttttctttttcccaccttcaatgtcagtacctaaaacttgtcttaaataaacctctacaaccccaaatgacaacccaaccacaaccacctacaaaccttcactgaaacacgcctaaccatgatgaacttgcttctttggatcaaactagactgcttacaaagaccccagcagtattattagacaaataaaaaaaggcatgacataaggcaaaaaggaaaaattcttccctccaagctgaaaaatagacgagggagaattgagcgttagcggctagcggcagaggtagtaacacacgcatgatcagtagatatctagttagttgtcttgtaacctcttcccagtcatcgagcattctcatgggaagacagcaccatggttcctcttttcctttggttcctctttttccgcttgcatttagaagtggacgagtgccaaggattctcaacgtttcacacagcaagttaattgtttgaagtaggaagcccgtttctgaaatcatctcttatgtttctagctcaagtacccatcctgtaattcatcctctgcaacccttctctgctactcactactgttagttgtgccaatttccacttcaactttgttgatctgctcctcacttagcttggctgtatcgagttctgttgcaatcttgtcaaacaccacttcatctggtttggctgtatcaagatccactgtacttacaaattgacttggcctcttagtttcttcaggtttttcaacttttaacatggggtgatccaatgttgtagcaagtggcttgcctcttctgtcctgcattactttctgcctattttcatagaagtcaaagtcatccaatattgacgttttacatgaaaagttcttgaaaatgttcagcatctctgaaccttgtggaaacttgacctcttgtgtatccctgctgtttgtcacaggtttgttttcgttgttctccagtattatgtggcgaaattgtggattaggcacatccttgataatgtgccattttactgggaaaaatccattccacttgtcctgctgccagaagttcatattcctgttgaaatctaccggaccgaccatctcagccacgccgcagaactggccacttgcgttcacagagaagaaaaggaacataggacatttggttcctttctcagcaactctttcttgtgcaagtttaaaggcattgtcaagccttttatttccattaggagtacttgcccagacattgtacttaatgctcttgtgaatatcatcctcgctataagatttaatcacaaagaataaagcttgatcatacttcgtaacaaaatctggaagattatatgcatctcggctcattgcaacaggtgaaggtgtaacatcattgcccccccctgcacttgatagtccataatgaccaccttgagggctcaaactatttttggagttatcagtgaggttatctgatatatcacagtcaccatatccatttagcttacttctggccttgagcttctcagtactgttccagcttctaccactttccttcataccaatgtctttactttggtaaagattgtcttttccttggttagtatgcaccgcaaacttgctagacagaggatacccttttgaaatggaagcaccagatgccttgtttgcagtcttcgaggatggatagccattagcagaagttgacatcgtgtctagagctgatgatgatcctttgatggtatctgatgcagacttagtgttccgggaagcttttgatgaaggaagcttattagaagagtattttggtcttgcagggtaatttgtttgatgcacaccaacaggacgtccctgaaccccatcaagaagggcaaaagaaggatcccatgtgtatgcagggactagctcaggtccataagcaactggttgagcaaaaatgccaggtgtgctagggtcctgcatagaaattgtagaataatatggctctttgctgatatattgaccatccacaccagcaataactccaggaacaatcgggctataagtatatccattttcataccccggaagataacacaaataagacccattatcaccttgaaccactgtagggtgcacctccagtccattgtatccaacgaagtagccattctcatcatatcctccaaatgaggcaggataataatatccgtagtaatacatcccttggtcccccacagaagcttcttggttcatttcactttccttgacagtactagctgcatcgcccgaggaaatgcatgatattgcatcagaagaacttgcgccttttgtagcaggcaagttgacattacttgtctttgtgctaccattaatcttcaagttctccattgcttcttgcatagagtggcgctgctgctcgcccttgggctccatgaggccgcaccacaggtcgccgcagaagaacccggggctacgcgtcgtgtcctccagctcgaccgggggcggggcggggccggacgcgtggtcgacccgggaattccg

SEQ ID NO: 25858 - DNA, 4116 bp, Oryza sativa
  Clone ID: PAT_MRT4530_30703C.1
atgacaaagccgccatcaaccaagtcggaggtggaaccatccaatatcatgccaatctcattggaggatcttgatggggaagcatgcaaggccatggaggagtacattaaggcgatcacgcgggaggcactgatgagatcatgcaccaggacctgtcaaggtgtggttctcaagcctggaccattgcttaaacctaattttaatgtgggggtagacccaatgacaaataacgggcttttataccatattccagtacatgattcccctgtatctattgttaatccccaagttcccccacatattcctaatgtttacaatgatcctactaggggatatcctcccgatactagatatggcaaatataattatattgcgctacaaccacaacctattaggccaccaaacccaccaccaaatcaacataggcctgagaatatggaggaattgattgctggtattattagggataaattcgggattgaagttaggaatcgtgctaaggtttaccaaaagccgtatcctgattactatgacaatatcccatatcctcgtggttatagagttcccgaatttaccaaatttagtggtgaggatagtaggaccacatgggagcatgtagcaaattccattcatacttggcctcaattagagcaaagatttcatgattatttttatactggtgagactgaacttaggctaagtgatttgacattggttagacaaaaatacaatgaacatgtccttgattatgccaagagatttagggatgttaggaaccgatgttacagcttgaatataactgatagagatttggttgattttgcttttaatggtttaattgctcttattaaagaaaaattagaaggacaacaatttcttgatgttagtcaactcatgcaaaaggctctggctcaaaaaggctgggttaaagatagtaagaaatttgttagaccatttgagaaaaaacctaatgttaatttgattgattaccttgagactagtgattctgatgatgagggtgatcatgatatgtatgttgctaagttgtcatggactaacaaaaataagccttttgtttgttctaatttaatgccgactcctcgtaaagatcggcaaagtgagattaaatatagctttgatgtggccaaatgcgataagatttttgattatcttttgcaagaaaaacaaattagattacctaaagaccatgttcaatcggccatagatgacagacgattgaaattcactgatggtttcaagatgaagcttgatcatgattctttcccggtgaacacaattaatttcaatgataagaaggtgttgattctgccagagcaagccgaatctactaagggaaaaggagtggtcattggagagcctaggccaaagatgatggtgccaaagaatccgaaggttggtgtttggaaggagaataggagtgaagctttaagttctaaagctcctaagaaaactaaggtgacattcgatatgcttttggacaagtatgagaggcaagctggtgagaaagctcgcaataaaggaaaaagaccaagatcacctcctagggagcgatttggttattcaccaagacggtcggaatcacctacatatcatcgttctcaagacatgtcatgggggccttatccaatgccgccaccgggttattcttttccttgctacatgccatgggggcaacgccaccaatgttcaatcatatgcctccaatgcaatacaaccaaggatggggaagaccaaggagaccagctcgtgagcgtttgttttcaccaaacaatagccggttttatgctaaaaatcggatcaatgaaggaaagagggaaggaaagcgtgctaaggtggagacgaggacttcggagttggagagtcttcaagcaacaaatccaaagctgggaccagttcatcgcagtcggccggtctgaccatgccctctggctgaccgggccaacaagccggtctgaccgccagccacaggccggtctgacaggtgtttctggccggtctgaccaaaagtctgcgcccggtttgactgcactccagcgccggtttgataggagatttgcaaagggtagctcgagggcttcgtcgtcttcaaataaaatcaacagagggcattatttacctcctggaacagagccgaaaccaaggtggatgcctaaggatttgacggctacccaaaagaggaggttgcaacgtcttcgggcccaagaattaaaagagagggaggctgaagagcaaagaaatagaaggttcaatgagttgcgaccaccgcgtacaaaggtgtggaggcgtaaatccatagaagctgaagaatcggttgttgtgcaaaaggagaagggagaacaatcgattgctaagtataattcatctccaaaggaagatatgaaggtcaacatggtgtgtatgttgcctatggagttttgtgctatggatgaagccgaggttgctcaatttttactaggtcctaaagatgcggtttttgagaagcccgatgaatcaaatcgtcatatgaagcctctttatctcaaaggtcatattgatgggaagccgatcactaggatgttggtggatggaggtgccgccgtgaatttgatgccgtactcgttgttcaagaagttggggcgtggagataatgagttgaagaaaactaatatgattttcaatgacttcaatggtgaaccaacggaggcaaaagatatcttttcggtggagcttaccgtagagaacaagacgttgccaaccgctttctttatcgtcgatgtgcaagataattacaatgttattttgggtcgttgttggatccatgccaattgttgtgtgccttctaccttgcatcaatatttaattcaatgggacagcgatgattttgatgaagtagaaaagcttggtcaagggtttacatcggctgatccattggaagaagtagacataggtgatggaactaagccaaggccgacttttgtaaacaaaaacatgagagccgattataaggttaaaataatcgagctacttaaggagtatgttgattgcttcgcatggaagtttcatgagatgccgggtcttaaccatgatcttgtcgagcattggcttccaattaaaccgggttttaggccttataaacaaccatctcgtcgtttcaatcctttgttatatgaccgagtcaaggaggagattgatcggttattaaaagcggggtttattaggccatgtcgctatgtagagtgggtgtctagtatagtcccggtggaaaagaaggggagtggtaagattagagtttgtatagactttagagatttgaataaagctactccaaaagataaatatcctatgcctatagccgacatgatgattaatgatgcatcgggtcataagggacatatggccgatttgaggttagcttttgagattgtgcaccggtatggtttgaagatgaacccactcaagtgtgcttttgttgtgtcggcggggaagttgttagaattcatggtgcatgagagaagagttgagattgatcctaagaagatagaaaatattcatgatttcaaagcaccgacatgcaagaaagaagttcaaaagttgctaggaaaggggcgtaggttcgtgctagttgcaacgggttacttcaccaagtgggccgaagccgtgccgctcaagaatatgactcatacggaggctaatggacaagctgagtcgagtaataagacgttgttgaagctagtaaaaaagaagattgaggaacacccaaagaagtggcatgaggtgctttctaaagcattgtgggcgcataggatatctaaacatggtgctactaaagtcactccttttgagttggtttatggtcaagaagtcgttttaccggttgaagtaaatcttggttctcttcgttatatcaggcaagatgatttgtcaagtgaagattacaagacattgatgggagacaaccttgatgaagtcatcgacaagcgtttgaaggctttggaggagatacagaaagagaagaagagggtggccaaggcatacaacaaaagggtgaaagcaaagttgtttcaagttggagacttggtttggaagacaattttgcctttgggtacccgatcctag

SEQ ID NO: 25859 - DNA, 2226 bp, Oryza sativa
  Clone ID: PAT_MRT4530_30704C.1
atggcgaacttcggcttgacggcgacgatggagctccggtggatttcggcttcggggaaccggctgccgggcttcatcttgctcctgcgaacccaatggagtcgatggcgacggaaagcggcggctaaggcggctgctagctgcggctggaggcgccgcaaaggccgaaaccttctggttcgcgtcggcaagcggcttccggctggatttggcacgaaggaaccaaaggccagggtagagctcgactttgcggagccgagggaagtggcggcgctgaccgacgacggccggggcgacggcgcacggcggctggagcggcggccggagagatttagggatgttggaaaccgatgttatagcttaaatataactgatagagatttggttggtcttgcttttaatggtttaattgctcctcttagagaaagactagatggccaacaatttcttgatgttagtcaacttatgcaaagggctctggctcaagaaagccgggttaaggataataaaaaaattgttagaccatatgagaaaaagcctaatgttaatgtgattgattaccctgaggctagtgatagtgaagatgagggtgatcatgatatgtatgctgctgaatggaaccgggccaatgaagaaaggagggaaggaaagcgcattaaggtggaggcaaggacttcggaagtgattaccatcaaagtagggtctcatgatgtgccaataccttctggagatgaagttggagagtcctcaagcaaaaaatccgaagctggctggtttgaccgccgaactgacaatggtccgaccgacgcctcaggccggtctgaccgcccaccgaatgtcgccgaggttgctcaattttcactaggccctaaagatgcggtttttgagaagcccgatgaatcaaaccgtcacatgaagcatctctatctcaaaggtcatattgatggaaaactggtctctaggatgcttgtggatggaggtgccgctgtgaatttgatgccatactcattgttcaagaagttgaggcatggagatgatgagttgaagaagactaacatgattctcaatggcttcaatggtgaaccaacggaggcgaagggtatcttttcagcggagcttaccgtggggaacaagacgttaccaaccgctttcttcatcgtcgatgtgcaagattttgatgaagtggagaagcttggacaagggtttacatcggccgatccgttggaggcagtagacataggtgatggaaccaaaccaaggccgacttttgtaaacaaaaatatgagagtcgattataaggttaagataatcgagctacttaaagagtatgttgattgctttgcatgggagtatcatgagatgccgggtcttagccgtgagcttcttgagcatcggcttccaattaaaccagtggaccatcatgtagatattgcttatgaggaagagatttgcctagttgaagttataccttggaggatttattttgatggttcttcttgcaaagaagagtcggtgcttgattttaaatctttgtgcgatattggcaaaactgaagaccaggagcggtctgaccggcattacacggccggtctgaccggtgaccaggggcggtctgaccggccacatgccgtcggtcagaccagcgaccccgagcggtctaaccggcctggtgtcacgcccagaaattcccgaatagaattccaagcagaatgtgcattaaaatccccgtccaggaccggccggggcatcctcgacggcacggacgaagcctactcctcggagaaacctccatctgacacatactcgtactctgggaggccgtcgcagggcccgccccgctccatcacgcccacccttgcctggatgcgtcagctagaggaaagctacactacaagcccagccgttgcccaggctggcttgtgggctgacgtcatcaaggggggtggcgccgacaggagggtcccactggtcagcggctcaaaggggggccggtgcaccgtggaccgggaccacgcgggtggtccaccgccggtccacgggaccgacggcccagatcggccccttagccgatcgggcggtggcgatagaggcagccgccgggctcggctcggcatcaaagccggccggccggccagggctagcggcgacggcacgcggccgacggcgatggcgaccggcggcacgggaggcggtggcggcggccaaaggcgacggcgcatgacttga

SEQ ID NO: 25860 - DNA, 240 bp, Oryza sativa
  Clone ID: PAT_MRT4530_30705C.1
taccccacccacgcctccgccgccgacgtcgcctacaacctgatctggaacgcctacctaggcggccaccgcgccggcgtgcactgccccttcggcgacgacgcggcggtggacggcatcgacttcttcattgaccagtgcggcgccaaccactacgacgacctcgcccggctgctcaacggctacaacaagtattatgatgacctcgcactgcaggtttaacgtgctggtgagctccgc

SEQ ID NO: 25861 - DNA, 4815 bp, Oryza sativa
  Clone ID: PAT_MRT4530_30706C.1
atgttcaatcatatgcctccaatgcaattcaaccaagggtggggaggatcaagaaggccaattcatgagcgtttgtcttcaccaaataatggccggttttatggcaggaaccgggccaatgaagaaaggagggaaggaaagcgcatcaaggtggaggcaaggacttcagaagtaattaccatcaaagtggggtctcatgatgtgccaataccttctggagatggaattggagtatcttcaaacaaaaaatccgaagccgaaaccagctcctcgcagtcggccggtctgaccaagccttctggccggtccgaccgcagccatgcggccggtctgaccgggccatcaggccggtctgaccgccgacccgacagcggtccgaccgacgcctcaggccagtctgaccgttcgccaagtgtcgatctgaccggcgcatctgccgaggttgctcaactttcattaggtcctaaagatgcggtttttgagaagcccgatgaatcaaaccgtcatatgaagcctctctatctcaaaggccatgttgatgggaagccggtctctaggatgctagtggatggaggtgccaccgtgaatttgatgccgtactcattattcaagaaattggggcgtgaggatgatgagttgaagaagaccaacatgattctcaatggcttcaatggtgaaccaacggaggcaaagggtatcttttcggcggagctcaccgtgggaaacaagacgctaccaaccgctttcttcatcgtcgatgtgcaagatattattgccaattttgataattttgctattagacatattgctaggcatgataattctagagcaaataatttggcacaacaagcatctggctataatgtgaagaagggattatttctgatattagaagagccggtgcttgattttaaatctttgtgcgaaattggcaaaactggagaccaggggcggtctgaccggcattgctcggccagtctgaccggtgaccaggggcagtctgaccggccgcatgccgccggtctgaccggcgactctgagcggtctgaacggccctgtgtggccagtctgaccggttctgggcagagcgctggggggcacgtttcaatcaatatagtggccgaattaactgtgaattcggacatttgtgcccaggaagcagaaggagattggagaattcttttgattcgatatttgaaaaatcccacacttaaggttgatcggaaaattctgcggcaagcgttcaaatacacattgcttgatgaggatttataccgccgaaatatagatggtgtcttgttgaagtgcttagatgaagatcaatctaaagtggctatgggagaggctaatggacaagccgagtcgagtaataagacattgttgaagttagtgaaaaagaagattgaggaacacccaaagaggtggcatgaggtgctttctgaagcattgtgggcgcataggatatctaaacatggtgctactaaagtcactccttttgagttggtttatggtcaagaagccattttaccggtggaggtaaatcttggttctcttcgttatatcaagcaaaatgatttgtcaagtgaagattacaagacgttgatgggagataatcttgatgaagtcatcgacaagcgcttgaaggcattggaagagatagagaaagagaagaagagggtggccaaggcgtacaacaagagggtgaaagcaaagttgtttcaagttggagacttggtttggaagacaattttgcctttgggtactcggtccaaggagttcgcgagcaatcaacgggaaatatttgaagaaatacttcccgagcgtttggcaagacgcttaggaggtactatggccgccgccatccaagacggaggtggagccatcaatatgataccggtcacattggatgacttcgaaggagaagaccgcaaagctatggaggagtacatcaacgagctcacacgggaggcgttgatgagggcaagcactaggactcgtcaaggcgtgatcatcaagcccgggccacgtcctaagctcgctcctgatttggtaagcaatgatgaggtatcacaatctatccaacaacaagtagcatctacaatagattcatctatgattgcttttaaagataagttagatgcaacttttgagggtaaatttgatgagtttttaagggttaaattcggccctcttatggccgattacatgtcaaaggataaggcctctaccactgctaaccaacctcctatagatcaaacggccggtcagaacgggtactaccccggcggtcagaccgggactcaggctggtccgaccacgcctctggatgccggtcagaccgggccctgggccgagttcccgaattcaccaagtttagtggtgaggatagtaagaccacatgggagcatcttcgagccgccgtcgccgccgtcgctccagccgtgcgccgccgccgttccagacgtcgccgtcgctcgggaaaaccgccgtcgtggtcgccaagtcgtcgccgtcctcgtccgctgcttcgccacagtcggagaccgccggagcatcgtcgccgtcgtcaaaccgaagaccgccgccgtttcaacctcgtcgccgtcgccgtccgttgcgagcgtgcgccgtccgagccgtctgagccgccgagccgccgccgccggtggtgacgtcatcgtcgacgtcatcgtcgccctctcccgtgagccggttcaatcggccatagatgaaggacgattgaagttcaccgatggctccaagatgaagcttgatcatgatccttttctggtgaacacaattaatttcaatgataagaagccgccgggttatccttatccttattacatgccatggggggcaacgccgccaatgttcaatcatatgcctccaatgcaattcaaccaagggtggggaggatcaagaaggccaattcatgagcgtttgtcttcaccaaataatggccggttttatggcaggaaccgggccaatgaagaaaggagggaaggaaagcgcatcaaggtggaggcaaggacttcagaagtaattaccatcaaagtggggtctcatgatgtgccaataccttctggagatggaattggagtatcttcaaacaaaaaatccgaagccgaaaccagctcctcgcagtcggccggtctgaccaagccttctggccggtccgaccgcagccatgcggccggtctgaccgggccatcaggccggtctgaccgccgacccgacagcggtccgaccgacgcctcaggccagtctgaccgttcgccaagtgtcgatctgaccggcgcatctgccgaggttgctcaactttcattaggtcctaaagatgcggtttttgagaagcccgatgaatcaaaccgtcatatgaagcctctctatctcaaaggccatgttgatgggaagccggtctctaggatgctagtggatggaggtgccaccgtgaatttgatgccgtactcattattcaagaaattggggcgtgaggatgatgagttgaagaagaccaacatgattctcaatggcttcaatggtgaaccaacggaggcaaagggtatcttttcggcggagctcaccgtgggaaacaagacgctaccaaccgctttcttcatcgtcgatgtgcaagatattattgccaattttgataattttgctattagacatattgctaggcatgataattctagagcaaataatttggcacaacaagcatctggctataatgtgaagaagggattatttctgatattagaagagccggtgcttgattttaaatctttgtgcgaaattggcaaaactggagaccaggggcggtctgaccggcattgctcggccagtctgaccggtgaccaggggcagtctgaccggccgcatgccgccggtctgaccggcgactctgagcggtctgaacggccctgtgtggccagtctgaccggttctgggcagagcgctggggggcacgtttcaatcaatatagtggccgaattaactgtgaattcggacatttgtgcccaggaagcagaaggagattggagaattcttttgattcgatatttgaaaaatcccacacttaaggttgatcggaaaattctgcggcaagcgttcaaatacacattgcttgatgaggatttataccgccgaaatatagatggtgtcttgttgaagtgcttagatgaagatcaatctaaagtggctatgggagaggctaatggacaagccgagtcgagtaataagacattgttgaagttagtgaaaaagaagattgaggaacacccaaagaggtggcatgaggtgctttctgaagcattgtgggcgcataggatatctaaacatggtgctactaaagtcactccttttgagttggtttatggtcaagaagccattttaccggtggaggtaaatcttggttctcttcgttatatcaagcaaaatgatttgtcaagtgaagattacaagacgttgatgggagataatcttgatgaagtcatcgacaagcgcttgaaggcattggaagagatagagaaagagaagaagagggtggccaaggcgtacaacaagagggtgaaagcaaagttgtttcaagttggagacttggtttggaagacaattttgcctttgggtactcggtccaaggagttcgcgagcaatcaacgggaaatatttgaagaaatacttcccgagcgtttggcaagacgcttaggaggtactatggccgaccgccggttgagggccggtcagaccggcggcatgtttcgggtttcgtttggtttctacctcaagttggacgtggaggagggcctgtag

SEQ ID NO: 25862 - DNA, 4602 bp, Oryza sativa
  Clone ID: PAT_MRT4530_30707C.1
atgggattgggcgcaagaaggaggagggaggcgcgtcgcgcgggatgggaaagggagaatagttatatggtccgctgcgtcgccgaccggttcccgggcctcaccgatgtcttcctcgaccacggcctctacatcgccgccggcgcctccgccgctgccgcggagcggagcaggtactcgagggcagctggcgcggccagcaagaagcagcggaaaccagccgcggaggcgcgcagcgcagaattgcgtcggcggctcggcgccggcgcgacacgcgccgatgcgggctgccatggattcacgcgatttcgccgtgagaagaagaggacgtgggcggcaggcggcggcaatctcgcaccgtcggttgagggccggtcagaccggcggtgtgtggccggtctaaccggcaggtccgagtccgactgcgtttcgtcgggtttcgagcgtcaactcaacttcgacttcgccatgacgaagccgccatccaagacggaggtggagccatctaatgtgatacctatcacattggatgatttcgaaggggaagaccgcaagtccatggaggagtacatcaaggagatcacacaggaggcgctgatgagagcatgcactaggactcgtcaaggcgtgatcatcaagcccaggccacgtcctaagctcgcttctgatttggtaagcaatgaagaggtaacacaatctatccaacagcaagtagcatctacaatagattcatctatgactgtttttaaagataagttggatgcaacttttgagggtaaatttgatgagtttttaagatttaaattcggccctcttatggccgattacatgtcaaaagataaagcctctaccactgctaaccaagctcctatagatcaaggcgggaccaatggagcggcgcatgcggccggtccgaccgggcctgatggctggtcagaccgcgacttcgccttcggtccaaccggccaagcggccggtccgaccgggtattatcccggcggtcagaccgggactcaggccggtctgaccgcgcctctggatgtcggtcagaccgggccctggaccggtcagaccggcgcaattataccgatacaggggatagatccaatgactaatgctagttatttgtatcatcttagaacatttgatgctcctgtatctactgctgcaaatagtccccaagttcccccacatgttcctaatgcttataatgatgttgctaggggggataaattcgggattgaaactaggaatcgtgccagggtttacaaaaagctgtatcctgactattatgataatgtgccgtttccccgtaattatagagttcccgaatttaccaagtttagtggtgaagatggtagtaccacatgggagcatgttcaatcggccatagatgaaggacgattgaagttcactgatggctccaagatgaagcttgatcatgatccttttccggtgaatacaattaatttcaatgataagaaggtgttgattcggccggagcaagccaaatctactaagagaaaaggagtggtcattggcgaaccaagacctaagatgatagtgccaaagaagccggaggttggcgtttggaaggagaataagagtgaagtttcaacttctaaagcccctaggaagaccaaagtgacttttgatatgcttttagagaagtatgagcagcaaggtggtgagagggctcgcaacaaaggaaaaagaccaagatcacctcctagggagcgatttggtcattcaccgagacggtcgcattcacctccatatcatcatccacaagacatgtcatggggttcttattcaatgccgccgtcgggttatccttatccttattatatgccatggggggcaacaccgccaatgttcaaccatatgcctccaatgcaattcaaccaagggtggggaggaccaagaaagccaattcatgagcgtttgttttcaccaaacaatggccggttttatggtaggaaccgggccaatgaagaaaggaaggaaggaaagcgcattaaggtggaggcaaggacttcggaagtgtttaccatcaaagtggggtctcatgatgtgccaatactttctggagatgaagttggagagtcctcaagcaaaaaatccgaagacggtaccagctcatcgcagtcggccggtctgaccaggccttctggccggtctgaccgcagccatgcagacggtctgaccgggccatcaggccggtctgaccgccgacccgacagcagtccgaccgacgcctcaagctggtctgaccgtgcaccaaatgtcggttctaaagatgcggtttttgagaagcccgatgaatcaaaccgtcacatgaagcctctctatctcaaaggccatgttgatgggaagccggtctctaggatgctagtggatggaggtgccgccgtgaacttaatgccgtattcattattcaagaagttggggcgtgaggatgatgagttgaagaagactaacatgattctcaatagcttcaatggtaaaccaacggaggcgaagggtatcttttcggcggagcttaccatggggaacaagacgttactaaccgctttcttcatcgtcgatgcggggtttattaggccatgtcgttatgcggagtgggtttctagcatagtcccggtggagaagaaggggagtgagatctacattgatgatattgttgtcaaatcggatggtatggaaggacgcatagccgatttgaagttagcttttgagaggatgcgccggtatggtttgaagataaactcacttaaatgtgcttttggtgtgtcggcggggaagttcttaggattcatggtgcatgagagaggggttgagattgatcctaagaagatagaaaagattcgtgatttcaaagcgccgaaatgtaagaaggaggtccaaaagttgctaggtaaggtgaattatttgagaaggcttatttctaacctagcgggtaaaatcgatgcttttgttcctatacttcgcttgaaaaaggaggccgattttacttggggggcaaaacaacaagatgcgtttgaggagttgaagagacatattgctaggcatgataattctagagcaaatgacttggcacaacaagcatctggttataatgtgaagaaaggattatttctgatattagaagagccggtgcttgattttaaatctttgtgcgaaattggcaaaactggagaccaggagcggtctgaccggcattgcacggccggtctgaccggtgaccaggggcggtctgaccggccacatgccgtcggtcagaccggcgaccccgagcgaggatgtgaagcttgtcaacggttcggcaatgttcaattggcgcccgccgccgtgttgaatcctataatcaaaccatggccgttccgaggttgggctttagatttcattggtcaaatttatcttccgtcatcaaaggggcatagattcgtgctagttgctacggattacttcaccaagtgggccgaagctgtgccgttgaagaatatgactcatacggaggctaatggacaagccgagtcgagtaataagacattgttgaaattagtgaaaaagaagattgaggaacacccaaagaggcaagatgatttgtcaagtgaagattacaagacattgatgggagacaaccttgatgaagtcatcgacaagcgcttgaaggctttggaagaaatagaaaaagaaaagaagagggtggccaaggcgtacaacaagatggtgaaagcaaagttgtttcaagttggagacttggtttggaagacaattttgcctttgggtactcgatccagggagttcggtaagtggtcacctagttgggagggtccttatcgagtatgcggcattgttcaaggaaatgcatatttcttggagacacttcaaggggagcgttttcagcgagcaatcaatgggaaatacttgaagaaatacttcccgaacttaaggctgcagaaagggttccgcgcctcagaagagacactcgctcccacggagagaagcgctatagagcgcgttgccccgcgcccccgcccgctcgtgacctcgcgccacccgtggaagtgttttccccaaattcgcccaccaaattcgcggcaacaaatcaaggaacacgcccaccaaaatagtggcaacaaatcaaggaacacaaatcgcggcaacaaaatcaccgcttgccgctcggccccgaggagatttggaaaaatcgctaacatcgcggcaacacaaatcaaggtcgacgccaagctccgccgctcatccctgatgccgccgccgctgccgctcatccccgaggccgctgcgctcctctgcatcgatgcgccgacggatggggaggagggagaaacggcgcggcggctggggagcttgttaactcgccgcccagggatgagaggggagaggcggcgtcgtcgagccggcgccggcggagggaggaggggcgctggcggaggggcaatgggagagctggtggagttgggggaggtgagggcgtcgcaatctctcatgccactgagcctcgccttcgctcgattgggggaggggaaaaaacgctcgaaggcggcgcagaggagcgatgcggcgtggctgagctga

SEQ ID NO: 25863 - DNA, 340 bp, Oryza sativa
  Clone ID: PAT_MRT4530_30708C.1
aacccagtaatctccaattattttaatttaatccaaacaaagtgggtgaataatagtcacaatatccatctccctttcaaatgaggggtggacaaaatagtgcagaaaatcaaagccaccgaaaatcaaaccgggtgcatcaaaaatttaaccccatttattaaaaaaaaaaaacaaaaaaacgcgagggcattcaaagtgtgtggcacaaattcaaaggcacccacctttattcgcgcgcgttttgggattcgggtttagatagccatgtggccattgcattctcattctctctctcctctttccctcttctttccctcctctcgcgggggggctctca

SEQ ID NO: 25864 - DNA, 500 bp, Oryza sativa
  unsure (1)..(500): unsure at all n locations
  Clone ID: PAT_MRT4530_30709C.1
attctttctgattgcagcctgccttggatctctgggtcactcctccaatgctgctggcaaccaggagaagctgtctagtgccatggtgaaccacagcaacaccaatggggacactgaaaatgaagaactcaccaagcacctccttgagatagaacaacccaaggattgtgaagaacaagagcctgaagtggcaccggctgcccaggctgtggaaaaactagaggcaggaacagctgatttcctggttgaccttgaggggaagagatctattaaagtgctcggatcgaacaccttcctgggcctcggcatcgtcaccttcgccggcgtgagctactccctcttctcgccggcgttcaacctcgccaccaacgaccagtggcacacgctcggngagggcgtcccccacatggtggtgtacacggcattcttctacttctccctcgcctgcttcgccatcggcatcgccctcaacatctggttcctctaccaccccatggtcg

SEQ ID NO: 25865 - DNA, 2095 bp, Oryza sativa
  Clone ID: PAT_MRT4530_3070C.1
atgatcacaccaccgttgttgggcgtctacaacttcaccaaccggccgcctccttcgctgccgactggtgttttcgcctgcacggctggcctattatgccgccgttgttgggtgtctacgtcttcaccgaccggccgcctcgtcgatccgccgccgattggtgtctccgcctacacggttcgatggtcacaccaccgttgttgggcgtctacgtcttcaccgaccggctgcctcgtttgctgccgactagtgtttttgcctgtacggctggcctattatgccgccgttgttaggcgtctacgtcttcaccaaccgaccgcctcgtcgatccgccgccgattggtgtctccgcctacacggttggatggtcacaccaccgttgtggggcgtctacgtcttcaccgaccgaacgcctcgtcgatccgccgccgactggtgtttccgccttccggctgcctcgtccgccgccgactggcgtttttgcctgcacggctggcctattatgccgttgttgttgggcgtctacgtcttcaccgaccggccgcctcgtccgccgccaactggtgtttttgcctgcacagctggcctattatgccgccgttgttgggcgtctacgtcttcaccgaccggccgcctcgtctgctgccgactggtgtttttgcctgcacggctagcctattatgccgccgttgttgggtgtctacgtcttcaccgaccgatcgcctcattgatctgccgccgactagtgtctccgcctacacggttggatggtcacaccaccgttgttgggcgtctacgtcttcatcgaccggctttccttcgccaccaccgattggtgtttccacctatacggttagttggtcacaccactattcatgggcgtccatgtcttcaccgaccggcttgccttcgccgccgccgactggtgtccccgccttcatggctgacctattatgccgtcgtcgttgggcgtctacgacttcaccgaccggcttgccttcgccgccgccgactggtgtccccaccttcatggctgacctaatatgccgccatcgttgggcgtctacgacttcaccgccggcctgccttcgccgccgccgactggtgtccccgccttcacggctgacctattatgccgccgtcgttgggcgtctacgacttcaccgccggcctgcctccgtcgccgctgactggtgtcctcgcctatgcggttggcgggctcctccaccgttgatgggcctcgttatctacatcaccggcttgcttccactgtcaccgactggtgtcttccttgttattgatggacgactttgttcctacattgttgcctttgggccgattcctaccacccgggggctcactggatggaccgagaatggatcagtcagaacatcaccaccggcttgccttcgccgccgccgactggtgtctccgcctgcacggctggtctattatgccgctgttgtcgggcgtctacgtcttcaccgtcggcttgccttcgccgcagccgattggtgtctccgcttgcacggctggtctattatgccgctgttgtcgggcgtctacgtcttcaccgatcggcttgccttcgccactgccgactggtgtcttcgcctacacggctggcttattatgccgccgttgttgggcgtctacgtcttctccgaccggccacctctctattttgccgccgttcaaggacgtcttcattttcgtcatcattctacttcttccgtcgccgactggttatgccgccgtcgactgggtggagcaacttcatcttaattatcttcggaacaggcaagctctattgcctcaacttcgcaagttttgctacttcaccaaccacaacgtccacaagatcttcgacatctcagcatgcacttccagattcgacaccgcgctattccactacaacaagtggttcttcaattttcaagaattctacacctctacttcatcggccctgacatctctgccgttgctaatggatgactatgtcttcgcctccggaggccctctagggggcatgagcacatatgatcatcagatccgcctcagggaagccaccgacgccgccgttgggagggtgtag

SEQ ID NO: 25866 - DNA, 3675 bp, Oryza sativa
  Clone ID: PAT_MRT4530_30710C.1
atgacgaagccgccgtcatccaaggcggaggtggagctggccaatgtgataccaatcatatttgatgatttcgaaggggaagatcgcaagtccatggaggagtacattaaggagatcacacaggaggcgctgatgagggcgtgcaccaggactcgtcaaggcgtgatcatcaagcctaagccacgtcctaagcctacttacgatgtggtaagtaatgaggaggtaacacaatttatccaacaacacattgcatctacaatagattcatctatgattactttgaataataagttaaatgcatctattcagaatcatgttgaaggatttttgaggactagattcggccctctcgtggccgattttatgttcaaagacaaagcctctaccagtgctagccaagccactatagatcagataagtagtataaccaacggggcgaaaacacaacagcacggcgaggggtgggcggcgcacacagccagtctaaccgggcctggtggccggttagatcgcgatgtcgctgtcggtcagaccggccagacggccggtcagaccgggtattaccccggcggtcagaccggaactcaggccggtctgaccgcgccactggacgtcggtcaaaccgggtcttgggccggtcagaccggcacaatcatcccaattcagggggtagatccaatgacaaataatgcttatttgtatcatcttagaacatttgattcccctgtatctactgccactacttgtccccaaattctcctacatgttcctaatgcttataatgatgtttctagggggtatcctcccgatactaggcaaggccaatataattatattgcgccgcaaccacaacctattaggccaccaaacccaccaccaaaccaacataggcctgataatatggaggaattgattagtggaatcattagggataaattcaggattgaagctaggaatcgtgctaaggtttaccaaaagccgtatcctgactattatgacaacataccatatcctcgtggttatagggttcccgaatttaccaagtttaatggtgaggatagtaggaccacatgggagcatgtagaaagattagatgttggccaacaatttcttgatgttagtcaactcgtgcaaaaggcactagctcaggaaagccgggttaaggatagcaaaaaatttgttagaccatatgagaagaagcctaatgttaattcaattgattaccatgaggctagtgatagtgaaggtgagggtgatcatgatatctgcgaagtgaagcctggccacccctgcattgtcgccgaaggtcgccgaaacactgtcgccgccgtggacagtacctcgccgccatcccgttctcgtcgccggccatcttccatcgctgtccgtcatcacgttcaatcggctataaatgaaggacgattgaagtttaccgatggttccaagatgaagcttgatcatgatccttttccggtgaacataattaattttgatgataagaaggtattgattcggccggagcaagccgaatctacaaaggggaaaggaatggtcattggagagcctaggccaaaaatgatggtgccaaagaatccggaggttggtgtttgcaaggaaaataggagtgaagcttcaacttctagagttcctaagaagactaagaaccgggccaatggagaaaagcgggaaggaaagcgcgtcaaggtgaagactaggacttcggaggtgattaccatcaaagtggggtctcatgatgtgccaataccttctggagatgaagttggggagtcctcaagcaacaaatctgaagccgaagttgggcgtggagatgatgagttgaagaagaccaacatgattctcaatggcttcaatggtgaaccaacggaggcggagggtatcttttcggcagaacttaccgtggggaacaagacctaccaaccgctttcttcatcgtcgatgtgcaaggttaaagtaatcgagctacttatggagtatgtggattggttcgcatgggagtatcatgagatgccgggacttagccgtgatcttgttgagcatcggcttccaatcaaaccgagttttaggccttataaacaactacctcgtcgttttaatcctttgctatatgaccgagtcaaagaggagattgatcggttgttgaaggcggggtttattaggccatgtcgttatgcggagtgggtttctagcatagtcccggtggacaagaaggggagtggtaagattagagtttgcataaactttagagatttgaataaagcttctcccaaagatgaatatcctatgcctatagccgacatgatgatgaatgatgcctcgggtcataaggtgatttgctttttagatgataatgccggctacaatcaaatctttatggcggaggaggatatgtacaggacggcttttacgtgcccaggatttgttgggttgtttgagtgggttgtcatgacttttagattgaagaacgccggtgcaacatatcaaagggcaatgaatttaatcttccatgatttgctaggtattatcttagaaatctatattaatgatattgttgtcaaatcggatggtatggagggacatatagccgatttgaggttggcttttgagaggatgcgccggtatggtttgaagatgaacccacataaatgtgctttaggtgtgtcggtggggaggttcttaggattcatggtgcatgagagaggagttgagattgatcctaagaagattgaaaagattcgttatttcaaagcgccaacatgcaagaatgaagttcaaaagttgctaggtaagggggcaaaacaacaagaggtgtttgaagagttgaagaaatatttgtctactccacttgtggtgcgggcgcctaaagccggaaagccttttcggttatatattgcctccgaagacaaagtcattggtgccgttttgacgcaagcggaagatggcaagggatatatcattacatatttgagccaacgtcttttggatgccgaaacgagacatattgctaggcatgataattctagagcaaatgatttggcacaacaagcatctggctataatgtgaagaagggattatttctggtattagaagagccggtgcttgattttaagtctttgtgcgaaattggcaaaacttcagaccaggggcggtctgaccggcattgcacggccggtctgactggccacatgccaccggaaacagaggaagattggagaattcctttgattagatatatgaacgatcctacacgtaaggggcataggttcgtgctagttgctacggattacttcaccaagtgggccaaagccgtgccgctcaagaacatgactcatacggaggctaatggacaagtcgagtcgagtaataagacattgttgaagctagtaaagaagaagattgaggaacacccaaagaagtggcatgaggtgctttccgaagcattgtgggtgcataggatatctaaacatggtgccaccaaagtcactccttttgagttggtttatggtcaagaagccgttttaccgattgagataaatcttggttctctttgctatatcaagcaaaatgatttatcaagtgaagattacaagacgttgatgggagacaactttgatgagatcatcgacaagcgcttgaaggctttggaagaaatatag

SEQ ID NO: 25867 - DNA, 918 bp, Oryza sativa
  Clone ID: PAT_MRT4530_30711C.1
atgaacccacttaaatgtgcttttggtgtgtcggcggggaagttcttaggattcatggtgcatgagagaggagttgagattgatcctaagaagatagagaagagtcgtgatttcaaagcgccgacatgcaagaaggaggttcaaaagttgctagacaaagtcattggtgccgttttgacacaagaggaggatggcaaggaatatatcattacatatttgagccgccgtcttttggatgccgaaacgaggtttgtgctagttgctacggattacttcaccaagtgggccgaagcaatgcctttgaagaatatgactcatatggaggctaatggacaagccgagtcgagtaataaaacattgttgaagttggtgaagaagaagattgaggaatacccaaagaggtggcatgaggtgctttttgaagcattgtgggcgcataggatatctaaacatggtgccactaaagtcaccccttttgagttggtttatggtcaagaagccgttttaccggtggaggtaaatcttggttctcttcgtaatgtcaagaaagatgatttgtcaagtgaagattacaagacgttgatgggagataatcttgatgaagtcatcgacaagcgcttgaaggcattggaagagatagagaaagagaagaagagggtggccaaggcgtacaacaagagggtgaaagcaaagttgtttcaagttggagacttggtttggaagacaattttccctttgggtactcgatccaaggagttcggtaagtggtctcctagttgggaaggtccttatcgagtgtgcggcattgttcgagggaacgcatactttttggagacacttcaaggggagcgttttcagcgagcgatcaacgggaaatacttgaagaaatacttcccgagcgtttggcaagacgcttag

SEQ ID NO: 25868 - DNA, 358 bp, Oryza sativa
  Clone ID: PAT_MRT4530_30712C.1
gggggaaaagggcctaatcaaaaaaaaaccaactggagggggatatttcaaggttcaaggctttcttttttatttttggggaaacttccgaccaataaccaaacttccaccttttttttaacttaaccttattaagggacccaaagttgttggaaaccaccggtcctggtcatatcacaccggggccaacattgggggggcaaaactttcaattttttttaatcccaccccacgggcatgggcccccggaaagcccctattgaaccgctcttggggccaaagtgacacacccttgagcttttcttgaaacaaaagggctggcaaattttcacaaacatttttaagggaaatcgcccac

SEQ ID NO: 25869 - DNA, 156 bp, Oryza sativa
  Clone ID: PAT_MRT4530_30713C.1
gttggggatattctcgtcatcaaatggaagagtaccacaaaggagagcataaaggatcactccacagctccatacatcaacctcgggttaaaatcacatgccaatgattacaccaacacaattgtagaatttccagctcaaaagcattcgaagaag

SEQ ID NO: 25870 - DNA, 649 bp, Oryza sativa
  Clone ID: PAT_MRT4530_30714C.1
atcttttgttttttattcctgtttttcttatttttctcattcaataactgctccctgtagggctgttttgttgaagacttgctattgcccattctggctttgcagacagcattattgtaatcctccaaatacattcttaagacttttcttttaaaaataattttattactaaaagtgttaaacatacacacagaagtagagaccaaagtatgatgaaattccatgtatccatctcccagcttaaataattactaaatcatggctcatgtttcatctgtactctggctccctccactttagttttagaaacagattctaggcatcagctgtatctctgatgactttcaaaaaagaaatcattgcagcatagttaaaactagaattttataacttaagtccttcttaacattactgcaattgtcttataattgttttccagttcatttgaattatgattcaaaggttcataaaataattgctgattaggtataaagtttaagaattgcgtgttttaaaagtaatctttcttaaattgggcaaaaacatttacatgactggtcaaatctacaaaacaaggtactactgtatacacaaaagaggttataccttttgtccattagagtccattctgaattcttcctgccttccg

SEQ ID NO: 25871 - DNA, 342 bp, Oryza sativa
  Clone ID: PAT_MRT4530_30715C.1
attgactcagatacaagacaactcctgaagagtaaagatatcaaaatatggacgttttccatcttcacagcagtatcctcatttgcaaactgcggcttcaccccgtctataacttctggttaccccacaggttctagcaggcaacactatattatcgccactattgaggttaagcatatggatcttgaggaagagtgtgaaactgtgaatacaaggcatgctggtgaagctgtcattgagtccaatactagttctatttgcacttgtcatgactttcagaattttatcataaatatggcacaatcaccatcagtaactgcaaaggataaattaagcacataa

SEQ ID NO: 25872 - DNA, 580 bp, Oryza sativa
  Clone ID: PAT_MRT4530_30716C.1
caggggtgtataccgggtcgacccacgcgtccggagggactcgagatctcaagagggtccggttcagccggaagcgtttcagcgagacacaagcagaacaatggtggcaagagaatcgggcacgggtatacgagcagtataatgttcgagtagtcgacaaatcggttggcagtattgataatgatgtacatcattgacataagaaatttgacttggtcagtcactacaaagctctcaaagctctcaccgttgagcatgggtgctgacgcggctatgatattttggttaggcccagaagaggaggggcctgctgtttgaaaaatgtgggcttgcattctttttacacgattctttcctcttccatttcccttgtgtggaatgtagagtgttcaagcagaagttatgtaaatggttagtggcagctggctaatctgtcctgtaaatgcataagcaagtgcatcaattttagactatgatcttcctgattttcctttaattggcaaatataggtgcaaaatctaagtgatgatgatgaagaatatttggtgctaattgtagattgagatgcaaagtagctttg

SEQ ID NO: 25873 - DNA, 468 bp, Oryza sativa
  Clone ID: PAT_MRT4530_30717C.1
ggattaattccccgtaatcaattttggaattcccggtttgaatcgcgtggatttaggggaggaatcgacgctaggtttcacgggagagaagagagagagaggatgccgggcgggaggaaggagacgaccgagcaggtgggacccaccggtcaggcacgcgtcatcagcgcgcgcacgtgcgcggcacgggcgggagggtgccgctcgtcttgggccgggcggccggcccaggaggagaggagggggaggcggcctgggggagagagggaggaggagggagtgggccgaggggaaggagaggaggcccaagagaaggagggagaggaggagagggagaggaatagagggaggaagagaggactttggccgcgggccgagagagagaaagagagaggggtctttgggccaaacttggcccaaagggaggagggggatttatttttagtttttctttttagtaaactttga

SEQ ID NO: 25874 - DNA, 456 bp, Oryza sativa
  Clone ID: PAT_MRT4530_30718C.1
atgtccctttggaaggtgctcctgatggtaatcgcgctcatctgcgccctgcatactacttcagggagacctcccgtcgtgggatatcctgctcctcgtcccaacggtagctcgggctcatgacagcttcggcgtcttcctgtacaaggtctcctgcggccggcgtccagcggtggtggtcatgaacggcggcgaggacgcgatccacctcgtgcagtgggtctgggacacgcacgggcggcgcgcggtggcgggggcgacatcctcgacgcggccgacacgcggctgaacggcgagttcgacggcgcagacatggagcgcgcgctgaccgcggcctgaggccgtcagcgtgctgcggttcgtggcgccgctgccgagcctcccggcgaagatgccggtggcgagtacgggccgccggtgtccacagcgccggcggccagcagcaacgatttccat

SEQ ID NO: 25875 - DNA, 1215 bp, Oryza sativa
  Clone ID: PAT_MRT4530_30719C.1
atggccggctctaaccaagagcacgaggctgagtcgtggcctccggcaatctaccaccagatgccggcgatccttgagtacctcgaagaccaccgtgtcgtcgtcgtctccgccgcgcctggctccggcaagtcgtcggtgctcccccggtgcctcgccgagagcggatacggcccggtgctctgcgcgcagccccgccacctggccgcgttcgtggccatggcgaaggtcggcgaggagtgggattcggacatcgagttcacgacaacccggcagctcctcgacaggttcagctccccggcgccggtcctcgccgggtacggcgccgtcgtcatcgacgaggcgcacgaccgcacgctcggcaccgacgtcctcctcgggatggtcaaggccgcgctggcgacggggacgacgatgggcggccgatgcaaggtggtggtctgcaccgccggcgggccggccgacggcatgctctccgccttcttcggcggcgcgccggtcgtctcgatcccgcgcgcggcgcaccaggtcgaggtgcggtactcgcgagggcccgtgctcgacatggcggccgcggtggccgacgaggtggcggccatccacgcgtcgcagccgcccggcgacgtgcttgcgttcctgccggagaacgccgacatcatcggcgtccacgcgaggctgctcggcctgccagtgccagggctggccgttcgctacgtccacgacaacctcccggcggagctcatcgacatcatgctgataaactcgccggtgcccgacggccggaggagagtcgtgctggccaccgacgtggccgagacggccgtgctggtccacgggatcacgtacgtcgtcgacaccggcctggtgtcggaacagccgccggtgaggatctcaaaggaggcggcggccgcgcgggcggcgatcgccggattctcggggcccggccgctgccaccggctctaccagccggaggagtacgatgatctcgacgagcacaccatcccacacatcaggcaagatggcgcggccgtcaggttcgcgctcatggtcaagcgacatgccgctgacggcatcccggggtttgagatttttgacccggcattggaaccggcagtgctgaagaatgtctttggtcagcttgtcaacggtggctacttggacaagcttggaaatctgtctgacaagggggagagagaagcatatgacgaagactag

SEQ ID NO: 25876 - DNA, 695 bp, Oryza sativa
  Clone ID: PAT_MRT4530_3071C.1
gctctagatcgcggcgcggcgcggccgccgacgggcgaggtttctcgaccgaccggaacatggcttcaatctttggatgcatgcgtgctttagtccatcattgatgtccccaaggtgcatgggatgatatctgaacgggatatgggggtatcatgagcgaagatgcaaaaaatgataaggtcatcccttggaggtctacggaagataaacctcatctggaggtagggttaaagtgtgtttgtcataacgtgcatctgatcctctctcatactgcagcgacgagatttaaaggattatgctccctccataatgttcgcaatttgtcactttatccgttcaaaagcaatgctttctatatgctcaagaaccaagcttcacaaaagacatttccaatccggaggggctcctgtggggcgtggtgcgctgcgcgtcgtctgtttgagccggcccgggcccttgtcagggtccccacgtcacctgcagtcggccgccgttcgtcccgtttccgcccccgagttcagctgcgcgcccccttgctctgcttgcttcgctccgtgacctgcctgtacgcgttggtgctattgcttctcgccgttccttgcgtctttttttcccgctcgctcgtctgtcttcttgtctgacattgctagtcgttatgcgtgcaaagctatggcctacgggctatgttggccttc

SEQ ID NO: 25877 - DNA, 181 bp, Oryza sativa
  unsure (1)..(181): unsure at all n locations
  Clone ID: PAT_MRT4530_30720C.1
tcttttggaaacgtcttgacatatatgatttattcgtagaancggggtntgcccctgtncgaagaatngcaagcnccgtttntntattgcctgncccctgaaattgccaaatttnaaatcgaaaattagcggcaaaaaaaaaaaaaaaaaaaaaaaaaaaaaaaaaaaaaaaaannaaaaa

SEQ ID NO: 25878 - DNA, 150 bp, Oryza sativa
  Clone ID: PAT_MRT4530_30721C.1
atgacggctgctacaggcgccgagaggggagtggatgccggcgacccgcacatccaggggctaaggaactgggaaatgagcaagcatgaccagggtcaaggtggctccggtgccccttgctttgagcgtggtaaccaccaggtccactag

SEQ ID NO: 25879 - DNA, 281 bp, Oryza sativa
  Clone ID: PAT_MRT4530_30722C.1
ggatccccgggctgcaggctgggagagacttgtttgggatgtttaagggtctgaaacagacggtggtgaacgggatggttgcaacaaagcccccaccggtggaggaggagactgacactgaattcctagcacacaaggctaggtttcaggatttacagcagcagctcaccacaacatctcaacaggcggaagcattagttaaagctcgggatgatcttagaacaactacagctcatttgggaatgacattaattaagctagcaaaatttgaaagagagcag

SEQ ID NO: 25880 - DNA, 420 bp, Oryza sativa
  Clone ID: PAT_MRT4530_30723C.1
tttaactgtttggcacaaccttgttgtccttgagtcctgaaaactccagcaaaatattgttgtgattagaattaggtacaggcatctgattaagttattgtaaatcacatccaccatctgatttggtgaaggtatccctaaaacaaacaacatggatacaaattaatcaccttacaaaggatgattcctctatcttcacagagaatgattcctcttatctttacaaagttaaaaaaaaaatacatcacttgcagcaaaaagagtttcttctctacatagttcaaatatattatgctgaagaacattattatatagtacaatttatatactttggagtcatatattagttttgtgaaacaatgaagcaaatgtaatccatctaataaaatgttttatgataccatttacttattatttata

SEQ ID NO: 25881 - DNA, 327 bp, Oryza sativa
  Clone ID: PAT_MRT4530_30724C.1
atgggttgcccttcaggaccgaatacactagtcttcatctctgaggtgataaaagtgatcagcaaatattgtgcaagcataggtcaccacccagttgaccttcagttcttcctgaatgatctgcctgaacaacttgataatttggtcaccaaagatcaagaccaagaagcagatacactgccgcagtactatgttgttggattgccaagatcctactatacaagggtgctccctgacaagagtgttcacctcttccattcatcgtattccctacattggctttccccgataatgaaaattgtttacatttccggccacagccattag

SEQ ID NO: 25882 - DNA, 1104 bp, Oryza sativa
  Clone ID: PAT_MRT4530_30725C.1
ttttcaatggaaacttacttaggcatgactggaggggacggagaaaacagctatgcgaagaactcgaagatacaggcaaaagctttgcttgcaactaagccaatgattgaggaagcaatacaagaagtatatactgcactcctccctaagacgatacttgttgccgacatgggttgcccttcaggaccgaatacactagtcttcatctctgaggtgataaaagtgatcagcaaatattgtgcaagcataggtcaccacccagttgaccttcagttcttcctgaatgatctgcctggtaatgactttaattacctatttaaatcattagaccaagaagcagatacactgccgcagtactatgttgttggattgccaagatcctactatacaagggtgctccctgacaagagtgttcacctcttccattcatcgtattccctacattggctttccccggtaattacatcagaaccccaaaatgaaggaaacgtttacattgcggtgactacacctgaagaagtgataaagctataccaggagcaatttgaaaaggaattcttgaactttcttgagttgcgttcggaggaactcatatctggtggtaagatggtgctaacttttcttggacggaagaatgacaacatatttgatgaagataaaaatattctttatgaattaatttcacaagcattacaatcacttgtcattgagggcctcgtggagaaggagatgcttgactcctttaacattccattgtatggaccatcggtcaatgaagttagaacagccatcatgcaacaaaagcttttctccatcaaccacatcaaaatactcgagtcaagctgggatccacaagatgacgaattcgaaggacatactgtgctagaccctgttgagtctggggtgaacgtcgccaagtccataagagcagttatggagaggttgtttgctactcatttcggggagtctataatgccattgctcttctcaaggttcgcaagcaatgtcaccaaatacattgagaaaaacacaactagaaaaagcattttttccaacgtgggagtcctattttcgcaggcggacatgacccatagagtcaaatga

SEQ ID NO: 25883 - DNA, 489 bp, Oryza sativa
  unsure (1)..(489): unsure at all n locations
  Clone ID: PAT_MRT4530_30726C.1
cccacgcgtccggagcagttcatgcgctcgcatgtttcacggctcctccgcaacgacctcctcgctgtactcgccgagctgctccgccaggaccacgtcctcctctccatgaagatatatagcgtcgtgcggaaagaaatatggtaccgccctgatatgtacttctaccgggacatgctgtatatgctagctaggaacaagaagattgaggagacaaggcaggtctgggcagatcttaagtctgaagacgtgttatttgatcagcacacctatggtgacatcgttagagccttctgtgatgccggcttgattgatctggcaatggaattttacgaagacatgagaagctctccagatccacccctctcattgccgttccgggttatacttaaaggcctggttccatatcctgacctaagggagaagataaagcaagattntctagaactcttccctgatatgattgtatatgaccctccagatagcctg

SEQ ID NO: 25884 - DNA, 265 bp, Oryza sativa
  Clone ID: PAT_MRT4530_30727C.1
agttgatgcagctagcacactcgagcttaggttggcttttgcaagaaagatcgagctagagatggacaagagcagcaagatgatggcagaggaggaagagctggtgctcgcggttgtcgctgcgcaggaggcgaggaacatcaaggcctcggtgtgaagcagcattggagagcacggacactgtggtacagccgacgaccttcctgccgttcgaccgcttaaggagcgcggggccagtaatagtgggcatgcccagcagcagcat

SEQ ID NO: 25885 - DNA, 474 bp, Oryza sativa
  Clone ID: PAT_MRT4530_30728C.1
atgagccgcacgctcctcggctgctgcgtcgaccgcgacctctacctcgtcttccacttctccggccgcggctccatctccgccaacctccatgacgagaaggcgccggcgatgtggtgggcggtggggtggattgcttcgctgcgtcggggcgggggacatcgcgttgagatccgctgccgcctcatcacccgtcgtcagccaccgaactcccgcctcccccaccggctggctgccctgcccacctccgaactgaggagagggagagaaaagaagaggagagaggaagagaggggaggggaagaaggggctgatatgtgggacccacagcacggaatgcttacatgttcactgaaatcactagctggtgatggcggcgtcgatattgggggagagctggcctttgtagtagatgtatccgaggaggtcagcgacaagagagatggacaagaggtcgtaggcatcggtgaataa

SEQ ID NO: 25886 - DNA, 3615 bp, Oryza sativa
  Clone ID: PAT_MRT4530_30729C.1
atgacgaagccgccatccaagacggaggtggagccatctaatgtgatgctggtcacattggatggcttcgaaggagaagatcgtaaagctatggaggagtacatcaacgagctcacatgggaggcgttgatgagagcaactactaggactcgtcaaggcgtgatcatcaagcccgggccacatcccaagcttgctcccgacgtggtaagtaatgacgaggtatcacaatctatccaacaacaaattgcatctacaatagattcatctatggctaattttaaagatcgattagatgtaatgtttaaggataaagttgatgggtttttaaggagtaggctcggttcttttatggatgattacacattaaaagataaagcctataccactgctgatcaacctcctataggtcaaacgggtagtaaaaccgacggaacggcgttcacggccggtccgaccgggcctgacagtcggtcagaccgcgacacagccgtcggtccgaccggccaaatgaccggtcaaaccgggtattatcccatcggtccgaccggccagatggccggtcagaccgggtattatcccaccggtcagaccggccctcaggccggtccgaccgcgcaacatgacgccggtcagaccgggccctgggccaatcagaccagtgcaatcgtcccgatacagggaattgatccaatgattaatgctagttatttgtatcactttagaacatttgatcctcctgtatctactgccaccactagtcctcaaattcccccacatattcctaacatttataatgatgtttctaggggatatcctcccgatactaggcaaggccaatataatcatattgcgccacaaacgcaacctattaggccaccaaacccaccaccaaatccacaagggcctaataacatggaggatatgattagtgatattatgaggaatagattcgggatcgaaactaggaatcgtgctagagcttacaaaaagccatatccccattattatgacaatgtgctgtttcctagaaattatagagttcccgaatttgccaagtttagtggtgaggatgttgctcctcttagagaaaaactagatggccaacaatttcttgatgttagtcaactcatgcaaagggctctggctcaagaaagccgggttaaggataataaaaaatttgatagaccattcgacaaaaagcctaatgtcaatatagttgattactctgatgctagtgatagtgaggaggagggtgatcatgatatttatgttgccgagtggtcatggactaacaaaaataaaccttttgtttgttctaacctaatgccaactcctcgcaaagatcggcagagtgaggctagtttagagttgttacaaaagagggtgcaagaatatcggtctacaaagaacaatattggagaaaccgttgaagattttgatgaagtagagaagcttggacaagggtttacatcggccgatccattagaagaagtagatataggtgatggaactaaaccaaggccgacttttgtaaacaaaaacatgaaagccgattataaggttaaggtaatcgagctacttaaagagtatgttgattgctttgcgtgggagtaccatgagatgccgggtcttagccgtgagcttgttgagcatcggcttccaattaaaccgggttttaggccttataaacaaccacctcgtcattttaaccctttactatatgaccgagtcaaagaggaaattgatcggttgttgaaagcggggtttattaggccatgtcgttatgcggagtgggtttctagcatagtcccggtggagaagaaggggagtggtaagattagagtttgcatagattttagagatttaaataaagccactcctaaagatgagtatcctatgcctatagccgacatgatgattaatgatgcctcgggtcataaggtgattagctttttagatggtaatgccggctacaatcaaatctttatgacggaagaggatatgtacaagacggcttttaggtgcccgaggtttgttggtttatttgagtgggttgtcatgacctttggtttgaagaatgccggtgcaacgtatcaaagggcaatgaatttgatcttccatgatttgctaggtattatcttagagatctacattgatgatattgttgtcaaatcggatgatatggaaggacatatagctgatttgagattagcttttgagaggatgcgccggtatggtttgaagatgaacccacttaaatgtgcttttggtgtgtcagcggggaagttcttaggattcatggtgcatgagagaggagttgagattgatcctaagaagatagaaaaaattcgtgatttcaaagcgccgacatgcaagaggccaattctaagtgggagaattggcaagtgggcatatgctttgatagaatatgatttgacttatgaaccattgaaaactataaaaggccaaattgtatgtgattttatagtagaccatcatatagatgttgcttatgagggagagcaagcatctggatataatgtgaagaagggattatttatgatattagaagagccggtgcttgattttaaatctttgtgcgaaattggcaaaattggagaccaggggcggtctgaccggcattgcacggccggtctgaccggtgaccaggggcggtctgaccggccgcatgccgtcggtctgaccggcgaccccgagcagtctgaccggctctgtgtggccggtctgaccggtattgagcagagcgctggggggcacgcttcaatcgatttggaggccgaattatgtgagaattcggacatttgtgcccaggatatagaagaggattggagaattcctttgattcaatatctaaaagatcccacacttaaggttgatcggaaaattcggcggcaagcattcaaatatacattgcttgatggagatttgtatcgccgaaacatagatggtgtcttgttgaagtgcttagatgaagatcaatctaaagtggctatgggagaggctaatggacaagccgagtcgagtaataaaacattgttaaagctagtaaaaaagaagattgaggaacacccgaagaggtggcataaagtgctttctgaagcattgtgggcacatagaatatctaaatatggttccactaaagaaactccttttgagttggtttatggtcaagaagccgttttaccggtggaggtaaatcttggctctcttcgttatatcaagcaagatgatttgtcaagtgaagattacaagacgttgatgggagacaaccttgatgaagtcatcgacaagcgcttggaggcattggaagagacagagaaagagaagaagagggtggccaaggcatacaacaagagggtgaaagcaaaattgtttcaagttggagacttggtttggaagacaattttgcctttgggtactcgatccaaggagttcggtaagtggtctcctagttgggagggtccttatcgagtgtgcagcattgttcgagggaacgcatactttttagagacacttcaaggggagcattttcagcgagcaatcaacgggaaatacttgaagaaatacttcccgagcgtttggcaagccgcttag

SEQ ID NO: 25887 - DNA, 1191 bp, Oryza sativa
  Clone ID: PAT_MRT4530_3072C.1
atgtttcgacagttggcgcgccaggcgattgatgctggtcatggactcgaggcgtctcagctttccggtcgatcggccgcgggtccactctgccggcttgtcttcgccaccgccattgctgataacaacaacgacttcgccgaccggcctgcctctgtcgccgccgactggtgtcttcgcctatatggttggttggtcacaccaccgttgttgggcgtctacgacttcaccgccggcctgcctccgtcgccgccgactggtgccttcgcctatacggttggttggtcacgccaccgttcatgggcgtccacgtcttcgccgaccggcctgcctctgtcgccgccgactggtgtcttcgcctatatggttggttggtcacaccaccgttgttgggcgtctacgacttcaccgccggcctgcctccgtcgccgccgactggtgtcctcgcctatacggttggttggtcacaccaccgttcatgggcgtccacgtcttcaccaccggcctgcctccgtcgccgccgattggtgcctccgcctacacggctggcctattatgccaccgttgttgggcgtctacgtcttcaccaccggcctgcctccgtcgccgccgattggtgcctccgcctacacggctggcttattatgccgccgctgttgggcgtctacgacttcaccgccggcctgcctccgtcgccgccgactggtgtcctcgcctatacggttggttggtcacaccaccgttcatgggcgtccacgtcttcaccaccggcctgcctccgtcgccgccgattggtgtctccgcctacacggctggcctattatgccgccgctgttgggcgtctatgacttcaccgccggcttgcctccgtcgccgccgattggtgcctccgcctacacggctggcctattatgccgccgctgttgggcgtctatgacttcaccgccggcctgcctccgtcgccgccgagtggtgcctccgcctacacggctggcctattatgccgccgctgttgggcgtctacgacttcaccgccggcctgcctccgtcgccgccgagtggtgcctccgcctacacggctggcctattatgccgccgttgttggacgtctacgtcctcaccgttggcttaccttcgttgccgtcgactggtgtttccgcttacacggctgacctattatgccgccattag

SEQ ID NO: 25888 - DNA, 257 bp, Oryza sativa
  unsure (1)..(257): unsure at all n locations
  Clone ID: PAT_MRT4530_30730C.1
ggggggggggggttttttttttttttgggccagaacgcgcaaaatcatatataggactttatcaccagctattttggtttcaaaacatttcattattcaatattgggttggatcactatctcggggcatgcaacacagcaacggtgtgatcgggggggggggttanncaagccagctaagcctagtactggccggcggcgaaaatgctgcactgctggggctcaacccggcacatcgacggcagctgcggccgcgta

SEQ ID NO: 25889 - DNA, 3801 bp, Oryza sativa
  Clone ID: PAT_MRT4530_30731C.1
atggaggaggcggccggagcggagggaggcggtggcgcggctcgggtcgacggggacggcggcgctccggcggtcggcgaccgaaacatagaggtggacgaggtcggcgaggatgcggcgaagccgaaggaggcggcgccgaggtgggaggcgttccggggcgacgacggcggcggaccggagctcggcggcgacgccggtctgaccaggccttctggccggtctgactgcagccatacagccggtctgaccgggacaacaggccagtctgaccgccaacccgacggcggtccaaccaacgcctcaggccggtttgaccgtgcgccaaatgtcggtctgaccggcgcatctggctggtctgaccggtggtctacatccggtctgaccgggctccagcgccggtttgataggaggattgtaaatggcgatgtgagggcttcatcgtcttcaagcaaggttaatagagggcattatttacctcttggaacagagccgaatcctaggtggatgcctaaggattttacggctactcaaaagagaaggttgcaacgtcttcgagctcaagagatgagagagaaaaaggccgaagagcaaagagataaaaggttcaatgagttgcgaccaccactagtatggaggcataagtccatagagaaggaaaaaccggttgttgtagaggagaaggaggaacaatcggttgataaaggtgaatcatctccaaaagaagacatgtatatcaacatggtatgtatgttgcctatggagttttgtgctatggatgaagctgaggttgctcaattctcattaggtcctaaagacgcggtttttgagaagcccgatgagtcaaaccgtcacatgaagcctctctatctcaaaggctatgttgatgggaagccggtctctaggatgctagtggatggaggtgccgccatgaacttgatgccgtacttattattcaagaagttggggcgtgaggatgatgagttgaagaagaccaatatgattctcaatggcttcaatggtgaaccaacagaggcaaagggtatcttttcggcggagctcaccgtgagaaacaagacgctaccaaccgctttcttcatcgtcgatgtgcaagattttgatgaagtggagaagcttggacaagggtttacatcggccgatccattagaggaagtggacataggtgatggaaccaaaccaaggccgacttttgtaaacaaaaatatgagagccgattataaggttaagataatcgagctacttaaagaatatgttgattgctttgcatgtgaatatcatgagatgccgggtcttagccgtgagcttgttgagcatcggcttccaattaaaccgggttttaggccttataagcaaccacctcgtcgttttaatcctttgctatatgaccgggtcaaagaggagattgatcggttgttgaaggcggggtttattaggccatgtcgttatgcgaagtgggtttctagcatagtcccggtggagaagaaggggagtggtaagattagagtttgcatagattttagagatttaaataaagccactcccaaagatgagtatcctatgcctatagccgacatgatgattaatgatgcctcgggtcataaggtgattagctttctagatggtaatgccggctacaatcaaatctttatggcggaagaggatatgtacaagacggcttttagatgcccgggatttgttggtattatcttagagatctacattgatgatattgttgtcaaatcggatggtatggaaggacacatagccgatttgaggttagcttttgagaggatgcgccggtatggtttgaagatgaacccacttaagtgtgcttttggtgtgtcggcagagaagttcttaggattcatggtgcatgagagaggggttgagattgatcctaagaagatagaaaagattcgtgatttcaaagcgccgacatataaggaggtccaaaagttgctaggtaaggtcaattatttgagaagccgattttacttgggggcaaaacaacaagaggtgtttgaagagttgaagaggtatttgtctactacacccgttgtgcgagcgcctaaagccggaaagccttttcggttatatattgcctccgaggacaaagttattagtgccgttttgacgcaagaggaagatggcaaggaatatatcattacatatttgagccgccgtcttttggatgccgaaacgagccagattgtatgtgattttatagttgaccatcatgtagatattgcttatgaggaagagatttgcctagttgaagttataccttggaagatttattttgatggttcttcttgcaaagaaggtcaaggcataggggtagttttgttttcacctaatggcatgttttatgaagcatcggttcgtttggaatattattgtacaaataatcaagccgaatataatgctttgttattcggcttacaagtcatggagatggctgaagctaagtacgtggaagcttttggtgattcggaattggtggtgcaacaagtcgccggagtctacaaatgcttggacagatcactaaataggtacctcgattcatgtttggatattattgccaattttgataattttgctattaaacatattgctaggcgtgataactctagagcaaatgacttggcacaaaaagcatctggctataatatgaagaagggattatttctgatattagaggagctggtgcttgcttttaaatctttgtgcgaaattggcaaaactgaggaccaggggcggtctgaccggcattgcgtggccagtctaaccggtgaccaggggcggtctgaccggcccatgccgccggaagcagaagaagattggagaattcctttgattcgatatttgaaagatcccacacttaaggttgatcggaaaattcggtggcaagcatttaaatacatattgcttgttaaagatttatatcgccgaaatatagatggtgtcttggtgaagtgcttagatgaagatcaatctaaagtggcaatggagagaggatgtgaagcttgtcaacggtttggcaatgttcaattggcgcccgccgccgtgttgagtcctataatcaaaccatggccgttccgaggttgggctttggatttcattggtcaaatttatccttcgtcgtcaaaggggcataggttcgtgctagttgctacggattacttcaccaagtgggccgaagccgtgcctttgaagaatatgactcatacggaggctaatggacaagccgagccgagtaataagacattgttgaagttagtaaaaaagaagattgaggaacacccaaagaggtggcatgaggtgctttctgaagcattgtgggcgcataggatatctaaacatggtgccactaaagttactccttttgagttagtttatggtcaagaagccgttttaccggtagaggtaaatcttggttctcttcgttgtgtcaagcaagatgatttgtcaagtgaagattacaagacgttgatgggagataatcttgatgaagtcatcgacaagcgtttgaaggcattggaagaaatagagaaagagaagaagagggtggccaaggcgtacaacaaaagggtgaaagcaaagttgtttcaagttggagacttggtttggaagacgattttgcctttgggaactcgagtgtgcggcattgttcgagggaacgcatactttttagagacacttcaaggggagtgttttcagcgagcaattgatgggaaatacttgaagaaatacttcccgagcgtttggcaagacgcttag

SEQ ID NO: 25890 - DNA, 126 bp, Oryza sativa
  Clone ID: PAT_MRT4530_30732C.1
atccacataagttgggccggaataatgggaatcccaactccgtgcgggcccatgttagctgggccgacaggggaacctgacctcggcgctgacccatgtgaattgggccgtaatgcgcgggccaat

SEQ ID NO: 25891 - DNA, 843 bp, Oryza sativa
  Clone ID: PAT_MRT4530_30733C.1
atgggagaggtgcatgaaggaatttatggaactcatcaatcggcctataagatgaattggttgcttaggagagcggggttctattggccgaggttgattgaagattatttcaaatattataggggatgtgaagcttgtcaacggttcggcaatattcaattggcacctgccgccgtgttgaaccctatcattaaaccatggccgttccgaggccgaagcggtgcgctcaagaatatgactcatacggaggctaatggacaagccgagtcgagtaataagacgttgttgaagcaagtaaaaaagaagattgaggaacacccaaggaagtggcatgaggtgctttccgaagcgttgtgggcgcataggatatctaaacatggtaccactgaagtgactccttttgcgttggtttatggtcaagaagtcgttttaccggttgaggtaaatcttggttctcttcgttatatccaacaagataatttatcaagtgaagattacaagacattgatgggagacaaccttgatgaggtcatcgataagcgcttgaaggctttggaagagatagagaaagagaagaagagggtggccaaggcgtacaacaaaagggatcaccacaaggctttaggtgttgcgatcgtgcttgtcaacttgtcacaaaaagttgccaacagtagcatttcacctggaagtattccaagctatcgaatttccacagggaatatcgcacctcgcaggagaactcatgaacgacgagaaaacagggagagtgagctagggtctggattcggctgccccaagcctgggaggtgcaagatctggaagtgctgcccaccaaggcgctag

SEQ ID NO: 25892 - DNA, 582 bp, Oryza sativa
  Clone ID: PAT_MRT4530_30734C.1
atgccctcctctttcctctctcctctcctctcgccgtcgccaattctctcctcctccttcccccgtggggatgcggcggctatggcggtggataaagataaagagttcaaaattgattggaagagggtgggcatcacaagctcatttggatttgcttttgttggaccagttggacattactggtatgaatacttggatcgcttcatcctgaggagataccagcctaagaccttcaaatttgttgcgtcaaaagttgctgcggatggtctcctatttggaccagtagatcttctcttgttcttctcatatgttggtcttgcatcaggaaggagtgtagagcaggtgaaggatgatgtgaagagggacttcattcctgctctagttctagggggaaccatctggccagccgtgcaaatcgcaaatttccgcttcattcctgtgcgatatcagctcctttacgtgaacctgttctgcctcttagacagttgcttcttgtcgtggatcgatcaacaaggagatgcaccttggaagcaatggttcacatcattccagaaaatcgaaggccagaagggcaaggtttga

SEQ ID NO: 25893 - DNA, 4755 bp, Oryza sativa
  Clone ID: PAT_MRT4530_30735C.1
atgacgaagccgccatccaagacggaggtggagccatctaatgtgatgccagtcacattggatgacttcgaaggagaagatcgcaaagctatggaggaatacatcaatgagctcacacgggaggcgttgatgagagcaactactaggactcgtcaaggcatgatcatcaagcccgggccacgtcccaagctcactcccgacgtggtaagtaatgacgaggtatcacaatctatccaacaacaaattgcatctacaatagattcatctatggctaattttaaagatagattagatgtaatgtttaaggataaagttgatggttttttaaggagtaggctcgattcttttatggatgattacacattaaaggataaagcctataccactgttgatcaacctcctatagatccaatgggtagtaaaaccgacggaacggcgttcacggtcggtccgaccgggcctgacggccggtcagaccgcaacatagccgtcgatctgaccgtccagacggccggctatcctcccgatactatgcaaggccaatataatcatattgcgccacaaacacatcctattaggccaccaaacccaccgccaaatccacaagggcctaataacatggaggatatgattagtgatattatgaggaatagattcgggattgaaactaggaatcatgctagagcttacaaaaagccatatcctgattattatgataatgtgtcgtttcctcgaaattatagagttcccgaatttgccaagtttagtggtgaggatggtaagaccacatgggagcatgtaggtcaatttttagtgcaatgtagtgaggctaatagtgatacttttaaattgcgcttgttttctttatctttatccggtaatgcttttacatggtttacttctttaccggcaaattctattcatacttgggctcaattagaagaacaatttcatgattatttctatactggggaaactgagcttaggttatgtgacttgacatcggttaagcaaaagtataatgaatatgtcattgattatattaagagatttagagatgttagaaaccgatgttatactttgaatataactgatagagatttggccggtcttgcttttaatggtttagttgctcctcttagaaaaaaactagacggccaacaatttcttgatgttagtcaactcatgcaaagggctctggctcaagaaagccgggctaaggataataaaaaatttgctagaccatttgacaaaaagcctaatgttaatgtagttgattaccctgaggctagtgatagtgaggaggagggtgatcatgatatttatgttgccgaatggtcgtggaataataaaaataagccttttgtttgctctaacttaatgccgactcctcgcaaagatcggcaaagtgaggttaagtatagttttgacgtggccaagtgtgataagatttttgattaccttttgcaagaaaaacaaattagattacctaaaggccatgtcataccatcgcaagaagagttgaagcgtcgagcatattgtaaatggcatgattctcattctcactctactaatgattgcaatgtgtttcgacgacaggttcaatcggccatagatgaaggacgattgaagttcaccgatggctccaagatgaagcttgatcatgatccttttccggtgaatacaattaatttcaatgataagaaggtgttgattcggccggagcaagccgaatctactaagggaaaggaagtggtcattggtgaaccaagatcaaagatgatggtgccaaagaagccggaggttggtgtttggaaggagaataagagtggagcttcaacttataaggctcctaggaagaccaaagtgacctttgatatgcttttggagaaatatgagaggcaaggtggtgagaaaattcgcaacaaagggaagagaccaagatcacctcctagggaacgatttggtcattcaccaagacggtcgcattcaccttcatatcatcatccacaagacatgtcatggggtccctatccgatgccgccgccgggttattcttatccctacttcatgccatggggggcaacgccgccaatgtaccatcatatgcctccaatgcaattcaaccaagggtggggaggaccaaggaggacaattcatgagcgtttgtcttcgccaaacaatagccggttctatgatggagttggaaagtccccaagcaaaaaatccgaagccggtaccagctcctcgcagacggtcggtctgaccaggccctctggccggtctgaccgcggccatgttgccggtctgaccgggccatcaggccggtctgaccgtcgacccgatagtggtccgaccgacgcctcaggctggtctgaccgtgtgccacacgtcggtctgaccggcgcgactggccggtctaaccggtggtctacggccggtctgaccgggctccagcgccggtttgatgagaggattgtaaagagcgatgtgagggcttcatcattttcaagcaaagtcaatagaggacattatttacctcctggaacagagccgaatcctaggtggatgcctaaggatttgacggctactcaaaagagaaggttgcaacgtcttcggacccaagaactaagggagaaaaaggccgaagatcaaagggataaaaggttcaatgagttgcgaccaccaccgatatggaggcctaaatccatagagaaggcaaaaccgattgatgtacaggagaaggaagaacaatcggttgataaaagtgatttatctccaaaagaagacatgtatataaatatggtatatatgttgcctatggagttttgtgctatggatgaagccgaggttgctcaattctcattaggtcctaaagatacggtttttgagaagctcgatgaatcaaaccatcatatgaagcctctctacctcaaaggccatgtggatgggaagccggtctctaggatgctagtggatggaggtgctgctgtgaacttgatgccgtactcgttattcaagaagttggggtgcgaggatgatgagttgaagaagactaacatgattctcaatggcttcaacggtgaaccaacggaggcgaggggtatcttttcggcggagctcaccgtgggaaacaagacgctaccaaccgctttcttcattgtcaatgtgcaagagtggttacaaaaaagggtgcaagaatatcggtctacaaagaacgatattggagaaaccgttgaagattttgatgaagtggagaagcttggacaagggtttacatcggccgatccattggaagaagtagacataggtgatggaactaaaccaaggccgacttttgtaaacaaaaacataagagccgattataaggttaagataatcaagctacttaaagagtatgttgattgctttgcatgggagtaccatgagatgccgggtcttagccatttgaggttagcttttgagaggatgcgccggtatagtttaaagatgaacccacttaaatgtgcttttggtgtgtcggcggggaagttcttaggattcatggtgcatgagagaggagttgagattgatcctaagaagatagaaaaaattcatgatttcaaagtgctgacatgcaagaaggaggttcaaaagttgctggtgggtaaaatcgatgcttttgttcctatacttcgcttaaaaaaggaagccgattttacctggggggcaaaacaacaagaggcgtttgaagagttgaagagatatttgtctactccacccattgtgcgagcgcctaaagccggaaagccttttcggttatatattgcctccgaagacaaagtcattggtgccgttttgacgcaagaggaagatggcaaggaatatatcattacatatttgagtcgccgtcttttggatgccgaaacgagacatattgctaggcgtgataattctagagcaaatgacttggcacaacaagcatctggttataatgtgaaaaagggattatttctgatattagaagagccggatacagaagaggattggagaattcctttgattcaatatctaaaagatctcacgcttaaggttgatcgaaaaattcggcggcaagcattcaaatatacattgcttgatggagatttgtatcgccgaaacatagatggtatcttgttgaagtgcttagatgaagatcaatctaaagtggctatgggagaggggcataggttcgtgctagttgctacggattacttcaccaagtgggccgaagccgtgcctttgaagaatatgactcatacagaggctaatggacaagctgagtcgagtaataagacattgttaaagctagtgaaaaagaagattgaggaacacccgaagaggtcgcatgaggtgctttctgaagcattgtgggcgcataggatatataaacatggtgccactaaagtcactccttttgagttggtttatgatcaagaagccgttttaccggtagaggtaaatcttggttctcttcgttatatcaagcaagatgatttgtcaagtgaagattacaagatgttgatgggggacaaccttgatgaagtcatcgacaagcgcttgaaggcattggaagagatagagaaagagaagaagagggtggccaaggcgtacaacaagagggtgaaagcgaaattgtttcaagttggagacttggtttggaagacaattttgcctttgggtactcgatccaaggagttcggtaagtggtctcctagttgggagggtccttattga

SEQ ID NO: 25894 - DNA, 2146 bp, Oryza sativa
  unsure (1)..(2146): unsure at all n locations
  Clone ID: PAT_MRT4530_30736C.1
atggcaccgtacgaagcgttgtatggccacaaatgccgaacaccactattgtgggaccaagttggggaaagccaagtgttcgggaccgatatcttgagagaagctgaagcgaaggtcaggaccattcgggagaatctaaaggtggcccagtctcggcagaagagttatgcagacaaccgacgccgtgacctggaattcgtagtggatgactttgtgtatctccgggtcacgccgttgcgaggcgtacaccggtttcagacgaaagggaagctcgcacctcggtttgtgggtcctttccggatcattgctcgacgcggagaagtcgcttaccagttggagctgcccgcctccttgggcaacgtgcatgatgtgttccatgtgtcgcaactcaagaaatgccttcgagtgtcgtccgagcaggccgactcagagcagattgaagttcgcaaagacttgacccacgtggagagaccggtgaaaatcctgggcgccatggagcgcaggaccaggaaccgggtaatccgtttttgcaaggtccaatggagcaaccacgccgaggaagaagctacttgggagcgtgaagacgagctgaagacagcccatcccgttctcttcgccacttttgagaggatgcgccgaaatggtttgaagatgaacccacttaaatgtgcttttagtgtgtcggcggggaagatcttaggattcatggtgcaagagagaggagttgagattgatcctaaaaagatagagaagtttcgtgatttcaaagagccgacatgcaagaaggaggtccaaaagttgctagcgcaacaagcatctggctataatgtgaagaagggattatttctgatattagaagagccggtgcttgattttaaatctttgtgcgaaattggcaaaactggagaccaggggcggtctgaccggcattgcacggccggtctgaccggtgaccaggggcggtctgaccggccgcatgccgccggtctgaccggcgaccctgagcggtctgaccggccctgcgtggccggtctgaccggttctgggcagaacgctggggggcacatttcaatcaatttagaggccgaattaagtgtgaattcggacatttgtgcccagggaacagaagaagattggagaattcctttgattcgatatttgaaagatcctacacttaaggggcataggttcatgctagttgctacggattacttcaccaagtgggccgaagccgtttctttgaagaatatgactcatatggaggctaatggacaagccgagtcgagtaataagacattgttgaagttagtgaagaagaagattgaggaacacccaaagaggtggcatgaggtgctttccgaagcattgtgggcgcataggatttctaaacatggtgccactaaagtcactccttttgagttggtttatggtcaagaagccattttaccggtggagataaatcttggttctcttagttatatcaagcaagatgatttgtcaagtgaagattgcaagacattgatgggagacaatcttgatgaagtcatcgacaagcgcttgaaagcattggaagaaatagagaaagagaagaagagggtggccaaggcgtacaacaaaagggtgaaagcaaagttgtttcaagttggagacttggtttggaagataattatgcctttgggtactcgatccaaggagttcgcgagcaatcaacgggaaatacttgaagaaatacttcccgagcgtttggcaagacacttaggaggtactatggccggagggaggggcgagcgctactccttgccagacctccacgccgcctcgctgccgggagctgtcgaccggctgctgctccagggatccgccgaccagccgttgcaccgagagggatccatcgctgcgccggggatccgccgacccgccgctgggccgccgccgccgcctcccctccttctagatgcggcggaggggagggngccaccgcctcccctcccctcccgccagatccgggacaccggatctggcacacagggccgcctccacctcctctcccgctggatccagcggatgggagggcaccggcggcgccgccgccgagacactgggccgccgcccctgcccgccgcctcccctcccgccggaaggaagg

SEQ ID NO: 25895 - DNA, 2179 bp, Oryza sativa
  Clone ID: PAT_MRT4530_30737C.1
cccacgcgttcggtccgcccgcgttcacaaggagaggagaggaggttgaggttgatcttgagtgtgaggagaggcgagatcggaaaaaggggaaatcggcgttgcgatgccgaagcgggtggccgacgagatcgcggcgctcccggagccgcgtgggcccctgcgccgcccctgcgccgacctctcccgccgcgtccgcctcctcgccccgctgctcgaccacctccccgcctcctcctcctcctcctcgagtactcccctcgccgacgccctcggggccgcgcgagacctcctccgcaagacccgcgacggcagtaagatcgaccaggccatgcgaggggatgcgttcctggacgaatttgcaggcgtcaacaggcagattcacctcgccttggatgccttgccctacaacaccttccacatgccccaagaggtccaagagcaggtcgcgctcgtccactcccagttccaacgagcctccacaaggacggatcccccggatacacagctttccatggatcttgcttgggctcttaccgacaacccttccgaccccgcccttctcaccaggatctctcacaagctgcagctgcacaccatggctgacatgaagaacgagtccatcgcccttcataacatggtcatttccactgccggagaacctgatggctgtgtcgaccaaatgtcttccctgctcaagaagctcaaagactgcgtcgtcactgaagatcatgccaacgatgccctcaccactaggtctgcctccattaagcataggtctcctatcatcccagacgagtttaggtgccccatatccctcgagctcatgcaggaccctgtcattgtgtccagcggccagacatatgagcgatcctgcatccaaaagtggcttgattctggccacaagacctgccctaagacgcagcagccactctcgcatacttctctcaccccaaactttgtcctcaaaagcctcatctcacaatggtgcgaagctaatggtattgagcttcccaagaacaaacagaattcccgtgataagaaggcggcaaaaagttccgactatgaccatgctggtctagtctcgctgatgaacaggctcaggagtgggaaccaagatgagcagcgggcagctgcaggtgagatacgactgcttgccaagagaaatgtcaacaaccggatatgcatcgctgaggcaggagccatccccttgctggtcaatctgctctcctcttcagatccacgaacacaggaacatgcagtgacagcactcctgaacctctccattcatgagaacaacaaggcaagcatcgtggactctcatgctatccctaagatagtggaagtgctgaaaactgggagcatggaaaccagagagaatgcagcagccacactattcagcttatcagttgttgatgagaacaaggtaactattggcgccgctggtgcaatccctccactcatcaaccttctgtgcgatgggagcccaagaggcaagaaagatgctgcgacggcaatttttaacctgtgcatatatcagggaaacaaggtccgggcagtgaaagctggaatcgtcatccatctgatgaacttcttggtggatcctacagggggaatgattgacgaggcacttagtcttctgtcaattcttgcaggcaacccagaaggcaagattgtaattgcgcggtcagaaccaattcctccacttgttgaggttatcaaaacagggtctcctcgcaatagggagaacgctgcagccattctatggttgctctgttctgctgatactgagcagacattggctgcaaaggcagctggagtggaggatgcactcaaggagctgtcagaaactggaacagatcgtgcaaagaggaaagcttctagcatcctcgaactcatgcaccaagcaaatgaggcatgaagcagacaacattcatttgtttaaatctgatttgtggtcgtcttatagctgtagcccattgtacacatagacatataaacactaaattgtttctcaattatgttgaagtttgatatatatatgtaggcagattttttaaaagggaatatgccgtaaacgtataaagtgttgtataatttatattgtaacttgctaccatgtacttgataaaactggtaaaaaaatccatgtgtttcagtttgctggctaataaaaaaa

SEQ ID NO: 25896 - DNA, 5628 bp, Oryza sativa
  Clone ID: PAT_MRT4530_30738C.1
atgggtcaagccaattccgcactacaggtgatcagcgacaacccgcgcgccctgagggacaagctgcgggcggccagcggaagctgcccgccggcgaactaccgcgacggcgccgtcgtgctcgagaacgccgtcctgctgtcgattctcgcggagctcggcgcgtcgacgccgacgccggtcagaccgcaggtatatgggcggtcagaccggcagggtccgagtccgagtctgattttgtcaagtctcaggtttccttactcggaaaggcatgtttcgtgtttccttttgtttctatcccgagttgggcatggagaagggcctgtagaggatcgaggtggttggcgactctatatcaccgcaaggcgtttaggtgttgcgatcatgcttgtcgacttgtcaaaaaagttgccaacacgatttttggcgactccgctggggaagagatccgttcatcgtcaactcaacttcgacttcgccatgacaaagccgccatccaagacggaggtggagccatccaatatgataccggtcacattggatgatttcgaaggagaagaccgcaaagctatggaggagtacatcaacgaactcacacgtgaggcgttgatgagggcaagcactaggactcgtcaaggtgtgatcatcaagcccgggccacatcctaagctcgcccccgatttggtaagcaatgatgaggtaacacaatctatccaacaacaagtagcatctacaatagattcatccatgattggttttaaagataagttagatgcaacttttgagggtaagtttgatgaatttttaaggtttaaattcggccctcttatggccgattacatgtcaaaggataaagcctttaccactgctaaccaacctcctatagatcaaatgggtagtagaaccgatggagcggcgcacacggtaggtccgaccgggcctgacggccgatcagaccgcgacctagccgtcggtccgaccggccaaacggccggtccgaccgggtattaccccggcggtcagaccgggactcaggccggtccgatcgcgcctctggatgccggtccgatcgggccctgggccggtcagaccgagttcccgaatttaccaagtttagtggtgaagatgagatttagggatgttagaaaccgatgttatagcttgaatataactgatagagatttggctggtcttgcttttactggtttaattgctcctcttagagaaagactagatggccaacaatttcttgatgttagtcaacttatgcaaagggctctggctcaagaaagccgggttagggataataaaaaacttgttagaccatacgacaaaaagcctaatgttaatgtgattgattaccctgaggctagtgatagtgaggaggagggtgatcatgatatatatgttgctgaatggtcatggactaacaaaaacaagccttttgtttgctctaacctaatgccgactcctcgcaaagatcggcaaagtgaggttcaatcggccatagatgaaggacgattgaagttcaccgatggctccaagatgaagcttgatcatgatccttttccggtgaatacaattaatttcaataataagaaggtgttgattcggccagagcaagccgaatctactaagggaaaaggagtggtcattggcgaaccaaggcctaagatgatagtgccaaagaagccggaggttggcgtttggaaggaaaataagagtggagcttcaacttctaaagcccctaggaagaccaaggtgacttttgatatgcttttggaaaagtatgagaagcaaggtggtgagaaggctcgcaacaaaggtaaaagaccaagatcacctcctagggagcgatttggtcattcaccaagacggtcacatttaccttcatatcatcatccacaagacatttcatggggttcttatccaatgccgccgccgggttatccttatccttacttcatgccatggggggcagcgccgccaatgttcaatcatatgcctccaatgcaattcaaccaaggatggggaggaccgaggaggccaattcatgagtgtttgtcttcaccaaacaatggccggttttatgataagaatcgggctaatgaagaaaagagggaaggaaagcgtgttaaggtggaggcaaggacttcggaagtaattaccatcaaagtggggtctcatgatgtgccaataccttttggagatgaagttggagagtcctcaagcaaaaagtccgaagccggtaccagctcatcgcagtcggccggtctgacctggccctctggccggtctgaccgtagccatgtggccggtctgaccgggccatcaggccggtctgaccgccgacccgacaacggtccgaccgactccttagaccggtttgaccgcgcgccaaatgtcggtttaaccggcccatctggctggtctgaccgatggtctacgtccagtctgaccaggctccagcgccggtttgataggaggtttgcaaagggcgatgtgggagcttcatcgtcttcaagcaaggttaatagaggacattatttacctcctggaacagagccgaatcctaggtggatgcctaaggatttgacggctactcaaaacagaaggttgcaacgtcttcgggctcaagaaatgagagagaaaaaggccgaacaacaaagagataacaggttcaatgagttgcgaccaccaccggtatggaagcgtaaatccatagagaaggaaaaaccggttgttgtagaggagaaggaggagcaatcggttgataaaggtgagacatctccaaaagaagacatggatatcaacatggtatgtatgttgcctatggagttttgtgctatggatgaagccgaggttgctcaattttcattgggtcctaaagacgcggtttttgagaagcccgatgagtcaaaccgtcacatgaagcctctctatctcaaaggccatgttgatgggaagccggtctctaggatgctagtggatggaggtgccgccgtgaacttgatgccgtactcattattcaagaagttgggacgtgaggatgatgagttgaagaagaccaacatgattctcaatggcttcaatggtgaaccaacggaggcaaagggtattttttcgacggagctcaccgtgggaaacaagacgctaccaaccgctttcttcatcgttgatgtgcaagagtggttacaaaagagggtgcaagaatatcggtctacaaagaatgatattggtgaaactattgaagattttgatgaagtggagaagcttggacaagggtttacatcggccgatccattggaggaagtagacataggtgatggaaccaaaccaaggccgacttttgtgaacaaaaatatgagagccgattataaggttaagataatcgagctacttaaagaatatgttgattgctttgcatgggagtaccatgagatgccgggtcttagccgtgagctggttgagcatcggcttccaattaaaccgggttttaggccttataagcaaccgcctcgtcgttttaatcctttgctatatgaccgagtcaaagaggagattgatcggttgttgaaggcagggtttattaggccatgtcgttatgcggagtgggtttctagcatagtcccggtggagaagaaggggagtggtaagattagagtttgcatagattttagagatttaaataaagccactcccaaagatgaatatcctatgcctatagccggcatgatgatcaatgatgcctcgggtcataaggtgattagctttttaggtagtaatgccggctacaatcaaatttttatggcggaaggggatatgtataagacggcttttaagtgcccgggatttgtgggtttgtttgagtggattgtcatgacttttggattgaagaacgctggtgcaacatatcaaagggcaatgaatttgatctttcatgatttgctaggtattatcttagagatctatattgatgatactgttgtcaaatcggatggtatggaaggacacatagccgatttgaggttagcttttgagaggatgcgcaggtatggtttgaagatgaacccacttaaatgtgcttttggtgtgtcggcggggaagttcttaggattcatggcgcatgagagaggagttgagatcgatcctaagaagatagaaaaaattcgtgatttcaaagcgccgacatgcaagaaggaagttcaaaagttgctaggtaagatgccgattttacttgggggaaaacaacaagaggcgtttgaggagttgaagaggtatttgtctactccacccgttgtgcgagcgcctaaagctagaaaaccttttcggctatatattgcctccgaagacaaagtcattggtgccgttttgacgcaagaaaaagatggcaaggaatatatcattacatatttgagccgctgtcttttggatgccgagacgatgccaattctaagtgggagaattggcaagtgggcatatgctttgatagaatatgatttggcttatgaaccattgaaatctatgaaaggccaaattgagatagaagaggattggagaattcctttcattcgatatttgaaagatcccacacttaaggttgatcggaaaattcggcagcaagcattcaaatacacattgcttaatggagatttgtatcgccgaaatatagatggtgtcttgttgaagtgcttacatgaagatcaatctaaagtggctatgggagaggggcataggttcgtgctagttgctacggattacttcaccaaatgggccgaagccgtgccgttaaagaatatgactcatacggaggctaatggacaagccgagtcgagtaataaaacgttgttgaagttagtgaaaaagaagattgaggaatacccaaagaggtggcatgaggtaaatcttggttctcttcgttatatcaagcaagaagatttgtcaagtgaagattacaagacgttgatgggagacaaccttgatgaagtcatcgacaagcgctcgaaggcattagaagaaatagagaaagagaagaagaggatggccaaggcgtacaacaaaagggtgaaagcaaagttgtttcaagttggagatttggtttggaagacaattttgcctttgggtactcgatccaaggagttcgttgccaacagcccccaggggtcagcagaccaacctcctgctcggccgcctaggcctcgccaggggctccatcgccgccaggcacatcacggagccttcaccgacggcgagctcgacctcgtgatcggcgacggcggcgacgggcggcacgggatggaggtgccggtgttcgacggcgaggggcggcggtacggtctcacgtgcggctactccgactacaccatgtgctaccgtctcttcggcgccgccggggagtttggccgattcagggcgaacaacagagaggtgcgcgacgtcgccgtcggcaaggacaagctgatgaaggttttcacctttcgctcgccggcgctgcggccggtagaagtagacctcgacgacggccacccggacggcgctctcggcatgatcgttctgttctacgacctcgacgccaaggaggccgtcaagaacgagttgctggacaccgacactctgaccgtgaactag

SEQ ID NO: 25897 - DNA, 2445 bp, Oryza sativa
  Clone ID: PAT_MRT4530_30739C.1
tctataagcctgatcatctaggggaagattaaagtaatcttcaagttgtaaattcaaaaagtgattcacagattcccatcttaaagtagtttgggagaaaagatcacgatactttagtttcttaatctcaccattccagagatcatcccaaaacaagactgaagtgccagattgtattgtacattgggaaatagctctataaatatcggccaactgaattatgtacctccaccaaaaagaccctttattgaaaaccatatgaggtacttttgttctgtagcaagaagcccaaataagtctaacccaaggaaggtcttgtgctgtgtaaaatttatgcaaatgcttcaaaagcaaagccacattctaaatatacagatttaatacacctagaccacccttgtccttaggtctacagacttcatcctatgctgccaaagattttcttttaactaaaacattagaacctttccaaagatttcttcttgcagtgtcaatggcctctataatagtctttggcaatttaagggagcacatgcaataggttggaatggcagataaaacagagtttatcaaagtaacatgcctccataaggaagagaagaagcaatggcagtcaacctcctttccaccctatcaaccactgctgccatatcaaccactcttggccttgtggaaccctttggaaagccaagagaagtgaaaggcacagagccagattttccaatttctcgtcaaggacattcaaaggataaatattggacttatgatagttaattttcaaaccagtgtcttgattgaaagtgtgcaagagggccttaagacaaagcaattctctttgtgaagcctttaagaagatgagagtgtaatcggcatgctgaacaccaggaaaatcacctcctccttgaccatttataggcttagataacaaaccaagactcatggctctacttaaaacatcctgaagaagttcagcaccaatcacaaaaagcaagggagagagaggatcaccctgcctgacccctcttttgcacctaaggaatttcccaggaatcccatttagtaagatagaagaacttgctgattcaaaaaccatcttaacccaattcaaccattttgtagggaacccatatgtttcattattttcaaaatggtcgaatgttcgattgtatcgaaggccttttaaaagtccaatttaagaatcaggatttccctcttggattgctgacactgatgaatatactcaaaagacccggctaaatagtcttgtatagtcctctctttaataaaaccatattgattttcatgtacaatcttctttataactccttgaagcctatcagccattagcttagtcaaaaattttagagtgatactcatacgagaaataggcctaaaatcattaacacattctagattaaccttcttaggcacaagaataatataagaagaattaatgcattgcaggtcaaccaactcagcatgaaagtgagcatccagtctgtaataatcttgggctataattggccaacaatttttaataaaacaaccattaaagccatctgggcctggagctttgtcaatcggaagacttttaacaaggtcatccatttcaagagtgaaaaaatgatctaccatgctatcaaggttatcatttcttggaataagatcatattgatcaaaactcatagccgataagtagaaacacccattctagattgaaaagtgtcagaaaagagagaggctttatcatgatgtgctgagacaacggatccattatcattaatttgagctatcaagttatttttaaacctctctgtagccatggcatgaaaaaacttagtttctattcaccaagttggatccatctatttgtgcatcttttcttccaatactcttccaaactgaaaaaagtttcaaagctgttttttcacaatttctctaaaattccattccatcagagataaagctctaacttcttcaattagatcaagaaaatctaggactttattgcaagacttgattaattgcaataatttagaaaaaccattactccaaatcagcagaccctttgttaaccgtttaagcttaaaagtgatacgcttagccgaataaaaaaactagggtcaacactctatacttgtgccacatgatcaaagaaaccctctatctggacccaataattctcaaagcgaaaaacattcgattttggaatagaggattcaattttgatcacaaaaggaacatgatcagaaatagctctaggcatagtataaaccacaatgttagggtactttagggtccagtcattagaggtaaagacccaatcaagctgttctaagaggtgattactttgcatattactccaagtaaaacttctccctttaaaaggttctcaatcagccgtaaagaactgataatattgttgaaaatgaaaatgttattcat

SEQ ID NO: 25898 - DNA, 2843 bp, Oryza sativa
  Clone ID: PAT_MRT4530_3073C.1
acggacggccgagatctaaccgatccaagatggacggccgcatataactacgcggcactattgaggcgattgatgctggtcatggactcgaggcgtctcagctttccggtcgatcggccgcgagtccactccgccggcttgtcctcgccaccgccattgctgatagcaacaacgacttcaccgccggcctgcctccgtcgccgccgactggtgtcatcgcctatacggttggtcggtcacaccaccgttcatgggcgtccatgtcttcaccgaccggctggccttcgccgccgccgactggtgtttccgcctgcacggctggcctattatgccgccgctgttgggcgtctacgacttcaccaccggcctgcctccgtcgccgccgagtggtgcccccgcctatacggtcggttggtcacaccaccgttgatgggcatcgtcatctacaccgccggcctgcctccgtcgccgccgactggtgtccccgcctatacggtcggttggtcacaccaccgttgatgggcatcgtcatctacaccgccggcctgcctccgtcgccgccgagtggtgcctccgcctacacggctggcctattatgccgccgctgttgggcgtctacgacttcaccgccggcctgcctccgtcgccgccgagtggtgcctccgcctacacggctggcctattatgccgccgctgttgggcgtctacgacttcaccgccggcctgcctccgtcgccgccgagtggtgcctccgcctacacggctggcctattatgccgccgttgttggatgtctacatcctcaccgccggcttgcctccgtcgccgccgagtggtgcctccgcctacacggctggcctattatgccgccgctgttgggcgtctacgacttcaccgccggcctgcctccgtcgccgccgagtggagcctccgcctacacggctggtctattatgccgccgctgttgggcgtctacgacttcaccgccggcctgcctccgtcgccgccgactggtgtcttcattgttattgatggacgactttgttcccacattggccacttctgccatcaccaaggggaatattacaaagctaagatccagatccagatatgcataaaagggattcatggctttaggcttatctcttacgctccaggaatggatcagtcagaacatcaccgactggcttgccttcgccgctgccgactggtgtttccgcctgcacggctggcctttatgccgccattgttgggcgtctacgtcttcaccgaccggcttgccttcgacgccgccgactggtgtttccgcctgcacggctggcctttatgccgccgttgttgggcgtctacgtcttcaccgaccggccgcctcgtccgccgccgactggtgcttccgcctgcacggctagcctattatgccgccgttgttgggcgtctacgtcttcaccgaccggcttgccttcgccgccgccgactggtgcttccgcctgcacggctggcctttatgccgccgttgttgggcgtctacgtcttcaccgaccggcttgccttcgccgctgccgactggtgcttccgcctgcacggctggcctttatgccgccgttgttgggcgtctacgtcttcaccgaccggcttgccttcgccgctgccgactggtgcttccgcctgcacggctggcctttatgccgccgttgttgggcgtctacgtcttcaccgaccggccgccgcatccgccgctgactggtgtcaccgcctgcacggctggcctgttataacgccaactgatgctatcttcttcacggctggctacatcgctgtcactactaataggcatcagtatcttcaacacaagctgcctacgtttgccatggctgccgactggtgtttccgcctgcacgctggcctattatgccaccgttgatgggcgtctacgtcttcaccgaccggcttgccttcgccgccgccgactggtgtctccgtctgcacggctggcctattatgccgtcgttgttgggcgtctacgactccaccaccggcctgcctccatcgtcgccgactggtgtttccgcctgcacgctggcctattatgccatcgttgatgggcgtctacgtcttcaccgaccggcttgccttcgccgccgccgactggtgtctccgtctgcacggctggcctattatgctgtcgttgttgggcgtctacgactccaccaccggcctgcctccatcgccgccgactggtgtttccgtctgcacggctggcctattatgccgccgttgttgggcgtctacgtcttcatcggccggccgcctcgtccgtcaccgactgatgtttccgcctgcacggctggcctattatgccgccgttgttgggcatctacatcttaatcgccggtcgtctcgtctgttgctgactagtgcccttacctctacgtctggtttatacagctaccactactgatggacatcatcatcttccgtcgccgactgattatgccgccgccgactggtgcttttatcttcacaactgcgcgtcttcactaccagttcacttcatcacggcaatgcaactttgtcatcatggtagagcgacttcatctttattatcttcggcactggcaaactctattgctgctacttcgcaagttttgctacttcaccaaccacgacgtctttgtgagcctcgacatctcggcatgcgatgccatgttattttactacaacaagaggctctccaatattcaggatttctacttggacatcttcaacacatatcttcaatcaagcaatgactacttgacgacaagaagctataattctcgactctatgttcagttgtttcccaac

SEQ ID NO: 25899 - DNA, 4398 bp, Oryza sativa
  Clone ID: PAT_MRT4530_30740C.1
atgacgaagccgctatctaagacggaggtggagccatctaatgtgataccggtcgcattggaagacttcgaaggagaagatcgtaaagctatggaggagtacatcaacgagctcacacgggaggcgttgatgagagcaagtactaggactcgtcaaggcgtgaccatcaagcccggaccacgtcccaagctcgctcccgacgtgacattaaaagataaagcctctaccactgctaaccaacctcctatagatcaaacgggtggtaaaaccgacgggacggcgttcacgaccggtccgaccgggcctgacggccggaatcgtgctagaacttacaaaaagccatatcctgattattatgataatgtgccgtttcctcgaaattatagagttcccgaatttgccaagtttagtagtgaggatgttgctcctcttagagaaagactagatggccaacaatttcttgatgttagtcaactcatgcaaaaggctctggctcaagaaagccgggttaaggataatagaaaacttgctagaccatttgacaaaaagcctaatgttaatgtggtcgattaccctgaggctagtgatagtgaggaagagggtgatcatgatatttatgttgccgaatggtcatggactaacaaaaataagccttttgtttgctctaacctaatgccgactcctcgcaaagatcggcaaagtaaggttaagtatagttttgacgtggccaagtgtgagaagatttttgattatcttttgcaagagaaacaaattagattacctaaaggccatgtcataccttctcaagaagagttgaaatgtcgagcatattgtaagtggcatgattctcattctcactctactaatgattgcaatgtgtttcgacgacaggttcaatcggccatagatgaaggacgattgaagttcaccgatggctccaagatgaagcttgatcatgatcctttttcggtgaatacaattaatttcaatgataagaaggtgttgattcagccggagcaagccaaatctgctaagggaaaggaagtgatcattggtgaaccaaggtccaagatgatagtgccaaagaagccggaggttggcgtttggaaggagaataggagtggagcttcaacttctaaggcccctaggaagaccaaggtgacttttgatatgcttttggagaaatatgagaagcaaggtgaaaagagggaaggaaagcgcgtcaaggtggaggagaggacttcggaagtgattactattaaagtggggtctcatgatgtgccaatacctactggagatggaattggaatgtccccgaacagaaaatccgaagccggtaccagttcctcgcagtcggccggtctgactaggccttctggccggtctgaccgcggtcgtgcggccggtctgaccgggccattaggccggtctgaccgccgactcgatagcggtccgaccggcacctcaggctggtctaaccgtgcgcccagtgtcggtctgaccggcgcatctggccggtctgaccggtggtctacgaccggtctgaccgggctccagcgccggtttgacaggaggattgcaaagggcgatgtggagacttcatcatcttcaaacaaagttaatagagggcattatttacctcctggaatagagctgaatcctaggtggatgcctagggatttgacggctactcaaaagagaaggttgcaacgtctttggacccaagagttaagagagaaagaggccgaagagcaaagagataaaaggttcaatgagttgcgacccccactgttttgtgctatggatgaagccgaggttgctcaattctcattaggtcctaaagacgcggtttttgagaagcccgatgagtcaaaccgtcacatgaagcctctctatctcaaaggccatgttgatgggaagccggtctctaggatgctagtagatggaggtgccgccgtgaacttgatgccgtattcgttattcaagaagttgaggtgtgaggatgatgagttgaagaagaccaacatgattctcaatggctttaatggtgaaccaacggaggtgaagggtatcttttcggcggaactcaccgtgggaaacaagacgctaccaaccgctttcttcatcgtcgatgtgcaagaatatcggtctacaaagaacgatattggtgaaaccgttgaagattttgatgaagtggagaagcttggacaagggtttacatcggccgatccattggaggaagtggacataagtgatggaactaaaccaaggccgacttttgtaaacaaaaacatgagagccgattataaggttaagataatcgagttacttaaagagtatgttgattgctttgcatgggaataccatgagatgccgggtcttagccgtgagctcgtcgagcatcggcttccaattaaaccgggttttaggccttataagcaaccacctcgttgttttaatcctgtgctatatgaccgagtcaaagaggagattgatcggttgttgaaggcggggtttattaggccatgtcgttatgcggagtgggtttctagcatagtcccggtggagaagaaggggagtggtaagattagagtttgcatagattttagagatttaaataaagccactcccaaagatgagtatcctatgcctatagccgacatcatgattaatgatgcctcgggtcataaggtgattagctttctagatggtaatgccggctacaatcaaatctttatggcggaagaggatatgtacaagacggcttttaggtgcccggggtttgttggtttatttgagtgggttgtcatgacttttgggttgaagaatgccggtgcaacatatcaaaggacaatgaatttgatcttccatgatttgctaggtattatcttagagatctatattaatgatattgttgtcaaatcggatggtatgaaaggacacatagccgatttgagattaggttttgagaggatgcgccagtatggtttgaagatgaacccgcttaaatgtgcttttggtgtgtcagcggggaagttcttaggattcatggtgcatgagagaggagttgagattgatcctaagaagatagaaaaaattcgtgatttcaaagcgccgacatgcaagaaagaggttcaaaagttgctaggtaaggtgaattatttgaggaggtttatttctaacctagcgggtaaaatcgatgcttttgttcctatacttcgcttgaaaaaggaagccgattttacatggggggcaaaacaacaagaggcgtttgaagagttgaagagatatttgtctactccacccgttgtgcgagcgcctaaagccggaaagccttttcggttatatattgcctccgaggacaaagtcattggtgccgttttgacgcaagaggaagatggcaaggaatatatcattacatatttgagccgccgtcttttggatgccgaaacgaggcatattgttaggcgtgataattctagagcaaatgacttggcacaacaagcatctggctataatgtgaagaggagattatttctgatattagaagagccggtgcttgattttaaatctttgtgcgaaattggcaaaattggtgaccaggggcggtctgaccagcgttgcacggctggtctgaccggtgaccaggggcggtctgaccggccgcatgccgccggtctcaccggcgaccccgagcggtctgaccggccctgcatggtcggggataggttcatgctagttgctacggattacttcaccaagtgggccgaagccgtgcctttgaagaatatgactcatacggaggctaatggacaagccaagtcgagtaataatacattgttgaagttggtgaagaagaagattgaggaatacccaaagaggtggcatgaggtgctttttgaagcattgtgggcgcatagaatatctaaacatggtgccactaaagttactccttttgagttggtttatggtcaagaagccgttttaccggtggaggtaaatcttggctctcttcgttatgtcaagcgagatgatttgtcaagtgaagattacaagatgttgatgggagacaaccttgataaagtcatcgacaagcgcttgaaggcattggaagagatagagaaagagaagaagagggtggccaaggcgtacaacaagagggtgaaagcaaaattgtttcaagttggagacttggtttggaagataattttgcctttgggtactcgatccaaggagttcggtaagtggtctcctagttgggagggtccttatcgagtgtgcggcattgttcgagggaacgtgtactttttggagatacttcaaggggagcgttttcagcgaacaatcaacgggaaatacttgaagaaatacttcccgagtgtttggcaagacgcttag

SEQ ID NO: 25900 - DNA, 3286 bp, Oryza sativa
  Clone ID: PAT_MRT4530_30741C.1
atgatggtgccaaagaatccagtctttggtgtgtggaaagagaataggagcgaagtctcaacttctaaagctcctaagaagactaaggtgaccttcgatatgcttttggagaagtatgagaagcaaggtggtgagagagctcgcaataaagggaaaagaccaagattacctcctagggagcgatttggtcactcatcaagacggtcgcaatcacctccatatcatcattcacttgacatgtcatgggggccttacccaatgccgccgccgggttatccttatccttactacatgccatgggggacaacaccgccaatgttcaatcatatgcctccaatgcaattcaaccaagggtggggaggaccaaggaggccaattcatgagcgtttgtcttcaccaaacaatggccggttttatggtaaaaatcgggttaaggaagaaaagagggaaggaaagcgtgttaaggccggtctgaccgccgacctaatatcggtcggaccggcgcatctggccggtctgaccggtgcctttggccgatctgaccggtggtctaagtccagtctgaccgggatccagcgccggtttgacaggaggtttgcaagcagtagtgtgagggcttcatcgtcttcaaatagactcaacagggggcactatttacctcctagaacagagccgaaacctaggtggatgcctaaggatttgatggctactcaaaggagaagattgcaacgtcttcgggcccaagagataagagagaaaaaggccgaagaacaaagagataggagtcctaaagatgcggtttttgagaagcccgataaatcaaaccgtcacatgaagcctctctatctcaaaggtcatgttgatgggaagcaggtctctaggatgctagtggatggaggtgccgccgtgaatttgatgccgtactcgttgttcaaaaagttggggcgtgaagatgatgagttgaagaagactaacatgattctcaatggcttcaatggtgaaccaacggaggcgaagggtatcttttcggcggagtttaccgtgggaaacaagacgctaccaaccgctttcttcattgttgatgtgaaagaagctaatttagagttgttgcaaaagagggtgcaagaatatcggtctacaaagaacgatattggtgaaactattgaagattttgatgaagtggagaagcttggtaaagggtttacatcggccaatccattggaggaagtagacataggtgatggaattaagccaaggccgacatttataaataaaaatttgagagccgattataaggttaaaataatcgagctacttaaggagtatgtggattgctttgcatgggagtatcatgagatcccgggtcttagccgtgagcttgttgagcatcggcttccaatcaaaccaggttttaggccttataaacaaccacctcgtcgttttaatcctttgctatatgaccgagtcaaagaggagattgatcggttgttgaaggatgggtttattaggccacgttgttatgcggaatgggtttctagcatagtcccggtggagaaaaaggggagttgtaagattagagtttgcaaagactttagagatttaaataaagctactcccaaagatgaatatcctatgcctatagccgacatgatgatcaatggtgtctcgggtcataaggtgattagctttttggatggtaatgccggctacaatcaaatctttatggcggaggaggatatgtacaagacggcttttaggtgcccaggatttgttggtttgcttgagtgggttgtcatgacttttggatcgaagaacgtcggtgcaacatatcaaagggcaatgaatttgatcttccatgatttgttaggtattatcttagaaatctatattgatgatattgttgtcaaatcgaatggtatggagggacatatagccgatttgaggttagcttttgaaaggatgcgccggtctggtttgaagatgaacccacttaaatgtgcttttgccgattttacttggggggcaaaacaacaagaggcatttaaagggttgaagaagtatttgtctacttcaaaaaatgtgcggacgcctaagaccgtaaagccttttcggttatgtattgcctccaaagacaaagtcattggtgccgttttgacgcaagaggaagatggcaaggaatatatcattacatatttgagccgccgtcttttggatgccgaaacaagatatattgctaggcatgataattctagagcaaatgatttgtcacaacaagcatcttgctataatgtgaagaagggattatttctggtattagaagagtcggtgcttgattttaaacctgtcacgaccggaaataacccaacgggcgttcctgacgtgcgtgcattaatccttgtcccaggaggcaagaaccttggtggaggcggcactgaaccgcaagaacgtggaggcgctcccggaggaggagacggtggagggcgggcccggaggacgcgtgggtgcccgaccatgagaccggcgtcttcgtccccgccgacgagggcgccatctccggcaccgaaaaccacgaccactcggataacctgttctttgatgaatcttgttgtgtttttatcggatggaatttgctgggattgcttcgaattcgttgacgacgccgtcgatctcgatgaggctgcagccggggaccttgtcgatctcgttcctcctcatctgcctcctcaccttcaccgcctcgccgtgccggccattcgacgcgtaagtgttcgacatcagcacgtagtcgccggcgtccgcatcggcgtcggtggtgcgccgccgcatcacccgctcggcgcgctcaactttgccatgcgcgcggcatgcggcgagcagcgagccccagatgagcgcgtcagggtgtattggcattgccgcgacgagctcctctgcctcgtctagtctcccggcgcggctgagcatgtcgacgacgcagccgtaatgctcgatgcgtggttctggcttggcgttgagttgcggcggccgcagcaagcctcgtatcggccaacgttcaacagcctcctcgctcacggccacctcctgctcacgctccgcgctgccgtcgccggcctcgcgcacagccgcctccagctcgcgctccacgcacagccgcgccgtcggccgctcctggcgtgcggtcgctcctatccgctccctgccgtggacaaccttcgccggcggcttctcccattccttcttttgtttccttgatgggtattctggttatcaccaaatccccatccat

SEQ ID NO: 25901 - DNA, 1197 bp, Oryza sativa
  Clone ID: PAT_MRT4530_30742C.1
ccggccggggccctggccctcttcttggtctccttcctctccctccgctcgctccgccccaccgccgccccctccctctccgatgcccaatcattctcccctaatcccgccgccgccgcgtcggaggtgtaccactcgccggcggtgttctcggcggggtacgcggagatggagaggagcttcagggtgttcgtctaccccgacggcgaccccggcacgttctaccagacgccgcggaagctgaccggcaagtacgccagcgagggctacttcttccagaacattcgcgagagccgcttccgcaccgacgacctcgagaaggcgtacctcttcttcgtccccatttcgccccacaagatgcgcggcaaggtccccagttctttgctactcgttacatatgcgtggttaatcttgcatattcgatcatatgatcgatctattttgtttcttgatttgtactggtggtgtccgctttgttcatcatttcgtggacactggggggtgggggctgaccattttttcgttacatgccatgatgttggtgttagagcattcgaagggcttccctttatcattaagaactctatcagagtggtatgttcaccgagctataatgctggctatatcccgcacaaggatgtcgctcttccacaaatattgcagccatttgctcttcctgcaggaggaaatgacattgagaacaggacaatacttggtttttgggctggccatcgcaattccaaaataagagttattttagcacgaatctgggagaatgatactgagcttgctatcagcaacaaccggattaacagagctatcggaaatttagtttaccagaagcatttctttcggaccaagttttgcgtatgccctggtggttctcaagttaatagtgctcgtatctctgattccatacactatggttgtatgccagttattttgtcagactattatgacctacgtttcagtggtatccttaactggagaaaattcgctgttgtcctgaaggagagcgatgtttatgagctaaagagtatcttgaagtctttatcacagaaagaatttgtttcattacacaagtcgctagttcaggttcagaaacacttcgagtggcattcacctcctgttccgtacgacgcatttcacatgattatgtatgaattgtggctgcggcatcatgtgatcaagtactaa

SEQ ID NO: 25902 - DNA, 6015 bp, Oryza sativa
  Clone ID: PAT_MRT4530_30743C.1
atggaaacggcgaccggagcggaggaaggcggcggcgcggctcgggtggacggggtcgacggtgctccggcggtcggcgaccgaaacggagaggtggacgaggtcggtgaggatgcggcgaagccgaaggaggcggcgccgaggtgggaggtggtccggggcgacgacggcggtggaccggagctcggcggcgacggcggagagagagagcgacggcgcgagctcgattccggcgggggaagagggcgtcaacttatgcaaagggctctggctcaggaatgccgggttaaggataataaaaaatttgctagaccattcaacaaaaagcctaatgttaatgtagttgattactctgatgctagtgatagtgaagaggagggtgatcatgatatttatgttgccgaatggtcatggaccaacaaaaataaaccttttgtttgttctaatttaatgccgactcctcgtaaagatcggcaaagtgaagttaagtatagttttgatgtggccaagtgtgataagatttttgattatcttttacaagagaaacaaattagattacctaaaggccatgtcataccatcacaagaagagttaaaacgtcgggcatattgtaagtggcatgattctcattctcactctactaatgattgcaatgtgtttcaacgacaggttcaatcggccatagatgaaggacgattgaaattcaccgatggctccaagatgaagcttgatcatgatccttttccagtaaatacaattaatttcaataataagaaggtgttgattcggccggagcaagccgaatctactaagggaaaggaagtggtcattggtgagccaaggcctaagatgatggtgccaaagaagccggaggttggtgtttggaaggagaataagggtgaagcttcgacttctaaggctcctaggaaaaccaaagtgacctttgatatgcttttggagaagtatgagaagcaaggtggtgagaggaatcacgacaaatggaaaagaccaagatcacctcctaaggggcgatttggtcattcactaagacggttgcgttcacctccatactttcatccacaagacatgtcattgggttcttatccaatgccgccgccgggttattcttatccttacttcatgtcatggggggcaacgccgccaatgtacaaccatatgcctccaatgcaattcaaccaagggtggggacgaccacggaggccaatccatgagcgcttatcttcaccaaacaaaagccaattttatggtaaaaatcgggttaatgaagaaaagagggaaggaaagcgcaccaaggtggaggaaaggacttcggagcgccggtttgatgagagggctacaaagggcgatgtgagggtttcatcgtcttcgagcaaggttaatagaggacattatttacctcctggaacagagccaaatcctaggtggatgcctaaagatttaacggctacacaaaagagaaggttgcaacgtcttcggacccaagaactaagagagaaaaaggcgaaagaacaaagggataaaaagttcaatgagttgcgaccaccaccggcgaggggtatcgtttcagcggagctcaccgtgggaaacaagacgctaccaaccgctttcttcatcgtcgatgtgcaagaatatcggtctacaaagaacgatattggagaaactgttagagattttgatgaggtagagaagcttggacaagggtttacatcggccgatccattagaggaagtagacataggtgatggaattaaaccaaggccgacttttgtaaacaaaaacatgaaagccgattataaggttaaggtaatcgagttacttaaagagtatgttgattgctttgcatgggaataccatgagatgccgggtcttagccgtgagcttgttgagcctcggcttccaattaaaccgggttttaggccttataagcaaccacctcgtcgttttaatcctttattatatgaccgagtcaaagaagagattgatcggttattgaaggcggggtttattaggccatgtcgttatgcggagtgggtttctagcatagtcccggtggagaagaaggggagtggtaagattagagtttgcatagattttagagatttaaataaagctactcctaaagatgagtatcctatgcctatagccgacatgatgattaatgatgcctcgggtcataaggtgattagctttttagatggtaatgccggttacaatcaaatctttgtggcggaggaggatatgtacaagacggcttttaggtgcccgggatttgttggtttgtttgagtgggttgtcatgacttttaggttgaagaatgccggtgcaatatatcaaagggcaatgaatttgatcttccatgatttgctaggtattatcttagagatctatattgatgatattattgtcaaatcggatggtatggaaggccatatagccgatttgagattagcttttgagaggatgcgccggtatggtttgaagatgaacccacttaaatgtgcttttggtgtgtcggcggggaggttcttaggattcatggtgcatgagagaggagttgagattgatcctaagaagatagaaaaaattcatgatttcaaagcgccgacatgcaagaaagaggtccaaaagttgctaggtaaggtgaattatttgaggaggtttatttctaacctagcgggtaaaatcgatgcttttttttctatacttcgtttgaaaaaagaagccgatttcacttggggggcaaaacaacaagaggcgtttgaagagttgaagaagtatttatctactccacctgttgtgcgagcgcctaaagccggaaagccttttcggttatatattgcctccgaggacaaagtcattggtcccgttttgacgcaagaggaagatggcaaggaatatatcattacatatttgagccgccgtcttttggatgccgaaacaaggccaattctaaatgggagaattggcaagtgggcatatgctttgatagaatatgatttgacttatgaatcattaaaaattataaagggccaaattgtatgtgattttatagtggaccatcatatagatgttgcttatgagggagagagcaaatggcttggcgcaacaagcagaggttataatgtaaaaagggggttatttctgatattagaagagccggtgcttgattttaaatttttgtgcgaaattggcaaagttggggaccagaggcggtctgaccggcgttgcacggccggtctgaccggtgaccaggggcggtctgaccggccgcatgccgccggtctgaccggcgtccctgagaggtctgatcggccctgtgtggccggtctgaccggttctaggcagggtgctggagggcacgtttcaagtaattttgaggccgaattaattgtgaattcggacgtttgtgcccaagatacagaagaggattggagaattcctttgattcaatatttgaaagatcccacacataaggttgatcgaaagattcgacggcaagcattcaaatatacattgcttgatggagatttatatcgccgaaacatagatggtgtcttgttgaagtgcttagatgaagatcaatctaaagtggctaagggagaagtacatgaaggaatttgtggaactcgtcaatcggaccacaagatgaattggttgcttagaagagcggggttttattggccgaggatgattgatgattgcttcaaatattatagaggatgcgaggcttgtcaacggttcggcaatgttcaattggcgcccgccgccgtattgaaccatataatcaaaccatggccgttccgaggatgggctttggatttcattggtcaaatttatccttcgtcatcaaaagggcataggttcgtgctagtcgctacggattacttcaccaagtgggccgaagccgtgtctttgaagaatatgactcatacggaggctaatggacaagccgagtcgagtaataagacattgttaaagctagtaaaaaagaagattgaggaacacctgaagaggtggcatgaggtgaatcttggttctcttcgttatatcaagcaagatgatttgtcaagtgaagattacaagacattgatgggagacaaccttgatgaagttatcgacaagcgcttgaaggcgttggaagagatagagaaagagaagaagagggtggccaaggcgtacaacaagagggtgaaagcaaaattgtttcaagttggagacttggtttggaagacaattttgcctttgggtactcgatccaaggagttcggtattatcttagagatctatattgatgatattgttgtcaaatcggatggtatggaaggacatatggtcgatttgagattagcttttgagaggatgcgccggtatggtttgaagatgaacccacttaaatgtgcttttggtgtgtcggcggggaagttcttaggattcatggtgcatgagagaggagctgagattgatcctaagatgatagaaaaaattcgtgatttcaaagcgccgacatgtaaaatcgatgcttttgttcctatacttcgcttgaagaaagaagccgattttacttgggaagcaaaacaacaagaggcatttgaagagttgaagaggtatttatctactccacccgttgtgcgagcacctaaagccggaaagccttttcggttatatattgcctccgaggacaaagtcattggtgccgttttgacacaagaggaagatggcaaggaatatatcattacatatttgagccgccgtcttttggatgccgaaacgagacatattgctaggcgtgataattctagagcgaatgacttggcacaacaagcatttggttataatgtgaaaaaggggttatttatgatattagaagagtcgatacttgattttaaatctttatgcgaaattggcagaattggggaccaggggcggtctgaccggcattgcacggccggtctgactggtgacctggggcggtctgaccggccgcatgccgccggtctgaccggcgttcccgagcggtctgaccgtccctgcgtggccggtctgaccggtgttcagcagagcgctggggggcacgcttcaatcgatttggagtccgaattatttgacaattcggacgtttgtgcccaggatacagaagaggattggagaattcctttgattcaatatctaaaagatcgcacgcttaaggttgatcggaaaattcggcggcaagcacttaaatatacattgcttgatggagatttgtatcgccgaaatatagatggtgtcttgttaaagtgcttagatgaagatcaatctaaggtggctatgggagaggggcataggttcgtgctagttgctacggattacttcaccaagtgggccgaagccgtgcctttgaagaatatgactcatacggaggctaatggacaagccgagtcgactaataaaacattgttaaagctagtaaaaaagaagattgaggaacacccgaagaggtggcatgacgtgctttctgaagcattgtgggcgcatagaatatctaaacatggtgccactaaagtcactccttttgagttggtttatggtcgagaagccgttttaccagtggaggtaaatcttggttctcttcattatatcaagcaagatgatttgtcaagtgaatattacaagatgttgatgggagacaaccttgatgaagtcatcgacaagcgcttgaaggcattggaagagatagaaaaagagaagaagagggtggccaaggcgtacaagaagagggtgaaagcaaaattgtttcaagttggagacttggtttggaagacaattttgcctttgggtactcgatccaaggagttcggtaagcggtctcctagttgggaaggtccttatcgagtgtgcggcattgttcgagggaacgcatactttttggagacacttcaaggggagcgttttcagcgggcaatcaacgggaaatacttgaagaaatacttcccgagtgtttggcaagatgcttag

SEQ ID NO: 25903 - DNA, 405 bp, Oryza sativa
  Clone ID: PAT_MRT4530_30744C.1
atggcacgacgggcggcgaccggcggggagggctgcacgatcgcccctgaagtcgtgcgccgccgctccgcggcgcgacagcgccgcgaccgccgctccaccgtgggacgccgccccaaagccgcgcgccgtagccgccgccgcccctccgccgcacgacggcagcccgaagacgcgacgccaccgctccgccgcatgacggcgccaccttcctgggatgccatcgtcgccccgaagccgcgcggcgccaccgctctgccgcccgacggcgctgccttcttgggatgccgccgctgccccgaagccgcgcggctgccgctctaccgctcccgcaaagccgccgtcactccgttgtgcgatgccgccgccgccgccttccctctgcgcgccgttcgcaaaagatga

SEQ ID NO: 25904 - DNA, 933 bp, Oryza sativa
  Clone ID: PAT_MRT4530_30745C.1
atggatgaccaaggagagaagctgtatagagagatttggacggggaatcaggggaagagaggaaagaagttgccaacacgattttttgtgactccactggggaaatctgctcaacgtcatctcagctttgacgtcgccataacaaagcctccatcaactaaggcggaggtggaaccatccaatgtcataccaatcacattgaaggagcttgatgagggagcactcaaggccatggaggaacatctcaaggcgtatacccaggaaatgttgatgaagacgtgcactaggacccgtcaaggtgtggttctcaagccgggatggttgcctaaacctaatttcgatgtgcataggcttgagaatatagaggaattaattagtggtatcattagggataaattcgggattgaagctgggaatcctgctaaggtttaccaaaagcctcctcctgattactatgacaatatcctatatcctcatgggtatagagttcccaaatttaccaaatttagtggtgaggatagtaggaccacgtgggagcatgtagagcaaagattttatgattatttctataagggtgaaactgaacttaggctaagtgatttgacatcggttaggcaaaaatacaatgaatctgtcattgattatggtaagggatttagggatgttagaaaccgatgttatagcttgaatataactgatagagatttggctgatcttgcttttaatggtttaattgctcctattaaggaaagattagttggccaacaatttcttgatgttagtcaactcatggaaaaagctccggctcaggaaagccgaattaaagatagtaagaaatttgttagatcatatgttaatttgattgattaccctgaagctagtgattctaataatgagggtgatcatgatatgtatgttgccgagtggtcatga

SEQ ID NO: 25905 - DNA, 245 bp, Oryza sativa
  unsure (1)..(245): unsure at all n locations
  Clone ID: PAT_MRT4530_30746C.1
ctatattccgattcnctcggatgtattccgatccnatcaatagaaccaggtaatatnatttatggaaggaatatgcaagggcatcgctgttgcattanaaaaagacctcgaggatgtagattggttaanccatggtttggcaaaagcctcataccaaagtttacagtgatcctttcaatcaaataaataatgaaatggagtttttttttaaaaaaaaaaaaaaaaaaaaaaaaaaaaaaaaaaaa

SEQ ID NO: 25906 - DNA, 1624 bp, Oryza sativa
  Clone ID: PAT_MRT4530_30747C.1
atgggaagcacagacctcggttgctcgggtgatgagtcgtgggatgttgggttcctcctggaaataaggagcttctccacagcagatcccggcgcccgccacggccgacgacgtcgtcggtgcggcggtgcctcagccctgtctgctcgtccccagggcaagatcacccgcctcaacgcgcttctccacgccgtcatcgagatcgaggtcaactccgacgcgctccagcagccggcgcgcgccgacaccgagcacgcctctggccacagctactgcgggccgctccacggcgtccccatcctcaaggacaacatcgtgaagcgcgaccggctgaacacgacggccgggtcgttcgcgctgctcggctccgtcgtctgccgtgacgccggcgtgacggccggcctccgcgccgccgctgccgccgccatcatcctcagcaaggcaaaccccgtcccgaacggttggagcgctagacgctgcaccagcagcaaccacctcaccgtgatggattcactggctgaatttgttcctgccaatcaacggcagctaatcatactccagttagctactcacaggaagatcatttttgcatctactagaagctgcagcatggacatgatatatttgcaagatatgattgcattaggaggtgatgaagcccattctttggttgtcaaggtgccgcacccgagggcgcgggcggctgactgccgggccccacgcggtagccgctcggcgcgcccgaagacggccacgtcggcgcggccggcgggagacggcgcgcccgcgcccctatggtcgccggcggcggccataggcacggcggagcggcggccgagagaggggagggaaagggggaaacgaggcggcggtccacggctcacccaaggtcgacggcgacgacggaaaaggcgaccggagcggaggaaggcggcggcgcggctcgggtggacggggacggcggcgctccggtggtcggcgagctcgacgagggggtggacgggacggcggcgatgcggcgaagccggaggaggcgacgccggggcgggagacggtcccggcgagcgagaagaggcggccggaggtcgtcggcgacggaggagagagagagcgacggcgcgagctcgattccggcgaggagaaggcgcggcaaagggtggaaatgggcgaaggaggtgcggggagggtttaaatggggttgggaggggcagagggcggccggggaaggaaggaaaccggccgggaggtccggccgccatcaatggcgccggcgagatttgcgggggcaaatccggccgtttgaatgcgagagagagagaggggaaaatggggggaaagagggaggggatcacggggagtaattccccccacttaaatgcacgcggggacggcgggatgcggcggattcggcggcggcggcggcgcttggcgcgggcggagcggcgggaggtcggggatgacgggtgggccccacccgccagcgagggtggcgggcgggcccgcccgtcagcggcgcgcgcggggaggggccgagtgggccgcgggggagaggagagagggggagggagatgggccgaattcggcccaagagaggaaagggggatttttagggtttttcttttta

SEQ ID NO: 25907 - DNA, 229 bp, Oryza sativa
  Clone ID: PAT_MRT4530_30748C.1
ctccgtccccacaatggccccaagctccaagggttctgggggtggcagtggcagtcacaactacagaaagagtttttgcgtgcgagccgaaaggcatattgccgcgcaaaaggccggccctcacacccgagaaggtgcgcatctcacaaacgttgtatcttcacgaacttgtcattaccagccattgtgtcttcacgagaagcttagttctgttggcattcttgactag

SEQ ID NO: 25908 - DNA, 242 bp, Oryza sativa
  Clone ID: PAT_MRT4530_30749C.1
gaatccacaacgggaaccgatatataaatcaacggaacttagcgcaaattttgcataaactgatcttactacatatgcaccctgccaagctaaagtttgcatagagccacgtttacaatactacaggtagtcaatgcgaaatcatatggaattatcgaaatctagaccgagtttaaaagatactaggggcatatgtataagaaataaatatccagccgacgcatttcacgccttcattgtac

SEQ ID NO: 25909 - DNA, 4287 bp, Oryza sativa
  Clone ID: PAT_MRT4530_3074C.1
atgtttcgacagttggcgcgccagcgtctacgacttcaccgccggcctgcctccgtcgccgccgactggtgtcctcgcctatacggttggttggtcacaccaccgttcatgggcgtccacgacttcaccgccggcctgcctccgtcgccgccgactggtgcctccgcctacacggctggcctattatgccgccgctgttgggcgtctacgacttcaccaccggcctgcctccgtcgccgccgactggtgtcccagcctatacggtcgtggtgtttccgcctgcacggctggcctattatgccgccgctgttgggcgtctacgacttcaccaccggcctgcctccgtcgccgccgactggtgtcctcgcctatacggtcggttggtcacaccaccgttgatgggcatcgtcatctacaccgccggcctgcctccgtcgccgccgactggtgtccccgcctatacggtcggttggtcacaccaccgttgatgggcatcgtcatcttcaccgccggcctgcctccgtcgccgccgattggtgcctctgcctacacggctggcctattatgccgccgctgttgggcgtctacgacttcaccgccggcctgcctccgtcgccgccgagtggtgcctccgcctacacggctggcctattatgccgccgctgttgggcgtctacgacttcaccgccggcttgcctccgtcgccgccgagtggtgcctccgcctacacggctggcctattatgccgccgctgttgggcgtctacgacttcaccaccggcctgcctccgtcgccgccgactggtgtccccgcctatacggtcggttggtcacaccaccgttgatgggcatcgtcatcttcaccgccggcctgcctccgtcgccgccgattggtgcctccgcctacacggctggcctattatgccgccgctgttgggcgtctacgacttcaccgccggcctgcctccgtcgccgccgagtggtgcctccgcctacacggctggtctattatgccgccgctgttgggcgtctacgacttcaccaccggcctgcctccgtcgccgccgattggtgcctccgcttacacggctggcctattatgccgccgctgttgggcgtctacgacttcaccgccggcctgcctccattgccgccgactggtgcttccgcctgcacggctggcctttaatgccgccgttgttgggcgtctacgtcttcaccgaccggcttgtcttcgccgccgccgactggtgtttccgcctgcacggctggcctttaatgctgccgttgttgggcgtctacgtcttcaccgaccggccgcctcgtccgccgccgactggtgcttccgcctgcacggctggcctttatgccgccgttgttgggcgtctacgtcttcaccgaccggccgcctcgaccgccgccgactggtgtttccgcctgcacggctggcctattatgctgccgttgttgggcgtctacgtcttcaccgaccggccgccgcatccgccgctgactggtgtcaccgcctgcacggctggcctattatgccgtcgttgttgggcgtctacgactccaccaccggcctgcctccaccgccgccgactggtgtttccgcctgcacggctggcctttatgccgccgttgttgggcgtctacgtcttcaccgaccggcttgccttcgccgctgccgactggtgtttccgcctgcacggctggcctttatgccgccgttgttgggcgtctacgtcttcaccgaccggcttgccttcatcgctgccgactggtgtttccgcctgcacggctggcctttatgccgccgttgttgggcgtctacgtcttcaccgaccggcttgccttcgccgctgccgactggtgtttccgcctgcacggctggcctttatgccgccgttgttgggcgtctacgtcttcaccgaccggcttgccttccccgccgccaatgggggtttcccgcctgcacggctggcctttatgccgccgttgttgggcgtctacgtcttcaccgacggcttgccttcgccgctgccgactggtgtttccgcctgcacggctggcctttatgccgccgttgttgggcgtctacgtcttcaccgaccggcttgccttcaccgctgccgactggtgtttccgcctgcacggctggcctttatgccgccgttgttgggcgtctacgtcttcaccgaccggcttgccttcgccgctgccgactggtgtttccgcctgcacggctggcctttatgccgccgttgttgggcgtctacgtcttcaccgaccggcttgccttcgccgccgccgactggtgtttccgcctgcacggctggcctttatgccgccgttgttgggcgtctacgtcttcaccgaccggccgcctcgtccgccgccgactggtgcttccgcctgcacggctggcctattatgctgccgttgttgggcgtctacgtcttcaccgaccggcttgccttcgccgccaccgactggtgtctccgtctgcacggctggcctattatgccgccgttgttgggcgtctacgtcttcaccgaccggcttgccttcgccgctgccgactggtgtttccgcctgcacggctggcctttatgccgccgttgttgggcgtctacgtcttcaccgaccggcttgccttcgccgccgccgactggtgtttccgcctgcacggctggcctttatgccgccgttgttgggcgtctacgtcttcaccgaccggccgcctcgtccgccgccgactggtgcttccgcctgcacggctggcctattatgctgccgttgttgggcgtctacgtcttcaccgaccggcttgccttcaccgctgccgactggtgtttccgcctgcacggctggcctttatgccgccgttgttgggcgtctacgtcttcaccgaccggcttgccttcgccgctgccgactggtgtttccgcctgcacggctggcctttatgccgccgttgttgggcgtctacgtcttcaccgaccggcttgccttcgccgccgccgactggtgtttccgcctgcacggctggcctttatgccgccgttgttgggcgtctacgtcttcaccgaccggccgcctcgtccgccgccgactggtgcttccgcctgcacggctggcctattatgctgccgttgttgggcgtctacgtcttcaccgaccggcttgccttcgccgccaccgactggtgtctccgtctgcacggctggcctattatgccgccgttgttgggcgtctacgtcttcaccgaccggcttgccttcgccgctgccgactggtgtttccgcctgcacggctggcctttatgccgccgttgttgggcgtctacgtcttcaccgaccggcttgccttcgccgccgccgactggtgtttccgcctgcacggctggcctttatgccgccgttgttgggcgtctacgtcttcaccgaccggccgcctcgtccgccgccgactggtgcttccgcctgcacggctggcctattatgctgccgttgttgggcgtctacgtcttcaccgaccggcttgccttcgccgccaccgactggtgtctccgtctgcacggctggcctattatgccgtcgttgttgggcgtctacgactccaccaccggcttgcctccaccgccgccgattggtgtttccgcctgcacggctggccattatgccgtcgttgttgggcgtctacgactccaccaccggcctgcctccaccgtcgccgactggtgtttccgcctgcacgctggcctattatgccaccgttgatgggcgtctgcgtcttcaccgaccggcttgccttcgctgccgccgactggtgtttccgcctgcacggctggcctattatgaccggccgcctcgtccaccgccgactgctaccactactgatgaacatcatcgtcttccgtcgccgactggttatgctgtcgccgactagtgcttttatcttcacaactgcgcgtcttcactaccagttcacttcatcacggcaatgcaactttgtcatcatggtagagcgacttcatctttattatcttcggcactggcaaactctattgctgctacttcgcaagttttgctacttcaccaaccacgacgtctttgtgagcctcgacatctcggcatgtgatgccatgttattttactacaacaagaggctctccaatattcaggatttctacttggacatcttcaacacatatcttcaatcaagcaatgactactcgacgacaagaagctataattctcgactctatgttcagttgtttcccaac

SEQ ID NO: 25910 - DNA, 462 bp, Oryza sativa
  Clone ID: PAT_MRT4530_30750C.1
atggcgggcggcagggtggaagcggagcaacggcgggtggaagtggagcggcggagggcggtgggcagagtgacggcaggcgccaagcggagcagaggggcggtgggtggaagcggagcgttggcggggcggtgggcggagcaacggcgggtgccaggcaccgagtggaacataggggcagtgggcggcgccggggcttgcccgcaaggcactgctagcattgaccctactgccctcgccgccttccccacccgcgccttctcctcctccgtcgccactgctggtggtagccgcgtcgccccgatgcggctcggcctcctccttcggctcatcggctccctcacctccatccttttctccgccaccggaacgccgcagctccctccttgctgcctcgcaggccacttccgccactgctgccttgcgtcgccattgacccccattgggacccataggggatag

SEQ ID NO: 25911 - DNA, 425 bp, Oryza sativa
  Clone ID: PAT_MRT4530_30751C.1
cttcccggctaattttgcttcgttgatcaacaacccatgacaataacaaaggcagggtaaaaaaccaccatttaacaggaaaaaaatgaccttgaggcaacccatggggggtcgtcgtcgggttaagaatttgctcgccggtttcaccgcgccggcgccgccaccggccgcctccgccggtttcccgggcaaaacgctggtcgtttccaacaaccccgagctgtactttttttcggggggggacgacgccaccgacaccgacccgaccttccagtacttgccgtccccggggcaccatttgccgggcgccgccgccaccgaggaccccgtttcctcgccgtgggagctcgacacggaggcgacggccctccagttgctccacatcctgagcattatgtacaggagcgggacgcacaccggggccg

SEQ ID NO: 25912 - DNA, 195 bp, Oryza sativa
  Clone ID: PAT_MRT4530_30752C.1
atggacctcacaatttcatggaaccaaactcttgtgatgtctctttacctctggaaggtaaaggagagaaggataggtcatgtggccacccatttctaccctccagatttcaaactccagctctctattaatgggttcagagcaaagtacaactcaagcatagcaacagcaacaaccaagtacaccttcaattaa

SEQ ID NO: 25913 - DNA, 375 bp, Oryza sativa
  Clone ID: PAT_MRT4530_30753C.1
atggctagctaccacttcggcttgagggacgacgacgactggcgtggcggcgcggcggcggcgtcggggcaccgtgggcctgcctggcggtgtgcgggcgcggcggcgtcggggcccggcggcgtgcgggtgcggcggcagcgcgcggcggccgtgccgtggcgttgcggcggcgtggcgagctcgaggcgggggcggcggagtggcagtggcgacggcgtcgttggcggcggcggccgcgtcgaagccggtcgtcggccgtggagagagagagatatcgagatcgagatcgagggagagagaggcaacgtcggctctcactcaagagatgcggcgggggcgtctgcggcggaggcggcgaggaccgccaagtga

SEQ ID NO: 25914 - DNA, 1569 bp, Oryza sativa
  Clone ID: PAT_MRT4530_30754C.1
atggtgcaccccgacgacggccgccgatcggagatcgtcatggacgccgccggccggagttgcgaggtggacgaggactacatcagcggcctccccgacgacctcctgcacaacatcctcctccgcctccgctccaccgccgccgccgcccgcaccagcgtcctgtcccgacgctggctccgcgtctgggcccatctacccgacctcgaacacggaaacttccgtgcgccggcggcggcggtggactcggtcctcgactccatcgacgccgccatggccgccagccaagccctggccatcgacagcctctgcatcaccgtggaaaaggagaaccgaacccgacaactccccctcgccgccatccccgcccaccgcgtgatcgcgtggctacgcttcgcctcgcggcggcgcgaggagagtgggaggggaggggaggagaagacgatggaggcgctgccgatcgatctgctcgccatggagagagctacaagcatcgtgctcgacctcggacacaggttccgcctccggctgatgatgatcccgccgccggtggccggcggcagcggcgcgttcacgaagctcaccgccctgaccataatcaccgccgccgtggaaagccgcgatctggaagccctcgtgtcctcgcattgccctcgcctcgagagactctccatcatcggcgtaaagctgctcggcggcggcggcgccgcctccagcttctccatacgctccgactcgctcacctcgctgtacatccacctccgggactccagcctggaggaggtcgtggccccgaggttggagaagctgcacgcgtcaggcgacaccgggttccacgtcgctgcccccatgctggccgaggtctcttggcaagacgtccatcgtgcctacctcagcaatggcgtccgccgccgcccgctcaagatcgccggcgccgcgcgtagtctgcggcggctatgcatcacgtcaccctgttcggtcgggtatctgctgcagagattcgacgccgtcgactggctggatctgacactcgcggttcctcagggagtggaggcatacaggacattcatggatgatatggacaaccttcccaagtgtgagacattggtggtagctctaatagcgcagttccatggctttgtgccaagcatgctacatctcctgagaagatgcagccatgtaaagaaacttgtggtaatgattattgaacacagagacccacctccattatcaccatccagtttctgctcgacagcatgcccctgtcgctcgccagatatctacaagaccgacggcattgctctcgactgccttgaagaagtagagatccgtcccataggatcagctcctgtgggagtagttgcagaatttgtggatcagatattcagactggatgcagccatgctcaagaaggtggtctatcagcagtcaccatttagaccagaccaggagggctacgagaaggtccgcagcatgtatctttcaaatcccagaatcgagttcaggcaattggcctctactacacaaagcaaggatgtgacagtcttgtgttcagtaaatcagtcgtag

SEQ ID NO: 25915 - DNA, 357 bp, Oryza sativa
  Clone ID: PAT_MRT4530_30755C.1
atggatgatctggcagagaagttcgaagatttgcaggtgcatcatgagaaaatccaggaacatttgaatgccatccttgaagttttggtgaagaagatatgcgtactcatcctccttgaggcaggactaggagacctccgtggaggtgttaatgttgaggcaggacttggagatctccgtggaggtgttaatgtttttgcagatggaggagttgaaggtctccatgatggtgttggtggttgcaatgcaaatggtggactagagcgagaagctgcactagagggtcttgtccttgacatggagcgtggtgatggactaagcctaatagggcttgcactgcttctactagacctttga

SEQ ID NO: 25916 - DNA, 1569 bp, Oryza sativa
  Clone ID: PAT_MRT4530_30756C.1
cggacgcgtgggcggacgcgtgggcggacgcgtgggcggacgcgtgggcgccaccgtcgaacaccttcacccatggcgtccatggccgccctcctcgtcgtcgtcttcctcgccggctgccacgtgggggtagtggtggcgcaggggaggagcaccgcggcggcgcatggcatcggggtgaactacgggagggtggcggacgacatcccgccgccggcgaggtcggtggagcccctccgggcggtgggggccgggtcggtgaagatctacgacgcgaactcgagcgtgctccgcgcgctggcggggacgcgcatgcgggtgtcgatcatggtgcccaacgagatcatcccggggctcgccgcctccgccgccgccgcggacaggtgggtggcggagaatctggtgccctactacccggagacgcgggtcaagtacctcctcgtcggcaacgagctcctctccgactactccatcgccaactccacctggccccgcatcgtgccggccatggagaacctccacgtgagcctccggaggaggaggatcagcagcgtcaagatcagcaccacgctcgccatggacgcgctcacgtcggggtcgttcccgcggccgccgtccgccgcggcgttccgccccgacatcgccggcgacgtcgtgcgcccgctgctccggttcttgaacgggacgaactcgtactacttcgtcgacgcctacccgtacttcgtctgggccggcaacaacgacaccgtcccgctcgagtacgcgctcttccagggcggcggcggcggcggccgctacgttgatccgggcacggggctcacatacaccaacatgctcgacgaaatgctcgacgccgtggtgcacgcgatggcgaagctggggtacgggggcgtgaagctgggcatcgcggagaccggctggcccaacggcggcgactacgagcagatcggctgcaacgcccacaacgccgccatctacaacaggaacctcgcggcgcggatggcgaggagccccggcacgccggcgcggcccggcgcgaagatgccggtgttcgtgttctcgctctacaacgaggacctcaagccggggcccggcacggagcggcactgggggctgtactacgccaacggcacggcggtgtacccggttgacctcgccggagcgcggccgctccggtcgtacccgctgctgccgccgccggagaacgacgcgccgtacaagggccccgtgtggtgcgtgctcgccggccgccgcggcgagaagctgaacgagacggcggtgggcgacgcgctggcgtacgcgtgcgggcaggggaacgggacgtgcgacgccatccagcccggcggggagtgcttccggccgaacaccacggcggcgcacgccagctacgccttcaactcgtactggcagcagctgaggaagaccggtgcgacgtgctacttcaacaacctcgccgaggagaccaccaaagatccaagtaagcctgaaaaatatctggaaaattttactccatttttgctcagatttcgattgatacatgcaaatgcaatttatgatttccatctttag

SEQ ID NO: 25917 - DNA, 1191 bp, Oryza sativa
  Clone ID: PAT_MRT4530_30757C.1
atgccaccctcaccctcaacaaggagatctccttcaagggaaactttcctcaggagggtcaacagttttgggaatgctctgcctgctaaaccaaaggatgaggatctcactttgtttgctgatatgcagaaaattgagaacgataatttcttactggaaccctctgaggattttgatgagtcaatctcaaaattgagttatttccctgatgtcaagcttggtgtcaacatccctacacggagagaaagccatgatttgcttgacgttgatggtgacaaaaatgattatgagtggttgttgactcctccagagaccccacttttccgttcattggatgatgaagaagaacagtctgctggtcaggattctaggggcagaactaagagtaagcccatacgaatttcggggtcatccacagtggacaatactcaaaggtctagtagaagcagtgcaagccctattaggcttagtccatcaccacgctccatgtcaaggacaagaccctctagtgcagcttctcgctctagtccaccatttgcattgcaaccaccaacaccatcatggagaccttcaactcctccatctgcaaaaacattaacacctccacggagatctccaagtcctgcctcaacattaacacctccacggaggtctcctagtcctgcctcaaggaggatgagtactggttcaaccccagcgttaaataggacaaggggtccttctccagttaaaactaaccgcatatcttcttcaccaaaacttcaaggatggcattcaaatgttcctggattttctcatgatgcacctgcaaatcttcgaacttctctgccagatcatccattatcccattcaaggggtggatccccttctcctcctatcagtggaagggacatgggttccagaggcagacgccaatcactatcgcctactccatctagaagagcaagttcatctcatagtattgaacgagatcgtttaagctcgtatagcaaagcttctgcaacatcttctggtgaagatgatctggattccatgcagtctctaccagttgcctattccaccagcccagctgtaaaaaagagcttgtctatgatgaagaccagaactattgcttcatcaaagaagccgtccacaactttttccactagttctgtcccaaagcggtcatttgattctgcagtttggttgatg

SEQ ID NO: 25918 - DNA, 493 bp, Oryza sativa
  Clone ID: PAT_MRT4530_30758C.1
atgtaatctctgaagaattaaacaaatcaatatacattgatatataatatttctgaaacaaatcaatataatacatggatcacgtacagagtacagtatatatatgtgtgtgagctagctagctagctaggtgtcatgtcgtcgtcatctaactacaacactcttaactcccctgacaataaaattcatcaccagtaagtgaccatctatagctagatgcaagcaaaaccaacaacttgaattaaaattttgtttgatttctggatcgatcctagatgcggccggcagtgctcagtccatcctcctcacacattaattaacttgtgaaaaaatgaagctaactaattaaagcagagggggtgaacatatgcatgagagagccagctgatcgatgagctaactagctatagccatatatatttactactagatgcaagcatgcatgcaagaattaatatatgtactactataaactatatatatgtacactcga

SEQ ID NO: 25919 - DNA, 175 bp, Oryza sativa
  Clone ID: PAT_MRT4530_30759C.1
cgcccggccagagggcggcaaggggccgcctgcaaaatggccgacccagactggcttttttgcattcgggccccttgctgccccaacagagggcggcaagggctttactgcaaaaaaccctccctccgtcaccgcccatccctcccccgtttgccacgtcagcttgccaccctag

SEQ ID NO: 25920 - DNA, 223 bp, Oryza sativa
  Clone ID: PAT_MRT4530_3075C.1
cggacgcgtgggcggacacatggcgagaagaagaagaaggacgcatatgaggagcgcggtttacgccttacgccccggccaccacgcgcttgaggaaatattggattgtataggtccttgtgttgatggatggcattctactggtggatctcatagcttgacgcgaagagatctgcttctagagattgctgatttagcacacaagcctgacatatttgtgagt

SEQ ID NO: 25921 - DNA, 300 bp, Oryza sativa
  Clone ID: PAT_MRT4530_30760C.1
atggctagctaccacttcggcttgacggacgatgacaacgtcttctctgcaacattaccaggaaaattggcgtggcggcgcggcggcggcgtcggggtgccgtgggccggcccggcggcggcgtgccgcggcggtagcgtgggggcccggcggcggcgtggcgtcgcggcggcatggcgtagcagcccggcggcgtggcgcggcggcgtggcgagctcgaggcgggggcggcggcgtcaaagtcggtcgtcggcggtggcgtttgaccgcggcgtagtagtggcgtcggcaacgagctag

SEQ ID NO: 25922 - DNA, 268 bp, Oryza sativa
  Clone ID: PAT_MRT4530_30761C.1
atgaacttagattgggacagtacgcaagaattggttgatttccgggtggctagtactgtctcggtcgatataattgccaccaaatacttatgtcaaacgaacgagtacgaccacagcttgtagaatggggacagacctagctattatgttaattaacaatgtggcacctctgtacagtggttccttttgtaagtcctcgcgcaggaggcaaatttacgccgcgaagggtgattgtaatatttaccgaggcgcaggtaaatatttgaga

SEQ ID NO: 25923 - DNA, 420 bp, Oryza sativa
  Clone ID: PAT_MRT4530_30762C.1
tttgggggtttttttaattagagagggctatccttcattttttattatttttttttagtagaacattttttttttttttttaggggaagaaaaaaagcacggcaacaattcaacagggggaagaacaaaaaaaaaacagaagagaagaccacgacaaaccacaagagaggagagcaaagcatggcaaagcaagggagctccacaatgccaaaacaactaaggagggcactgcctacacatgggtcccaaccacccaaaaacacaaagacgcaatattattcgcagtcctgctctgctaccttaggctcaaaggcccagagcaggccaacaaaaagcagaatggccggcctctgggaggggagcccggcggtgcagaggaaggcgaaccgcaaggcctccataaaaagcctctccagcccg

SEQ ID NO: 25924 - DNA, 2256 bp, Oryza sativa
  Clone ID: PAT_MRT4530_30763C.1
atgacaaagcctccatcaaccaaggcggaggtggaaccggtcaatgtgataccagtcgcattggaggagcttgatgagggagcacgcaaagctttagatgaacatctcaaggcatatactcaagatctactaatgaaggcgtgcgctaggacccgccaaggtgtgattttcaagccgggatcattgcctaaacatactttcgacatggtaagtgctgaagaggtatcacaatctatccaacaacaaattgcgcatacgatagattcatctatggttactttaaataataagttagatgcatctatcgaaactcgttgtgaagaatttatgaggactaaatttggccctctcatggccgattttatgttcaaagataaagcctctaccagtgctagccaagcccccatagatcaaataagtagtaaaaccgatggggtgaagacgcaacaaactgacgaggggtggtcagcgcatacagccggtctgaccgggctagatggtcggttagaccgcgactttgccgccggtcagaccggtcagaccgggtattaccccggcggtcagatcggaccccaaaccggtctgaccgcgcctttggatgccggtcagttcggggcttggaccggtcagaccggcgcaatcatcccaatacagggggtagatccaatgacaaataacatgtttttataccatataccagcacccaatcctcctatatccactattggtccccaagttcaaccacatatccctaatgcttacaatgatcctactaggggatatactcccgatactaggcatggccaatataattatattgcgccgcaaccacaacctattaagccaccaaacccaccaccaaatcaaaataggcctgataatatggaggaattgattagtggtattattaaggataaatttggaattaaagctaggaatcatactaaggtttaccaaaagccatatcctgattactatgacaacataccatatcctcgtggttatagagttcccgaatttaccaagtttagtggtgaggataatgaagggcgattgaaatttaccgatggttccaagatgaagcttgatcatgatcctttcccggtgaatacaattaatttcaacaataagaaggtgttgattggtcaaggagtggtcattggagagcctaggccaaagatgatggtgccaaagaatccggaggttggtgtttggaaggagaataggagcgaagtttcaagttctaaagctcctaagaggactaagttttatgctaagaaccgggccaatgaggagaaaagggaaggaaagcgtgtcaaagtggagattaggacttcggaggtgattactatcaaagtggggtctcatgatgagccaataccttctggagatgaagttggagagtcttcaagcaataaatccaacgccgggaccagctcatcgcaggcggccggtctgactaggccctctggccggtctgaccgcagccctaaggctggtctgaccgggccatcaggccggtttgaccgtcagcccaatgtcggatttgacgggtaccaaaagagaaggttgcaacatctttgggcccaagaattaagagagagagaggccgaagagcaaagagatagaaggttcaatgagttgcgaccactgcctacaaagatgtggaggcataaatccatagagattgaagaaccggttgttgtgcaaaaggagaaggaagaacaatcggttgctaaggatgaatcatctccaaaggaggacatggatgtcaacatggtgtgtatgttgcctatggagttttacgctatagatgaagccgaggttgctcaattctcactaggtcctaaagatgcggtttttgagaagcctgatgagtcaaaccgtcatatgaagcctctctatttcaaaggtcatattgatgggaagccggtctctaggatgctagtggatggaggtgctgccatgaatttcatgccatactcgttgttcaagaagttggggcatggagatgatgagttgaagaagaccaacataattctcaatggcttcaatggtgaaccaacggaggcgaaggatatcttttcagtggagcttaccgtgggaaacaagacgctaccaaccgctttcttcatcgtcgatgtgcaagaagctaatttagagtggttgcaaaagagggtgcaagaatatcggtctacaaagaacgatattagtgaaactattgaagattttgatgaagtagagaagcttggttaa

SEQ ID NO: 25925 - DNA, 1013 bp, Oryza sativa
  Clone ID: PAT_MRT4530_30764C.1
atgaaggcgagggcaataaggggatgttctgtcaccacatgcaccttggtgtcgtgtgtggcagcgacgacgtctggcgcaactcctggccacgtgaaccctggaggccagggttaccgtgagcggcgggcgagggatcgcgctgatgcttcagcccgtggggaggaattgtccccaagtccaagtgaagagaagaggtgtgagagaagagaagagaagcggcgcgggggagctctgctctgctcactactagtgtttctctactcgccgacggggcgccgggcgccgccaccccacccccccgagctcgccgtcagccgcaaccgccggggctggggctccctcctccactctaagcttgctgcaagggaagggttccgccggccggctgcatccatcccatcccctcccggccaattggggaactggaatcccgatttcatccagctaaattacctgccaccgcagatggccgccgcccacaagctagggttcagggaggaggacgccctcaggttcctcttcggcgaggatctcctcgccatgcaccactccgccgcagcctcctccttcgacaggtcgcaacccgaggtccaggtcttcagggacgtcttctctccgtctccacctcttcttcatgtggccgagacttcatccctgctccccactgctgctgctgctgcgcctgcgcctccgcctccgcctgcgcctgcgccttcactccaccaccacctgcacgcgctgcagcctcaacccgcgcccgtggaggtcgacgccgccgccatcgatcccaaacattctcacggccccgtgctacatgggaatgggaatgggaatgggaatggaggcctcgagttggacgccgcattgcagggcttcgttgcttactggcaaggcggaggcagctctctaagtgtaaccgacgctgacctcttccatgacatgatgcaaccaacgccgccgcaacactccgctggacctcctcctcctccccctcctgctgctgctggaat

SEQ ID NO: 25926 - DNA, 122 bp, Oryza sativa
  Clone ID: PAT_MRT4530_30765C.1
ataggaaaaacacagagggctgatggaatgaacaataatggaactgagcactgcagactacatggaggtccaagaatgattgaagaaaacctgccagaccattaccagattgtactatatac

SEQ ID NO: 25927 - DNA, 2484 bp, Oryza sativa
  Clone ID: PAT_MRT4530_30766C.1
atgacgaagtcgccgccatccaagtcggaggtggatccatccaacgtgatgccggttacgagggagagtcttgatgaggaagcacgcaaggccttcgatgaacacatgaagaagtacgccgacgagcttttgaagacatgtacaaagactcgtcaaggcacgatcttcaagccagatttggtgtcttcatctactattgataagatgaccggtcagaccgagtattactccggcggtcagaccgggactcaggccggtctgaccgctcctctggatgctggtcagaccgggccctggaccggtcagaccggcgcaatagtgccgattcagggggaaagccgggttaaggataataaaaaatttgttagaccatatgagaagaagcctaatgttaatgcaattgattactctgaagctagtgatagtgaagatgaggggcgattgaagttcaccgatggttctaagatgaagcttgatcatgatccttttccggtgaatacaattaatttcaatgataagaaggtgttgattcggccggagcaagccgaatctactaaggggaaagaagtgatcattggtgagcctaggccaaagatgatagtgccaaagaaaccggaggttggtctgtggaaggagaatgggagtgaggcttcaacttctaaagctcctaggaagactaaggcgactttggatatgcttttggagaagtatgagaagcaaggtgatgagagagctcgcaacaaaggaaaaagaccaagatcacctcctagggagcgatttggccattcaccaagacggtcgcaatcacctccatatcatcattcacaacacatgtcatgggggccttacccaatgccgccgccgggttatccttatctttactacatgccatggggggcaacaccgccaatgttcaatcatatgcctccaatgcaattcaaccaaaggtggggaggaccaaggaggccaattcatgagcgcttgtcttcaccaaataatagccggttttatggaaaaaatcaggttaatgaagaaaagagggaaggaaagcgtgttaaggtggaggcaaggacttcggaggtgattaccatcaaagtggggtctcatgatgtgccaataccttcgggagatggagttggggagtcctcaagcaacaaatccgaaaccgggaccagctcatcgcagtcggccggtctgaccgggccctctggctggtcagaccgcagctctacggacggtctgaccgggccatcaggccggtctgaccgccggcctcaggtcggtctgaccgggccatcaggccggtctgaccaccgaccccatgtcggtctgaccggcgcatctggccggtctgaccggtggtctacgtccgaggagaaagaagaacaatcagttgttaaagatgagtcatctccaaaggaggacatggatatcaacatggtgtgtatgttgcctatggagttttgtgctatggatgaagccgaggttgctcaattttcactaggtcctaaagatgcggtttttaagaagcccgatgaatcaaaccgtcatatgaagcttctctatctcaaaggttatgttgatgggaagccggtctttaggatgctagtagatggaggtgccgccgtgaacttgatgccgtattcattgttcaagaagttggggcgtgaggatgatgagttgaagaagaccaacttgattcttaatggcttcaatgccgatttgagattagcttttgagaggatgcgccggtatggtttgaagatgaacccacttaagtgtgcttttagcgtgtcggcggaccatcatgtagatattgcttatgaggaagaggtttgcttatttgaagttataccttggaagatttattttgatggttcttcatgcaaggaaggtcaaggcataggggctaatggacaagccgagttgagtaataagacgttgttgaagatagtaaaaaagaagattgaggaacacccaaagaggtggcatgaggtgctttctgaagcattgtgggcgtataggatatctaaacatggtgccactaaagtcactccttttgagttggtttatggtcaagaagccgttttaccagttgaggtaaatcttgggtctcttcgttacatcaagcaagatgatttatcaagtgaagattacaagatattaatgggagacaaccttgatgaagtcatcgacaagcgtttgaaggctttggaagagatagagaaagagaagaaaagggtggccaaggcgtatagaaaaagggtgaaagcaaagttgtttcaagttggagacttggtttggaagacaattttgcctttggcgagcaatcaacgggaaatacttgaagaaatgcttcccgagcgtttggcaaaatgcttaggaggtgctatggccggcgacttcatctccggccagatctccgcctgcggcgatgtcttgttccgccagcccatctgccgcgccattagccgagtacactga

SEQ ID NO: 25928 - DNA, 334 bp, Oryza sativa
  Clone ID: PAT_MRT4530_30767C.1
agaccaggggtggtctgaccggccacatgccgtcggtctgaccggcgaccccgagtggtctgaccggttcgtgctagttgctacagattacttcaccaagtgggctgaagctgtgccgttgaagaatacgactcatacggaggctaatggacaagccgagtcgagtaataagacattgttgaaactagtgaaaaagaagattgaggaacacccaaagagtgaagattataagacgttgatgggagacaaccttgatgaagtcatcgacaagcgcttgaaggctttggaagagatagagaaagagaagagggtggccaaggcgtacaacaagagg

SEQ ID NO: 25929 - DNA, 1515 bp, Oryza sativa
  Clone ID: PAT_MRT4530_30768C.1
atgttgcatccaatggagctccttccacgcccaagcaatcaacgagtggcgattgcaggggaggatagaatcagcgagttgccggacgatgtgctggtgtccatcttggagaagctgggcaacacgcgccaagcggtggcaaccagcgtgctgtcgaggcgatggctgcacctcccatggtggatacgccggcccttcctcagcatcttccagttcctccccagatcagccagagccggaggagaagacggtttcaagaacttgcagcagcgagacctcgaccgagccatacctcccttcgtcagggcagccatggcgttcttggcctcccccacggccacccactgcctcgcgctgaggttcctcctcacggacgaggaggacgacgagctcgtctacgccgtgcgccacctccttctcgccgcgggcgcggcggctgacgccggcggcggcggcgcacgatgcagctcggtgcagctcgatgtccgcgcgacggcggacaccaccgaggcgcagatgcgcgacggcgcgcggcggcgcctcctcctcaccggcctcgtggcgcggccgcgcggcctgctgatcacgaagctccggctggagaggctatggctcaccgcggcggacgtggccgctgtgctgggcgcgtgcgcgcggctggtccacctcacgctgcacggctgccgcgccggccgaggcgagggcgcggcgctggcgatcgacggcgcgccggagctgcgggagctggtggtcagggggtgcggctaccggcgggtcgagctgcgacgcgcgccgaagcttgtccggctcacccttgagagctggagctcgacgaccacgactgctccgctccgcctcgccgcggctccgtgcctccgcgagatttctctcgtcaattcttgtacacggcgttcttcacaaagattcaggctgagcgagctcttggctagcgccaccaacctggattgcctatctctcaatttcagaaatgaggagatttggatacaacctgaggattcaaaccgatttgttgctgcgtttggcaggctgactaccttgtctctctgccggatatttgacgagtgtgaccttctatggacgttgtacctccttaaagctgcaccgtccctccgaaaatttagtattggggtccagaaacattcttgccagtatggaggaagtgaagtcaagcagaggcaaatcctcttcccagagaaaaggaacatgttctggatagattttaatttccagcactaccatttggcacaactagagatttgtggatttgaggcaaatgacaaatatatgatatttacaagattaatcatggagcaagctaaaaatctaaaggttgtcattctgtcagatgagaagacttgtgatgagtgtgattttcaggatgatggaacctcctcaacaggatcaagttacccgaagaacaaagaagagaaacgtttgatacagaagcaactgacagaaggaatttcttcacctgtcagagtattggtactatga

SEQ ID NO: 25930 - DNA, 2852 bp, Oryza sativa
  Clone ID: PAT_MRT4530_30769C.1
atgacgaagcccccgtcatccaaggcggaggtggaaccgtccaatgtgataccaattacattggaggagctcgatagggaagcgcgcaagtccatggaggagtaccttaaggaggtcacacatgaggcattgatgagggcgtgcactaggactcgtcaaagtgtgatcgtcaagcctggaccgcgcattaagcctaatttcaatgtgttaaatgcatctattgagaatcatgttgaaggatttttgaggactaaattcagccctctcatggccgattttatgttcaaagataaagcctctaccagtgctagccaagcccctatagatcaaataagtagtaaaaccgatggggcgaagacacaacaaaccggtgaggggtggacggcgcatatagccggtctgatcgggctagatggccggtcagaccgcgacttcgccgccggtcagactggccagatggccggtcagaccggggggtatcctcccgatactaggcaaggccaatataattatattgcgccgcaaccacaacctattaggccaccaaatccaccaccaaaccaacataggcctgataatatggaggaattgattagtgggatcattatggataaattcgggattgaagctaggaatcgtgctaaggtttaccaaaagccgtatcctgaccaccatatcctcgtggttatagagttcccggatttaccaagtttagtggtgaggatagtaggaccacatgggagcatagatttggctgatcttgcttttaatggtttaattgctcctattaaagaaagattagatggccaacaatttcttgatgttagtcaactcatgcaaaaggctctagctcaggaaagccgggttaaggatagtaaaatatttgttagaccatatgaggagaagcctaatgttaattcaattgattaccctgaggctagtgatagtgatggtgagagtgatcatgatatgtatgttgttgagtgttcatggacaaacaaaaataagccttttgtttgttctaatttaattctgactcctcggaaatatcggcaaagtgaggttcaatcggccatagatgaaggacgattgaagtttaccgatggttccaagatgaagcttaatcatgatccttttccggtgaacacaattaattttgatgataagaagttttatggtaagaaccgggccaatgaagaaaagagggaaggaaagcgcgttaaagtggagactaggacttcggaggtgattaccatcaaagtggggtctcatgatgcgccaataccttctggagatgaagttggagagtcttcaagcaacaaatccgaagccgggaccagctcatcacagtcggccggtactaaagatgtggtttttgagaagcccgatgagtcaaaccgtcatatgaagcctctatatctcaaaggtcatattgatgggaagccggtctctaggatgctagtggatggaggtgccgccatgaatttgatgccatactcgttgttcgagaagttggggcgtggagatgatgagttgaagaagatcaatatgattctcaatggcttcaatggtgaaccaacggaagcgaagggtatcttttcggtggagcttaccgtgggaaacaaggcgctaccaaccgctttcttcatcgtcgatgtgcaagagaacgatattggtgaagctattgaagattttgatgaagtagagaagcttggtcaagggtttacatcggctgatccgttggaagaagttggcataggtgatggaactaagccaaggccgacttttgtaaacaaaaatatgagagccgattataaggtgaaaataatcgagctacttaaggagtatgtggattgcttcgcatgggagtatcatgagatgccgggtcttagccgtgagcttgttgagcataggcttccaattaagccgggttttaggccttataaacaaccacctcgtcgtttaactcctttgctatatgaccgagtcaaagaggagattgatcggttattgaaggcggggtttattatgccatgtcgttatgtggagtgggtgtctagtatagtcccggtggagaagaaggggggtgggaagattagagtttgcatagactttagagatttgaataaagctactcccaaagatgaatatcctatgcctatagccaacatgatgatcaatgatgcattagaccaggggcggtctgaccgtgattgcacggccggtctgaccggtgaccaggggcggtccgaccggccacatgccgccggtctgaccggccgtgcacggccgtgtttggatgatgatcaatctaaagtggctatgggagaggtggatgaaggaatttgtggaactcatcaatcggcacataagatgaattggttgcttaggagagcggggttctattggtcgaggatgattgaagattgtttcaaatactatatgggatgcaaagcttgtcaatggttcggcaatgttcaattggcgcccgccaccgtgttcaatcctattatcaaaccatggccgttccgaggatgggctttggacttcattggtcaaatttatccttcgtcatcaaaggggcataggttcgtgctagttgctacggattacttcaccaagtgggctgaaaccgtgccgctcaagaatatgactcatatgaaggctaatggacaagccgagtcgagtaataagacattgttgaagctagtaaagaagaagatcgaggaacaccctaagaagtggcatgacgtgctttctgaagcattgtgggcgcataggatatctaaacatggtgccactaaagtcactccttttgagttagtatatggtttagcttttgctagatcgag

SEQ ID NO: 25931 - DNA, 3504 bp, Oryza sativa
  Clone ID: PAT_MRT4530_3076C.1
atgatgtcgacctctgccggcttgtccgctgcgccatcaaccagcccgtctgttgcgccgtcatccaagtacgcagagcatcttaccaatcttgttgcggttcccagtttgtcgcacgaccatcagtactttctcggcccaattggcaaccttgacccctctgaatttatcattgttgagaccaacagaatcccctttagactggccaacccaaacttaagtcactggaaaaacacctttaaatcatggccatctattgagaaaagtacccccgagaaaagctggcctttgtggttcgaatgggtatcggctagcaaacaagcccactgggatgaaatcggaatcagccaagcgctagcccttactacagcaaatttggctaaggatgagcctctgatggccgctgcaatctacttttggtccaacacccttaatgccttcttgttcaaccaagggccgatgacccctactttgttagatatcatcatgattactggtctggatgtgacctcatcggctaatcccatgagcttgaataccaaaagcacctttgaattcaagaccaaaagcattaggatttcttttgtctctttacatgtatcgccggccgtctccatcgccgctaactggtgccctcgcctacgcgattggatggtcacaccaccattgttgggcatctacgtcttcaccgaccggccgcctcgtccgccgccgactggtgtctccgcctacacggctggcctattatgccgctgttgttgggcgtctatgacttcaccgtcggcctgcctccgtcgccgccgactggtgtctccgcctgtacggctggcctattatgccaccgctgttaggcgtctacgacttcaccgccggcctgcctccgtcgccgccgactggtgtcctcgcctatacggttggttggtcacaccaccgttcatgggcatccacgtcttcaccgactggcttgccttagccaccgccgactggatccagatccagatatgcacaatagggattcatggctttaagcttatttcctacgcttcaggaataggtcagtcagaacatcaccaccggcttgccttcgccgccgccgactggtgtcttcgcctgcacgattggcctattatgttgccgttgttgggcgtctacgtcttcactgccggcttgccttcgctgccgccgactggtgtctccgcctacacggctggcctattatgccgccgtttgttaggcgtctacgtcttcaccgaacggcttgccttcgccaccgccaactggtgtctccgcttgcatggctggcctattatcccgccgtttgttgggcgtctacgtctttaccgcgggcttgccatcaccgccgccgactggtgtctctgcctgcacggctggcctattatgccgccgttgttgggtgtctacgtcttcaccgaccggccgcctcgtccgccactgactggtgtttttgtctatacgactctattgtctctactttgtaagctttgctacttcaccaactacgacgtcttcaagagcctcgacatcttgagtctagggctacacaaataccagactcaaaattcgacaagctttatgtcaagacaattccccttgggcaaaattctccttagctatcagtaccaaattttgaacaatgcatcagctaagatagccgtcggttcgatggttggagcaggtgggccatggtggtttctacagacttggctgaacttagtagccatgaaagctgtcaatcggccatcagtgatagaagtagagttcccaagactagagccgattacagatgatgatggagaagagcgaacccattgcaggtgcatgtcttatggagaatatgcatccacaccagccgattctggagcaaagctatcggctgaactgctcaaagactggttctgcagtttctatgaaggcttccagagagatgctcgggtttggttcccatatgaggactcaatgaatttcgatctcccagcagatttcagatttgaggatatcaactccgaaaaatttgataagtctagagaagtcttttcagctgctattagtccatgcatccttccagttggcatctatcaaggaagaaacattcaagtttcttatgaattttatcacccaatgagttcagctaggcagttcggaatgggacaattgccgatcggcttgtactttgccgataagatccagtgcaggggtgatatatcttcagccttgatgatggatcggctgctgaatatcccaggacctcaacttggcagtattgagaatatagagtttgcaaggttcaggagcaaagcctttgacaaatggtggggtgaatggaaattgcatctgttccatcaatcggcttccatgtatatgacatacctcttcccagatgccatccctcaaacaacagaatcctcccctcctcgcaaaagcaacagtggcaaggacatcgagtatgctcctggccttattccaaatggagggcaactgagagaaccagtcgatgccggcagaaaaaggaaaaccaagacatcggctattgatccatcggttctggctccaaagaagaaggccaaaaagaagaaatccaagctagccgatgacttgcctgccgtagatccatccattgaacaagctttggatgaagaagaacttagagaggatgttgatcaagctgcagccgaaatgagtgacccagaagataaaacaccatcggcttctccaaaacaaactcctccaactcctactgctccagctcattttaggaggaagaagaaaactgccgtgaagaagaaatcggcaacaatagcatcaaagccagctccaccggtcttaaccgatctgttttcttttgacatcaaggattaccttgatgaagaagaagaagacaccactagcaaagcctcagctactctgtccgatgatgtgaagagaaatcttgaagacatatctcatcagctagggtcatcattaaacagcttggtagctgattgtgcttcaatccgggcaagatttaaggaaattcaacctctaatcccagatgatctagccaacgttattactctagctgcttatcttgagcaacaccaattcaagctgaagaaaggtaagcaaagattagtcgatcgccgagagcgtaaggatatcgaaactactatccaagccaatcgacagcttgtacatgaagtgaaatccaagcttgatcagctatctgaaggcccgatcaagtccaatattgatcggctcgaggctcggaagattgagctcttggcactacttcaagaatgtaacgctgagctgtctttggagcaacaaaaattggctaacctaccaaaggctattgaagagcagaagttgaggctgaaatcggctatcaggaatattgccgatatgactaagtccctcaaagtcatccctggaaccgatgctcaagacgcccaagccatagaagaagtaaagcaaattaggcaaagggctatatcggctattcagtaa

SEQ ID NO: 25932 - DNA, 5580 bp, Oryza sativa
  Clone ID: PAT_MRT4530_30770C.1
atgacgaagccgccatccaagacggaggtggagccatctaatgtgataccggtcacattggaggattccgaaggagaggaccgcaaagctatggaggagtacatcaacgagctcacacgggaggcgttgatgagggcaagcactaggactcgtcaaggcgtgattattaagcccgggccacgtcctaagctcgcccccgacttggtaagtaatgatgaggtaacacaatctatccaacaacaagtagcatctacaatagattcatctatgattgcttttaaagataagttagatgcaacttttgagggtaaatttgatgagtttttaagggttaaattcggccctcttatggccgattacatgtcaaaggataaagcctctaccactgctaaccaacctcctatagatcaaacgggtagtaaaaccgatggagcggcgcacacggccggtctgaccgggcctgacggccggtcaaaccacgacttagccgtcggtctgaccggccaaacggccgatcagaacggcacaattataccgatacaggggatcgatccgatgactaatgctagttatttgtatcatcttagaacatttgatcctcctatatctactgctgcaaataatctccaagttcccccacatgttcctaatgcttataatgatgttgctagggggtatcctcccgatactagacaaggccaatataatcatattgcggaacaaacacaacctattaggccaccaaatccaccgccaaatcaacatgggcttaataatatggaggacataattagtgagattattaggaatagattcgggattgaaactgggtattgtgctagggtttacaaaaagccgtatcctgattattatgataatgtgccgtttccccgtaattatagagttcccgaatttaccaagtttagtggtgaggatagtaagaccacatgggagcatagatttagagatgttagaaaccgatgttataccttgaatataactaatagagatttggctgatcttgcttttaatggtttaattgctcctcttagagaaagactagatggccaacaatttcttgatgttagtcaactcatgcaaagggctctggctcaagaaagccgagttaaggataataaaaaacttgtcagatcttatgacaaaaagcctaatgttaatgtgattgattaccctgaggctagtgatagtgaggaggagggtgatcatgatatatatgttgctgaatggtcatggactaacaaaaacaagccttttgtttgctccaacctaatgccgactcctcgcaaagatcggcaaagtgaggttaaatatagttttgatgtggccaagtgtgataagatttttgattatcttttacaagaaaaacaaattagattacctaaaggccatgtcataccatctcaagaagagtttaaacgccgagcatattgtaaatggcatgattctcattctcattctactaatgattgcaatgtgtttcgacgacaggttcaatcggccatagatgaaggacgattgaagttcactgatggctccaagatgaagcttgatcatgatcctttttcggtgaatacaattaatttcaatgataaaaaggtgttaattcggccggagcaagcagaatctactaaaggaaaaggagtggtcattggcgagccaaggcctaagatgatagtgacaaagaaaccggaagttagtgtttggaaggagaataagagtggcgcttcaacttctaaagcccctaggaagaccaaagtgacttttggtatgcttttggagaagtatgagaagcaaggtggtgagagggttcacaacaaggggaaaagaccaagatcacctcctagggagcgatttggtcattcaccaagacggtcgcattcacctccatatcatcatccacaagacatgtcatggggttcttatcgaatgtcgccgccgggttatccttatccttacttcatgccatggggggcaacgccgcaaattttcaatcatatgcctccaatgcaatttaaccaaggatggggaggaccgaggaggccaattcatgagcgtttctcttcaccaaacaataggcggttttatggtaagaatcgggctaataatgaaaagagggaaggaaagcgcgtcaaggtggaggcaaggacttcagaagtaattaccatcaaagtggggtctcatgatgtgccaataccttctggagatggagttggagtatcctcaaacaaaaaatccgaagccaaaaccaactcctcgcagtcggccggtctgaccaggccttctggccggtctgaccgcagccatgcggccggtctgaccgggtcatcaggtcagtctgaccgccgacccgacagtggtccgaccgatgcctcgggccggtctgaccgtgcgtcaagtgtcggtctgaccggcatgtctggccggtctgaccggtggtctacgtccggtctgatcaggctccagcgccggtttgacaggggaattgcaaagggcgatatgaaggcttcatcgtcttcaaacaagattaataggggacattatttacctcctagaacagagccgaatcctaggtggatgcctaaggatttgacggctactcaaaagagaaggttgcaacgtcttcgggctcaagagataagagagaaaaaagctgaagaacaaagagataaaaggttcaatgagttgcgaccgccactggtatggaggcgtaaatccatagagaaggaaaagccagttgttgtagaggagagggaggagcaatcggttgataaaggtgaatcatctccaaaagaagacatggatatcaacatggtatgtatgttgcctatggagttttgtgctatggatgaagccgaggttgctcaattctcattaggtcctaaagacgcggtttttgagaagcccgatgagtcaaaccgtcacatgaagcctctctatctcaaaggccatgttggtgggaagccggtctctacgatgctagtggatagaggtgccgccgtgaacttgatgccgtattcattgttcaagaagttggggcgtgaggatgatgagttgaagaagaccaacatgattctcaatggcttcaatggtgaaccaacagaggcaaagggtatcttttcggcgaagttcaccgtgggaaacaagacgctaccaaccgctttcttcatcgtcgatgtgcaagccgattataaggttaagataatcgagctacttaaagagtatgttgattgctttgcatgggaatatcatgagatgccaggtcttagccgtgagctcgttgagcatcggcttccaattaaaccaggttttaggccttataagcaaccacctcgtcgttttaatcctttgctatatgaccgagtcaaagaggagattgatcggttgttgaaggcagggtttattaggccatgtcgttatgtggagtgggtctctagcagagtcctagtggagaagaaggggagtggtaagattggagtttgcatatattttagagatctaaataaagctactcccaaagatgagtatcctatgcctatagccgacatgatgattaatgatgcctcgggtcataaggtgattagctttctagatggtaatgccggctacaatcaaatctttatggcggaagaggatatgtacaagatggcttttaggtgcccaggatttgttggtttatttgagtgggttgtcatgacttttgggttgaagaatgccggtgcaacatatcaaaggacaatgaatttaatctttcatgatttattaggtattatcctagagatctatattgatgatattgttgtcaaatcggatggtatggaaggacacatggccgatttgaggttagcttttgagaggatgcgccggtatggtttgaagatgaacccacttaaatgtgcttttggtgtgtcggcggggaagttcttaggattcatggtgtatgagagaggagttgagattgatcctaagaagatagagaagattcgtgatttcaaagcgccgacatgcaagaaggaggcccaaaagttgctaggtaaagtgaattatttgagaagaagccgatgttacttgggggcaaaacaacaagaggcgtttgaagagttgaagagatatttgtctactccacccgttgtacgagcgcctaaagctggaaagccttttcggttatatattgcctccgaagacaaagttattggtgccgttttgacacaagaggaagatggcaaggaatatatcattacatatttgagccgccgtcttttagatgccaaaacgaggccaattctaagtgggagaattggcaagtgggcatatgttttgatagaatatgatttggcttatgaaccattgaaatctatgaaaggccaaattgtatgtggttttatagtagaccatcatacagatattgcttatgagggagaggtttgcttagttgaagttataccttggaagatttattttgatggttcttcttgcaaagaaggtcaaggcataggggtagttttcttttcacctaatggcatgtgttatgaagcatctgttcgtttggagtattattgtacaaataagcaagtcgaatacaatgctttattgtttggcttacaagttatggtgatggttggagctaaatacatggaagcttttggtgattcggaattggtggtgcaacaagtcaccggagtctacaaatgcttggacggatcactaaataggtacctcaattcatgtttagatattattgccaattttgataatttttctattagatatattgttaggcatgataattctagagcaaatgacttggcacaacaagcatctggctataatgtgaagaagggattatttctgatattagaagagccggtgcttgattttaaatctttgtgcgaaattggcaaaactggagaccagggatggtctgaccggcattgcactgccggtctgaccggtaaccaggggcggtctgaccggccgcatgctgccggtctgaccggcgacccagagcggtctgaccggccctgcgtggtcggtctgaccggttctgggcagaatgctggggggcacgtttcaatcaatttagaggctgaattaactgtgaattcagacatttgtgcccagggaacagaagaatattggagaattcctttgattcgatatttgaaagatcctacgcaaaattcgatatttgaagatggtgtcttgttgaagtgcttagatgaagatcaatctaaagtggctatgggagaggctaatggacaagccgagtcgagtaataagacattgttgaagttagtgaagaagaagattgaggaacacccaaagaggtggcatgagatgctttccgaagcattgtgggcgcataggatttctaaacatggtgccactaaagtcactccttttgagttggtttatggtcaagaagccgttttaccggtggaggtaaatcttggttctcttcgttatatcaagcaagatgatttgtcaaatgaagattacaagacgttgatgggagacaatcttgatgaagtcatcgacaaccgcttgaaagcattggaataa

SEQ ID NO: 25933 - DNA, 4005 bp, Oryza sativa
  Clone ID: PAT_MRT4530_30771C.1
atggcgacggagctgttcgcgccgcaccggctggacgcggccgcgccgcggcgcctccggcaagagaaggtgcgggagctggtggcgcacgtcgcgaggctggcggccggcgaggggggcaagccggcggtggtggacgtggggcgcgtggcgttcgcgacgagcctgaacctgctgtcgcggactatcttctcccgcgacctgacgagcctggacgaccatggcgggtccaaggggttccaggaggcggtggcgaggatcatggaggccggcgggcggcccaacgtgtccgacttcttccccgtcctcgccgccgccgacctgcaggggtggcgccgccggctggcgcgcctcttcgcgcggcttcaccgggtgttcgacgccgaggtggacgccaggctacgcgagcacgacgccggcgaggccaggaagggcgacttccttgacgtgctcctcggcatcgcggcgcggcgggatgatgcggcggagctcgaccgtgacactctccgctcattattcacggatttgttttgtgcgggaagtgacacaagctctagcactgtcgaatgggcaatggcagagttgatgcaaaatccaaagtccatgtctagagtttgtgatgagctttcacaagttattggcttaggaagaaatatcaaggaatcagagattggtcagttgccttaccttcaagctgtggtgaaagaaacatttcggctccatcctccagctcccttattattaccacgccaagctgagatgacaatgaagatagcaggttatacaatacccaaagggacacggattttcgtaaatgtatgggcgatgggcagagataaggatatatggcccgaaccagaaaaatttataccagaaagatttttgggaagtaagatcgacttcaaaggagtccattttgagcttattccatttggtgcaggtcgtcggatatgccctggaatgccactagcaaataggatggccggtctgaccggccggtctgaccgccgacccgatagtggtccgaccaacacctcaggctggtctgaccgtgcgccaagtgtcggtctgaccggcgcatctggccggtctgaccggtggtctacgaccggtatgaccgggctccagcgccggtttgacaggagggttgcgaaaggcgatgagagggcttcatcgtcttcaaacagggttaatagagggcattatctacctcccggaacagagccgaatcctaggtggatgcctaaggatttgatggctactcaaaagagaaggttgcaacgtcttcgggcccaagagctaagagagaaaaaggccgaagagcaaagggataaaaggttcaatgagttgcgacccccaccggtatggaggcctaaatccataaagaaggcaaaaccgattggtgtagaggaaaaggaagaacaatcggttcataaaagtgaatcatctccaaaagaagacatgtatatcaacatggtatgtatgttgcctatggagttttgtgctatggatgaagccgaggttgctcaattctcattaggtcctaaagacgcggtttttgagatacctgatgagtcgaaccgtcacatgaagcctctctatctcaaaggccatgttgatgggaagccggtctctaggatgctagtggatggaggtgccgccgtgagcttgatgccatattcgttgttcaagaagttggggcatgaggatgatgagttgaagaagaccaacatgattctcaatggcttcaatggtgaaccaacggaggcgaagggtatctttttggcggagctcaccgtgggaaacaagacgctaccaaccgctttcttcatcgtcgatgtgcaagaggctaatttagagtggttacaaaaaagggtgcaagaatatcggtctacaaagaacgatattggtgaaaccattgaagattttgatgaagtggagaagcttggacaagggtttacatcggccgatccattggaggaagtggacattggtgatggaactaaacctgtaaacaaaaacatgagagccgattataaggttaagataatcgagctacttaaagagtatgttgattgctttgcatgggagtaccatgagatgccgggtcttagcctcaaagaggagattgattggttattgaaggcggggtttattaggccatgtcgttatgcggagtgggtttctggcatagtcccggtggagaagaaggggagtggtaagattagagtttgcatagattttagagatttaaataaagccactaccaaagatgggtatcctatgcctatagccgacatgatgattaatgatgcctcgggtcataaggtgattagctttctagatagtaatgccggctacaatcaaatctttctggtggaagaggatatgtacaagacggcttttaggtgcccggggtttgttggtttatttgagtgggttgtcatgacctttgggttgaagaatgccggtgcaacatatcaaagggcaatgaatttgatcttccatgatttgctaggtattatcttagagatctatattaatgatattgttgtcaaatcggatggtatggaaggacacatagccgatttgagattagcttttgagaggatgcgccggtatggtttgaagatgaacccacttaaatgcgcttttggtgtgtcggcgggaaagttcttaggattcatggtgcatgagagaggagttgagattgatcctaagaagatagaaaagattcgtgatttcaaagcgccgacatgcaagaaggaagtacaaaagttgctagttatggagatggttggagctaaatacatggaggcttttggtgattcggaattggtggtgcaacaagtcgtcggagtctacaaatgcttggacagatcactaaataggcatattgctagtcgtgataattctagagtaaatgacttggcacaacaagcatctggctataatgtgaagaagggattatttctaataatagaagagccggtgcttgatattaaatctttgtgcgaaattggcaaaactggagaccaggggtggtctgaccggcattgcacggccggtctgaccggtgaccaggggcggtctgaccggctgcatgccgccggtctgaccggtgaccccgagcggtctgaccggccttgtgtggccggtctgaccggttctgggctggatgctagggggcacgttgcgatcaatttggaggccgagttaactgtaaattcggacatttgtgcccaggaagcagaagaagattggagaattcctttgattcggtatttgaaagatcccacacttaaggttgatcggaaaattcggcggcaagcgttcaaatacacattgcttgatgggaatttatatcgccggaatatagatggtgtcttgttgaagtgcttagatgaagatcaatctaaagtagctatgggagagaggatgcgaggcttgtcaacggttcggcaatgttcaattggcgcccaccgccgtgttgaaccccataatcaaaccatggccgttccgaggatgggctttggatttcattggtcaaatttatccttcgtcattaaaagggcatatgttcgtgctagttgctacggattacttcaccaagtgggccgaagccgtgcctttgaggaatatgactcatacggagattacaagacgttgatgggagacaaccttgatgaagtcatcgacaagcgcttgaaggcattggaagagatagagaaagagaagaagagggtagccaaggcatacaacaagagggtgaaagcaaagttgtttcaagttgaagacttggtttggaagacaattttgcctttgggtactcgatccaaggagttcggtaagtggtctcctagttgggagggtccttatcgagtgtgcggcattgttcgagggaacccatactttttggagacacttcaaggggagcgttttcagcgagcaatcaacgggaaatacttgaagaaatacttcccgagcgtttggcaagatgcttag

SEQ ID NO: 25934 - DNA, 372 bp, Oryza sativa
  Clone ID: PAT_MRT4530_30772C.1
ccggccgggccgattcagatcgcacgccgccaccaccccttcgtcctcgcgcgatccccgccccactgcgccgtcgcccacctcgccggctagccggaaggggtcacggcgccggcgagccccttcccccttcccccctctcccccttccctcctctcctcgaggtggcgacggcgaggtgcccccgccccgctgtcttccccttctccggcggctccctgcagccggatccaccaccatcggcagctgccgacaccagcccactgcccttctccattcccgcggcttcggcgccgccgtcgccgcctcgccacccgccggagtccacctcccatggccatctctctaagccccgaggaaacccctctcttt

SEQ ID NO: 25935 - DNA, 867 bp, Oryza sativa
  Clone ID: PAT_MRT4530_30773C.1
gaaacagaggaagattggaggattcatttgattcgatatttgaaagatcccacacttaaggttgatcggaaaattcggcggcaagcattcaaatacacattgcttgatgaagatttatatcgccgaaatatagatggtgtcttgttgaagtgcttagatgaagatcaatctaaagtggctatgggagaggggcataggttcgtgctagttgctacagattacttcaccaagtgggctgaagctgtgccgttgaagaatacgactcatacggaggctaatggacaagccgagtcgagtaataagacattgttgaaactagtgaaaaagaagattgaggaacacccaaagaggtggcatgaagtgctttccgaaccattttgggcgcataggatatctaaatatggtgccactaaagtcactccttttgagttggtttatggtcaagaagccattttaccggttaagacgttgatgggagacaaccttgatgaagtcatcgacaagcgcttgaaggctttggaagagatagagaaagagaagagggtggccaaggcgtacaacaagagggtgaaagcaaagttgtttcaagttggagacttggtttggaagacaattttgcctttggttactcgatccagagagttcgacgaacagcagaagcaaactaagtataaggatgctccacccactgcaattgatcttttcaaggagtgccattgcaaaagcaagatgggttttaatgagcctgtaaagaatgttattgctgtgatagaagttatcattgataatcctgcacaagaagggcaagatatgattggactttgtagatatggatatggtggtactgttgttttgctcaccgactga

SEQ ID NO: 25936 - DNA, 237 bp, Oryza sativa
  Clone ID: PAT_MRT4530_30774C.1
atatattaatattttttttttttttttttcaccaaccccacttaacatttctactattgtttttgaaaaaaattattataaacaccatttcttcttcaaaaacaacaacttaattttttttgctgctcaaaaaacacaaacaaaccctctagtctaaataaaaacctaagagccatcctaatttgcttctccaaaagagggaagtcgacacatcttttatgcaacttgaaaactcca

SEQ ID NO: 25937 - DNA, 4014 bp, Oryza sativa
  Clone ID: PAT_MRT4530_30775C.1
atgccgccaatgtacaatcatatacctccaatgtgggaaggaccacggatgccaattcatgagcgtttgtcttcaccaaacaaaagccgattttatggtaaaaatcgtgttaatgaagagaagagagaaggaaagcgcaccatggtggaagaaaggacttcggaggtgattactatcaaagtagggtcccatgatgtgcttataccttctggagatggagttggaaagtccccaagcaaaaaatccgaagccggtaccagctcctcgcagtcgaccggtctgaccaggccctctggccggtctgaccgcggccatgtagccggtctgaccgggatatcaggccagtctgaccgccgacttgatagcggtccgaccgacgcctcaggccggtctgaccgtgcgccaagtgttggtctgaccggcacatttggccggtctgaccggtggtctgcgaccggtctgaccgggctccagcgccggtttgatgggagggctgcaaagggcgatgtgagggcttcatcgtcttcaagcaaggttaatagaggatattatttaccttctggaacagagccgaatcctatgtggatgcctaaggatttgacggctacgcaaaagagaaggttgcaacgtcttcgggcccatgaattaagggagaaaaaggccgaagagcaaagagataaaaggttcaatgagttgcgaccaccaccggtatggaggcctaagtccatagagaaggcaaaaccgattgatgtagagaagaaggaagaacaatcggttgatgaaagtgaatcgtctccaaaagaagacatggatatcaacatggtatgtatgttgcctatggagttttgtgctatggatgaagccgaggttgcccaactctcattaggtcctaaagacgcggtttttgagaagcccgatgaatcaaaccgtcacatgaagcctctctacctcaaaggccatgttgatggaaaaccggtctctaggatgctagtggatggaggtgccgctgtgaacttgatgtcatactcgttgttcaagaagttggggcgcgaggatgatgagttgaagaagactaacgtgattctcaatggcttcaacggtgaaccaacggaggcgaggggtatcttttcggcggagctcaccgtgggaaacaagacgttaccaaccgctttcttcatcgtcgatgtgcaagaggctagtttagagtggttacaaaagagggtgcaagaatatcggtctacaaaggtcgatattggagaaaccgttgaggattttgatgaagtggagaagcttggacaagggtttacatcggcctatccattggaggaagtagacataggtgatggaactaaaccaaggccgagttttgtaaacaaaaacatgagagccgattataaggttaggataatcgagctacttaaagagtatgttgattgctttgcatgggagtaccatgagatgcctggtcttagccgtgagcttgttgagcatcggcttccaattaaaccgggttttaggccttataaacagccaccttgtcgttttaatcctttactatatgaccgagtcaaagaagagattgatcggttgttgaaggcggggtttattaggccatgtcgttatgcggagtgggtttctagcatagtcccggtggagaagaaagggagtggtaagattagagtttgcatagattttagagatttaaataaagccactcccaaagatgaatatcctatgcctatagccgatatgatgattaatgatgcctcgggtcataaggtgattagctttttagatggtaatgccggctacaatcaaatctttatggcggaagaggatatgtacaagacggcttttaggtgcctgggttttgttggtttatttgagtgggttgtcatgacctttgggttgaagaatgccggtgcaacgtatcaaagggcaatgaatttaatctttcatgatttgctaggtattatcttagagatctatattgatgatattgttgtcaaatcggatggtatggaaggacatacagccgatttgagattagcttttgagaggatgcgccggtatggtttaaagatgaacccacttaaatgtgcttttggtgtgtcggcggggaagttcttaggattcatggtgcatgagagaggagttgagattgatcctaagaagatagaaaagattcgtgatttcaaagcgccgacatgcaaaacggaggttcaaaagttgctaggtaaggtgaattatttgaggaggtttatttctaacctagcgggtaaaatcgatgcttttgttcctatacttcgcttgaaaaaagaagccgattttacttggggggcaaaacaacaagaggcgtttgaagagttgaagaggtatttgtccactccacccgttgtgagagcgcctaaagccggaaagccttttcggttatatattgcctccgaagacaaagtcattggtaccgttttgacgcaagaggaagatggcaaagaatatatcattacatatttgagccgccatcttttagatgccgaaacgagacatattgctaggcgtgataattctagagcaaatgacttggcacaacaagcatctggttataatgtgaagaaggggttatttctgatattagaagagccggtgcttgattttagatctttgtgcgaaattggcagaattggggaccaagggcggtctgaccggcattgcacggccggtctgaccggtgaccaggggcggtctgaccggccgcatgccgccagtctgaccggcatccctgagtggtccgaccggccctgcgtggccggtctgaccggtgttgggcagaaagctggggggcacgcttcaatggatttggaggccgaattaattgagaattcggacatttgtgcccaagatacagaagaggattggggaattcctttgattcaatatctaaaagatcccacacttaaggttgatcggaaaattcggcggcaagcattcaaatatacattgcttgatggagatttgtatcgccaaaacatagatggtgtcttgttgaagtgcttagatgaagataaatctaaagtggctatgggagaggtgcatgaaggaatttgtggaactcatcaatcggcccacaagatgaattggttgcttagaagagcggggttctattggccgaagatgattgatgattgcttcaaatattatagaggatgcgaggcttgtcaacggttcggcaatgttcaattggcgcccgccgccgtgttgaaccctataatcaaaccatggccgtttcgaggatgggctttggatttcattggtcaaatttatccttcgtcatcaaaggggcataggttcgtgctagttgctacggattacttcaccaagtgggccgaagccgtgcctttgaagaatatgactcttacggaggctaatggacaagccgagtcgagtaataaaacattgttaaagctggtaaaaaagaagattgaggaacacccgaagaggtggcatgtggtgctttccgaagcattgtgggcgcataggatatctaaacatggtgccactaaagtcactccttttgagttggtttatggtcaagaagccgttttaccggtggaggtaaatcttggttctcttcgttatatcaagcaagatgatttgtcaagtgaagattacaagacattgatgggagacaaccttgatgaagtcatcgacaaacgcttgaaggcattggaggagatagaaaaggagaagaagagggtggccaaggcgtacaacaagagggtgaaagcaaaattgtttcaagttggagacttggtttggaagacaattttgcctttgggtactcgatccaaggagttcggtaagtggtctcctagttgggaaggtccttatcgagtgtgcggcattgttcgagtgaacgcatactttttggagacacttcaaggggagcgttttcagcgagcaatcaacgggaaatacttgaagaaatacttcccgagtgtttgtcaagacgcttag

SEQ ID NO: 25938 - DNA, 5511 bp, Oryza sativa
  Clone ID: PAT_MRT4530_30776C.1
atgacgaagccatcatccaagacggaggtagagccatctaatgtgatgccggtcatattggatgacttcgaaggagaggatcgtaaagctgtggaggagtacatcaacgagctcacacgggaggcgttgatgagattaactactaggactcgtcaaggcgtgatcatcaagcccgggccacgtcccaagctcgctcgcgacgtggtaagtaatgacgaggtatcgcaatctatcaaccaacaaattgcatctacaatagatttatctatggctaattttaaagatacattagatgtaatgtttaaggaaaaggttgattggtttttaaggagtaggctaggtgcttttatggatgattatacattaaaagataaagcctataccactgttgatcaatctcctatagatccaatggggtctaaaaccagcggaatggtgttcacgaccggtcagaccgggtattatcccaccggtcagaccggctctcaggccggtccgaccgcgcaacatgacgcccgtcagaccgggccttgggccggtcagaccggcgcaattgtcccaatacagggtatacatccaatgactaatgctagttatttgtaccactttagaacatttgatcctcctgtatctactgctaccactaatcctcaagttcccccacatattcctaacatttataatgatgtttctaggggatatcttcccgatactaggcaaggccaatataatcatattgcgccacaaacccaacctattagaccaccaaacctaccaccaaatccacaagggcctaataacatggaagatatgattagcgatattatgaggaatggattcgggatcgaaactagaaatcgtgctagagcttacaaaaagccatatctcgattattatgataatgtgccgtttcctagaaattatagagttcccgaatttgccaaatttagtggtgaggatggtaagaccacatgggagcatgtaggtcaatttttagcgcaatgtggtgaggctaatagtgatacttttaaattgcgcttgttttctttatctttatctggtaatgcttttacatggtttacttctttaccggcaaattctattcatacttgggctcaattagaagaacaatttcatgattatttctatactggggaaactgagcttaggttatgtgatttaacatcggttaagcaaaagtataatgaatctgttgttgattatattaagagatttagagatgttagaaaccgatgttatactttgaatataactgatagagatttagccggtcttgcttttaatggtttagttgctcctcttagagaaaaactagatggccaacaatttcttgatgttagttaactcatgcaaagggctctggctcaagaaagccgggttaaggataataaaaaatttgctagaccattcgataaaagcctaatgttaatgtaattgattaccctgaggctagtgatagtgagaaggagggtgatcatgatatttatgttgccgaatggtcatggactaacaaaaataagccttttgtttgttctaacctgatgccgactcctcgcaaagatcggcaaagtgaagttaaatatagttttgaggtggccaagtataagatttttgattatcttttgcaagagaaacaaattagattacctaaaggccatgtcataccatcacaagaagagttgaaacgtcgagcatattgtaagtggcatgattctcattctcactctactaatgattgcaatttgtttcgacgacaggttcaatcggccatagatgaaggacgattgaaattcaccgatggctccaagatgaagcttgatcatgatccttttccggtgaatacaattaatttcaatgataaaaaggtgttgattcggccggagcaagccgaatctactaagggaaaggaagtggtcattggtgagccaaggcctaagatgatggtgccaaagaagccggagaagtgtgagaagcaaggtggtgagagggatcacaacaaagggaaaagaccaagatcacctcctagggagcgatttggtcattcaccaagacgatcgcgttcacctccatattttcatccacaagatatgtcatggggttcttatccaatgccgccgccgggttatccttatccttacttcatgccgtggggggcaacgccgccaatgtacaatcatatgcctccaatgcaattcaaccaaggatggggaggaccacggaggccaattcatgagcgtttgtcttcgccaaacaaaagccgattttatggtaaaaatcgggttaatgaagagaagagggaaggaaagcgcaccaaggtggaagaaaggacttcggaggtgattactatcaaaatagggtcccatgatgtgcctataccttctggagatggagttggaaagtccccaagcaaaaaatccgaagccggccggtctgaccgccgacctgacgacagtctgaccgacgcctcaggccggtctaaccgtgtgccacacgtcggtctgaccgacgcgtctggccggtctgaccggtggtctacagccggtctgaccgagctccagcgccggtttgatgagagggctgcaaagggcgatgtgagggcttcatcgtctccaagcaaggttaatagaggacattatttacctcctagaacagagccgaatcctaggtagatgcctaaggatttgacggctactcaaaagagaaggttgcaacgtcttcgagcccaagaactaagggagaaaaggaccgaagagcaaagagataaaaggttcaatgagttgcgaccaccaccgaagaaaatagaacaatcggttgataaaagtgaatcatctccaaaagaagacatggatatcaacatggtatgtatgttgcctatggagttttgtgctatggatgaagccgaggttgctcaattctcattaggtcctaaagacgcggtttttgagaagcccgatgaatcaaaccgtcacatgaagcctctctacctcaaaggccatgttgatgggaagccggtctctaggatgctagtggatggaggtgccgtactcgttgttcaagaagttggggcgcgaggatgatgagttgaagaagactaacatgattctcaatggcttcaacggtgaaccaacggaagcaaggggtatcttttcggcggagctcacagtgggaaacaagacgctaccaaccgctttcttcatcgtcgatgtgcaaggtaactacaatgttattttgggtcgttgttggattcatgccaattgttgtgtgccttctaccttgcatcaatgtttaatccaatgggacggcgatgatgttgaaattgtgcaagcggatacatcggctgaggttgcaatggccgatgctacttttgagtggcgtcatgggaatatccaatgtttatcggggagggatctttctaaggctagttttgagtggttacaaaagagggtgcaagaatatcagtctacgaagaacgatattggtgaaactgttgaagattttgatgaagtggagaagcttggacaagggtttgcatcggccgatccattggaggaagtagacataggtgatggaactaaaccaaggccaacttttgtaaacaaaaaaatgaaagccgattataaggttaagataatcgagctacttaaggagtatgttaatagctttgcatgggagtaccatgagatgccgggtcttagccgtgagcttgttgagcatcggattccaattaaaccgggttttatgccttataagcaaccacctcgtcgttttaatcctttattatatgaccgagtcaaagaggagattgatcggttattaaaggcgggagatttaaataaagccactcctaaagatgagtatcctatgcctatagccgacatgatgattaatgatgcctcgggtcataaggtgattagctttttagatggtaatgccggctacaatcaaatctttatggcggaggaggatatgtacaagacggcttttaggtgtccgggatttgtaggcttatttgagtgggttgttatgacttttgggttgaagaataccggtgcaacgtatcaaagggcaatgaatttgatcttccatgatttgctaggtattatcttagagatctatattgatgatattgttgtcaaatcagatggtatggaaggacatatagccgatttgagattagcttttgagaggatgcgccggtatagtttgaagatgaatccacttaaatgtgcttttggtgtgtcggcggggaagttcttaggattcatggtgcatgagagaggagttgagattgatcataagaagatagaaaaaattcgtgatttcaaagcaccgacatgtaagaaagaagttcaaagttgctaggtaaggtgaattatttgaggaggtttatttctaacctagaggggctagcatttaaatatacatttgcttgatgaaaatttgtatctccgaaatatagatggtgtcttgttgaagtgcttagatgaagatcaatctaaggtggctatgggagaggtacatgaaggaatttgtggaactcatcaatcggcccacaagatgaactggttgcttaaaagagcggggttttattggccgaggatgattgatgattgctttaaatattataggggatgcgaagcttgtcaacgattcggcaatgggcataggttcgtactagttgctacggattacttcaccaagtgggccgaagccgtgcctttgaagaatatgactcatacggaggtaattgactttattttcaggcatattgttcatagattcggtattccgcaaacattaactacggaccaaggtgtttcttttatgtctagggaagtgaatagttttaccgaatcttatggcattaaattgttgagttcttctccttactacgctcaggctaatggacaagccgagtcgagtaataagacattgttaaagctagtgaaaaagaagattgaggaacacccgaagaggtggcatgaggtgctttctgaagcattgtgggcgcataggatatctaaacatggtgccactaaagtcactccttttgagttggtttatggtcaagaagccgttttaccggtagaggtaaatcttgtttctcttcgttatatcaagcaagatgatttgtaaagtatttaacaaaaaacacttgaagacacaactcttgaagacgcaactgacactgcattggctcctatgacaacaataaacaaaaaatcaggatgtgacaccaaggcgtacaacaagagagtgaatgcaaaattgtttcaagttggagacttggtttgtaagacaattttgcctttgggtactcgatccaaggagtttggtaagtggtctcctgattgggaaggtccttatcgagtgtgcggcattgttcgagggaacgcatactttttggagacacttcaaggggagcgttttcaatgagcaatcaacgggaaatacttgaagaaatacttcccgagcgtttggcaagacgct

SEQ ID NO: 25939 - DNA, 3384 bp, Oryza sativa
  Clone ID: PAT_MRT4530_30777C.1
atgacgaagcctccatcaaccaaggcggaggtggatccatccaatgtgctgccggtgatgatggagagtcttgatgaggaagcacgcatggccttcgatgaacacatgaagaagtatgccgacgagcttttaaagacatgctcaaagacccgtcatggcgtagtcttcaagccggatttggtgtcttcatctacttttgacaaggtaagtattgaggaattatcacaatctcttcaacaacaagttgctcatacaatagatgcatctatggttgctttcaataacaaattagaagcatcttttgaaaataattgtgaaaaaacatttggtcctcctgtatctactgctgcaagtaatccccaagttcccccacatgttcctaatgcttataatgatgtttctagggggtatcctcctgatactaggcaaggccaatataatcatattgcgccacaacatcaacctattaggccaccaaatccaccaccaaatcaacataggcctgataatatagagcacttgattagtggaattattagggataaattcaggattgaagctaggaatcgtgctaaggtttaccaaaagccgtatcttgattactatgataatgtgccatatcctcgtaattatagggttcccgaatttaccaaatttagtggtgaggatagtaggactacatgggagcatagatttagagatgttagaaaccgatgttatagcttgaacataactgatagagatttggctgatcttgcttttaatggtttaattactcctattaaagagagattagatggccaacaatttattgatgttagtcaactcatgcaaaaggctctggctcaggaaagccgggttaaggataataaaaaatctgttagaccatatgagaaaaagcctaatgttaattcaattgattactttgaggctagtgatagtgatgatgagggtgatcatgacatatatgttgctgagtggacatggactaacaaaaataagccttttgtttgctctaatttaatgccgactcctcgtaaagatcggcaaagtgagattaagtataggtttgatgtggccaaatgtgataagatttttgattatcttttgcaagaaaaacaaattagattacctaaaggccatattgtcagggttcaatcggccatagatgaaggacaattgaagttcactgatggttccaagatgaagcttgatcatgatcctttttcggtgaatacaattaatttcaatgataagaaggtgttgattcggccggagcaagccgaatctactaaaggaaagggagtgatcattggtgaacctaggccaaagatgatagtgccaaagaaactggaggttggtgtatggaaggagaataggagtgaggcttcaacttctaaagcacctaggaagactaaagtgactttggacatgcttttggagaagtatgagaagcaaggtgaaaagagggaaggaaagcgtgttaaggtggaggcaaggacttcggaggtgattaccatcaaagtgggatctcatgatatgccaataccttctggagatggagttgggaagtcatcaagcaacaaatccgaaattgggaccagctcatcgcagttggccggtctaaccaggccctctggccggtctgaccgtagctctgcggaccggtcagaccgggccatcaggccgttttgtgctatggatgaagccgaggttgctcaattttcactaggtcctaaagatgcggtttttgagaagcccgatgaatcaaaccgtcatatgaagcctctctatctcaaaggtcatgttgatgggaagccagtctctaggatgctagtagatggaggtgtcgccgtgaacttaatgccgtattcattattcaagaagttggggcgtgaggataatgaattgaagaagaccaacatggttctcaatggcttcaatggtgaaccaatggaggcgaaaggtatcttttcggtggagctcaccgtgggaaacaacacactaccaaccgctttcttcatagtcgatgtgcaagaagctaatttagagtggttgcaaaagagggtgcaagaatatcggtctacaaagaacgatattggtgaaactattgaagattttgatgaagtagagaagcttggacaagggtttacatcggccgatccattggaggaaatagacataggtgatggaacaaagccaaggccgaattttgtaaacaaaaatatgagagccgattataaggttaaaataatcgagctacttaaggagtatgtggattgctttggatgggagtatcatgagatgccaggtcttagcctcaaagaggagattgatcggttgttgaaggcggggtttattaggccatgtcgttatgcggagtgggtttctagcatagtcctggtggagaagaaggggagtggtaagattagagtttgcatagattttagagatttaaataaagctactcccaaagatgtatatcctatgcctatagccgacatgatgatcaatgatgcctcgggtcataaggtgattagttttttggatggtaatgctggctacaatcaaatctttatggcggaagaagatatgtacaagacggcttttaggtgcccgggatttgttggtttgtttgagtgggttgtcatgacttttagattgaagaataccggtgcactatatcaaagggcaatgaatttgatctttcatgatttgctaggtattatcttagaaatctatattgatgatattgttgtcaaatcggatggtatgaagggacatatagccgatttgaggttagcttttgagaggatgcgccggtatggtttgaagatgaacccacttaaatgtgcttttggtgtgtcggcggggaggttcttgggattcatggtgcatgagagaggggttgagattgatcctaagaagatagaaaagattcgtgatttcaaagcgccgacatgcaagaaggaggtccaaaagttgctaggtaaggtgaattatttaagaagatttatttctaacttagcgggtaaaatcgatgcttttgttcctatactccgcttgaaaaaagaagccgattttacttggggggcaaaacaacaagaggcatttgaagggttgaagaagtatttatctactccacccgttgtgcgggcgcctaaagccggaaagcctttttggttgtatattgcttccgaggataaagtcattggtgctgttttgccgcaagaggaagatggcaaggagtatatcattacatatttcagctgccatcttttggatgccgaaacgagagcaaatgatttggcacaacaagcatctggctataatgtgaagaagggattatttctgatactagaagagccggtgcttgatttttaa

SEQ ID NO: 25940 - DNA, 656 bp, Oryza sativa
  unsure (1)..(656): unsure at all n locations
  Clone ID: PAT_MRT4530_30778C.1
cggtgaaggtgaaccagctgagctcgatcaagacgcagctgccctactcctactactccctccccttctgccgcccggccaccatcgtcgacagcgccgagaacctcggcgaggtcctccgcggcgaccgcatcgagaactccctctacgtgttcgagatgagggagccgaggctgtgccagatcgtctgcaaaaccgcgctgacccatcaggaggcgaaggatttcagggagaagatcgacgacgagtaccgcataaacatgattcttgacaaccttcctctggtcgtcccgatcaggagtttgttggatgatcacgacgcgcccacatcttatcagcttggcgtccatgtcggcatcaagggccagtacgccgggagtaatgaggagaagcacttcatctacaaccacttatcgtttctggtgaagtaccacagggatgagaacacggatcttgctaggatcgttgggtttgaggtcaaaccattcagtaccaagcatgaatatgatggcgaatggaaggagaatgagacccggctcaagacctgcgatccgcattcgcgacgcctcgtcgtcgactccgattcgcctcaagaagtagaggccggcaaagagatcatcttcacctatgatgttaactntgaggagagcgatatc

SEQ ID NO: 25941 - DNA, 1736 bp, Oryza sativa
  Clone ID: PAT_MRT4530_30779C.1
ggcacgtgggcgtcccccgcccctgtccatggaggacggcgatggggaggaaggcaccgccaagcgcgccaagctctccgccggcgacggcggcggcggcggcggcgaggaccgcctcagcgcgcttcccgacgacctgctcgtccaaatccttctccgggtagggacgagcgccgccgcgcggaccagcgtcctctcccggcgctggcgctccctctggtacctcctcccggagctcgatttcgtctccacagccgacgcccgcgccatccgcgccgccctcgcctaccatggagcgcctcccctccgcctcctcctcgtctccgccgtgggcgccaccgctggatccgtcgcggaatggctccccctcgccgcgcgccgcctctccggctatctagggcttctcaacgtggtgccgaagacgaagagagacgagggggagggcgccgccgctggagaagttcttgagctgccctgcttcgccagcgccgccaacctcgcgctggacctagggttcattgccgtcgccatgccgcgctccggcgtgttctcccggctcaccctcctctcactcgacaacgtccggttccaccgcccgtgcgacctcggcgacgccgtctcctcaccgcggtccccattcctgaagagactcaccatccagaatgcccatgggttgagcaatctcagcatccactcggagtctctcctgcagattcgtttggggggactgaaaggattgaagcagctcaatgtcgttgcgccggcactcggcgcgctatatgtgatctcctgcttctccgatcctctggctatgagtcaaccggtggccgacatctcagcccctcagctggagactctccactgggaggatgctttcgatccaagctccgtccggtttggcaacatggcaaatgtcaagtgtctgggaactcacttttatcttgcatttggacaagaggacttcggccacaatggcgattgtttaaggctgttgcagcgctttcagtttgatgccctcgaccgtctttccctcacgcttgcctatatgtcggaactaaatgaccttgaaaatgaatacttgatggaagaaatgacaatgctccctgacattatgttcctgggccttactgtattggcaagtggacatgccattggtcccagcgtattccatgttctgagaatgagcactagtataagaaggttggagctggcaacagatatttattctagtaatccgcaggcacgagctgcatgttcatcaagttgcacttgtgatcttccaccaaattggaaaactgaggaactaaagttggcattccttcatgaggtagaaatcaataacttcaggggaaccgaacatcaaattgctcttgtgaagcagctattcggttgggcagcaatgctgaaagacatgacaataaatttctgtcattcaatcactgagagcatggcaaggaagaagcttgaatttggaagttgattctctaggccagaaatactcatgaatttttacatttaccacaacgacatcaggttttgtatgttccagaggacaaatgcaccgcactaaacttgttgcttgattgtactcattttgctttccagtgttgtatactttggtatgaactgtattgcatgtaaacatcaaatggtaacagaatcctgtacaaggttagtgtcacaattctattacccatgataaagactttttatttggttaaaaaaaaaaaaaaaaa

SEQ ID NO: 25942 - DNA, 1999 bp, Oryza sativa
  Clone ID: PAT_MRT4530_3077C.1
acaccaccgttcacgggcgtccacgtcttcaccgaccggctggccttcgccgccgccgactggtgtttccgcctgcacggctggcctattatgccgcagctattgggcatctacgacttcaccgccggcctacctccgtcgccgccgactggtgtcctcgcctatacagttggtcggccacaccaccgttcatgggcatccacgtcttcaccgaccggcttgccttcgccgccgccgactggtgtctctgcctacacggctggccaattaagccgccgttggtgggcatcttcgctttcaccgaccggccgcctcgtccgccgctgactggtgtttccgcctgcatggctggcctttatgccgccgttgttgggcgtctacgacttcaccgaccggccgcctcgtccgctgccgactggtgtttccgcctgcacggttggccaattatgccgccgttgtcaagcgtctacgtcttcaccgaccggccgcctcgtccgccgccgactggtgtttccgcctgcacggctggcctttatgccgccgttgttgggcgtctacgtcttcaccgaccggccgcctcgtccgctgccgactagtgtttccgcctgcacggctggcctattatgccgcagttgtcgggcgtctacgtcttcaccgaccggccgcctcgtccgttgccgactggtgtttccgcctgcacggctggcctattatgccaccgttgtcgggcgtctacgtcttcaccgaccggccgcctcgtccgccgccgactggtgtttccgcctgcacggctggcctattatgccgccgttgttgggcgtctacgtcttcaccgaccggccgccttcaccgactggccgcctcgtccgccaccgactggtgtttccgcctgcacggctggcctattatgccgccgttgttgagcgtctacatcttcaccgaccggccgcatcgtccgcctgcacggctggcctattatgccgccgttgttgggcgtctacgtcttcaccgaccggcttgccttcgccgccgccaactggtgtctccgcctgcacaactggcctattatgccgccgttgttgggcgtctccgtcttcaacgaccggccgcctcgtgtgacgccaactagtgctatcgtcttcacggctagccatgtcgctgccaccgctaataagcgtcatcatcttcaacgcaagctatctacgtctgccgctaactggtttcttcacttccatggctgcatgattctgccagtgttgattggccttatcgtcttcatgccctcacctctacgtctggtttatacagctaccactactgatggacatcatcgtcttctgtcgccgactggttatgccgccgccgactggtgcttttatcttcacaactgtgcgtcttcactaccagtttgcttctgttgccgccgactcgtgttcacttcatcacggcaatgcaactttgtcgtcatggtagaacgacttcatctttattatcttcggcaccggcaaactctattgctgctacttcgcaagttttgctacttcaataacctcgacatctcggcatgcgatgccgtgttattttactacaacaagtagctctccaatattcaggatttctacttggacatcttcaacacatatcttcaatcaagcaatgactattcgacgacaagaagctacagttctcgactctatgttcagttgtttcccaactaatcaaagaacattctacttcaacaacttcaaatatttcggtttagacgagtcgggcaacaacatcaactctcctccaatatttcaccttcacggttgacctactatgcaaatgctgatgagcgtcttcgtcattatcattggttgtgacactgctattgactagatcgccgacattgtcatcttcatcatgtcagttgcgtttgtcgtcggtgactatttcctgcatcttcatgattggtggatttcgtcattgcctttgatgcgtgtctacatcttcaccg

SEQ ID NO: 25943 - DNA, 2328 bp, Oryza sativa
  Clone ID: PAT_MRT4530_30780C.1
tttttttgcctgtggttaaatcttcacttgtatcagaaaactttgtttaatgtaactatataggattacacatcaaaagctactagtacaacttgactaaactgtagatcccctgaagcatccggggataagagagcagcctaattaccaatttatcatgacctgattaacaaattaactcttatacatgctagtagtatctcgagcaagcacgttaatgacactgcattcatgcaagtgcaagtgtaattaagctctagtcgatcttgacggaggagtagatgagcctggtgaaccagaagcaggcgtagaagccgattgtgccggtgaggacgaagaaggcggcggaggcgatgagcatgtagccgaagtagagcacgccggagacgaccttggtgatgtcgagcttggtgaagaagtagaaggcggcgtagaggaagaggtagagcgccgacgagccggcggtgaggtacgacctccaccaccactcgtagtcctcgctgcagagctggaagtagcagagcacgacggcgatctcggcgcaggtgacgacgaggatggcgaagacgaggaagaggaagccaaagatgtagtagaattggtggagccagatggaggtgaggatgaagaagagctcgatgaacaccgcgccgaagggcaggatcccgccgatgagcaccgacatcgccgggttcatgtaccacggctgctcgggtatcggccgcgggatcttgttcgtccgcacggggtagtcctccgtcgccgccggccgcttgaacccgaggtagctcccgacgaacaccagcggcacggagatgccgaaccagagcagcaccagcgcggtcatggtggtgaacggcacggcgccggatgacctctcgccccagatgagcgcgttcaggacgaagaacacggcgaacgcggcgccggggaacgccagcgccgtcctcatcgccaccgccttccactccgaccccctgaaccccctgtacagccgcgccgccgcgtagccggcgagcacgcccatgaacgcccacaccagcagcatcgccgtcatgaggccgcccctgttcgatggcgagaggaggccgaggatggcgaacagcagcgtcaccagcagcatcccgaggaactgcaccccggtgccgacgaacacgcacagcgtgccggcgcgcgccggcggccggaacacgtcgccgtgcaccagcttccacccggtctcctcctgcgcctcctcctgcgtctccagctggttgtacttggagatgtcccggtacagcgtcctcagcatgatcatggccagcatcccggacaagaacagcacgatcatcagcgagttcacgatggagaaccagtggatctgatcatccgtcatcagcaggtagctgtcccaccgcgacgcccatttgatatcgctctcctcaaagttaacatcataggtgaagatgatctctttgccggcctctacttcttgaggcgaatcggagtcgacgacgaggcgtcgcgaatgcggatcgcaggtcttgagccgggtctcattctccttccattcgccatcatattcatgcttggtactgcgcaaatcgtcggaggtacatactaaactgatgttagtatgatcatcagagagctcaaacccaacgatcctagcaagatccgtgttctcatccctgtggtacttcaccagaaacgataagtggttgtagatgaagtgcttctcctcattactcccggcgtactggcccttgatgccgacatggacgccaagctgataagatgtgggcgcgtcgtgatcatccaacaaactcctgatcgggacgaccagaggaaggttgtcaagaatcatgtttatgcggtactcgtcgtcgatcttctccctgaaatccttcgcctcctgatgggtcagcgcggttttgcagacgatctggcacagcctcggctccctcatctcgaacacgtagagggagttctcgatgcggtcgccgcggaggacctcgccgaggttctcggcgctgtcgacgatggtggccgggcggcagaaggggagggagtagtaggagtagggcagctgcgtcttgatcgagctcagctggttcaccttcaccgccagctggtccttcttgcggaagtcgcggggggcgacgccggggaggtagaaccctcgggcggcgccggcgccggcgaggaccatgacgacgacgaggaggaggaggaggggcacctcgcgggtcgccatgggtgagacctcgtcgtcgtcgtcgtcggcaacctcggagctcacgaggaggaggaggagagtgcaagaggagggagagggagaagtcgtcg

SEQ ID NO: 25944 - DNA, 1194 bp, Oryza sativa
  Clone ID: PAT_MRT4530_30781C.1
tccccggggtgattagtccatctcaagatgatgaaaagccttctggcgatgttcctccccctactcacctttgcctcccatggcacatggtctgctgctgctgctgacagaagtcacaggagtactacagctcatctgaggcctcatctccatgttgaagaattgcatggcaagaagctcatggagattcaggtgccgaggaagcttggccatgaggtgaaggttcccaagagaatgggccatagctcacaagggtggccagcgctgacgccgctgggggcacgggcgccggccagggcagactgcaccacatgctcccgcccaacgggtagaacggcgcaccggcagttacgcgacggacgaatacggcaccgccgagactagctaccagcgatgacggcgtccagtccggcaatggcctctgttctttgctatcggtgttgcagctttcagatagttaaactgtgtgagtgtgtgtgtgtgttctgttgaggtaatagtatgttggatattggtgtggtgattgcggtttcacacaacttgtgcatgtagctaagtgagaattcaccatgcttcagttttatcttgcagtatctattaaaatgaatcgtttaattgtagcatgaaaaaaaaaatcaagatgattatctaagagattgcccccaagatggtgacagggaagccattgcaatttcgaagttcatgcaaaatttgaagcatctcgtaattaggttctcaaagctatctgttgttggcctcaacgcaatatcaggaggatgcaaggaattggaggttcttgacttgtatggctgcgcaaatttgacactcaggggtatacaacaggctacttctaatatgaagaacctgaaggaactagagaatcccaacttttacattcccaggtcctccttccacatggtcactgaaggcaagaagctcctggagattcaggtccccaggaagcttggccatgaggtgaagtttcccaagagaatggccatagctcacaagggtggcagcacgggcggcggctcgacaggcggcaccacaggcggcgccagcaatgtcaacagtggaccggccgacacgcggccgaggaaaaacgcggcggcgatgccagctccggcgacgacgacgtccatcctggcactggccttctccttcgccattgctgtctcagctttcagcttctga

SEQ ID NO: 25945 - DNA, 297 bp, Oryza sativa
  Clone ID: PAT_MRT4530_30782C.1
cgggaaggggaatatcagaaaactttctccaagatttccttcgttgggggaaaaattaaaaaaatggtttttcccctgaaaggcccattaaatcccacccaagctgcccaaaggggttatttttacagccccttccccccaccatttcaggaataaaaaaatttacccccctttccacctttcagtaagcagcacctggggcaacaaaaaaagggggatggggcacccggcagtgttcggagggcgacggggcccatttggcctttgatgggatacaaatccccatcggtttttccg

SEQ ID NO: 25946 - DNA, 335 bp, Oryza sativa
  Clone ID: PAT_MRT4530_30783C.1
gcaaaacattacattattcattgatcgctgcgatcactatctcgtgccatgcaacacagcaacgcggtgaccctactagctatgaggcaagccagataagcctagttgtgggcggcggtgaagatgctgcactgctggggctcaacccggcacatatacagaagctgcgccgcgtactgcctagccctgggcagcctcacgcgggtcatacccggctgctgttgctgctcgccgtaatagccctgctccgacgacccctggccgtaatacccctgctccgacgacgacccctcgtcgccgtattactcccacaacgacgacgaccagctcttgct

SEQ ID NO: 25947 - DNA, 423 bp, Oryza sativa
  Clone ID: PAT_MRT4530_30784C.1
atggctggccgcagggaatcctccagttcacccacggcgctgcttctgcttctgctgttgctgtttctgcatcatcttgccctgttaaaaagacacagtgcccttgttctttcgcaattgcaactagcatctccttctctacttctactcacttcacacctcagctcagctcatctcctgtcatctcagctcagctcagctcagagagagagagagagagctgcaggtacaggcgccgcggaagccaccgaggccggaaaggacgacgatgatggcgatggcgatggcggaggatgggtcggcgtcgtggtttcagtactcagaggagatgctcctgccgatgccgccgacgcccttctgcacaacgccggcagtcgccgccgtctgcgctctatggccccgcgtgccgcggacctgacctag

SEQ ID NO: 25948 - DNA, 660 bp, Oryza sativa
  Clone ID: PAT_MRT4530_30785C.1
atggacaccgaggacacgtcgtcggcttcgtcctcgtcggtgtcgccgccgtcgtcgccgggcggcgggcaccaccaccggctgccgccgaagcggcgggcggggcggaagaaattccgggagacgcggcacccggtgtaccgcggcgtgcgcgcgcgggcgggggggagcaggtgggtgtgcgaggtgcgcgagccgcaggcgcaggcgcgcatctggctcggcacctacccgacgccggagatggcggcgcgcgcgcacgacgtcgcggccatcgccctccgcggcgagcgcggcgccgagctcaacttcccggactccccctccacgctcccgcgcgcgcgcacggcgtcgcccgaggacatccgcctcgccgccgcgcaggccgccgagctgtaccgccgcccgccgccgccgctggcattgccggaggatccgcaggaaggcacgagcggcggcggcgccaccgccacctcggggcgtccggctgccgtgttcgtggacgaggacgccatcttcgacatgccggggctgatcgacgacatggcgagggggatgatgctgacgccgccggcgattgggagatctctcgacgactgggccgccatcgacgacgacgatgaccattaccacatggactacaagctatggatggactga

SEQ ID NO: 25949 - DNA, 340 bp, Oryza sativa
  Clone ID: PAT_MRT4530_30786C.1
ggccgcaaattttttttttttttttttcttttttttttttttttttttttttttttttttttttttttttttttttttttttttttctttttttttgttttttaaaaaaacgaggaaccccaatgtttggcatagtatcaaacgaaaaccccacccggaggcgcctacgggggggttgtattttaacctgggggggcctaaccagcaaaacaccaaaacttggagggacagattctggccgatatctcgagcataccgggggaaacatgggtacacactggaagagtaaaggacccgggtctttctccatggggagaaggagggcttcagcttcctcccc

SEQ ID NO: 25950 - DNA, 919 bp, Oryza sativa
  unsure (1)..(919): unsure at all n locations
  Clone ID: PAT_MRT4530_30787C.1
gcctctcgcccaaatcccaatcccgacggcaagcagaagtgcagaaccctcgccgccgccgccgccgccgccgccaccgactaccccatcgacgtcagaaattcaaatcccccctgtggcagtttgaacgtgtagtattttcttccatcaatccttttataagtgaaatgcttcttgtttcaaaatttaaacaatttccagcattttggcctggaagaagaaaggtttcatccacaggtttaatcagtccaataaacccccttaataccatatctgataagcatatgttcacctgacctatagttcctaaggttcaactcaaattgcgctgcttaattggccgatatggttatccctcctccagctagggctcctgcaatcaccaagttcctgaagccctatgttctcaagatgcatttcacaaacaactttgtgagcgcccaggtcatccacaccccatctgccacggttgcatgctcggcgagttcacaggagaagcttcttaggccaagcatggagtccacacgtgatgtcgccgcggcggcgaagatcgggaagctgcttggcgagcgcctgctgttcagaggcattcctgcggtgtcggtctccatgtcaagggaccagacgtaccatggcaaggtcagggccgtcatggattctcttagagccgccggtgtgaagttgctgtgatggaagccgaccatttgtagcatctctgcttgcagtttctgacatgtaaatatgttttgttgggtacgtactgccgtcctctgaaatttcattttagcttgcataatgtcgtccactgaaaaaaaaaaaaaaaagaactaaggagctgtttggttgggttttttttggccgggatctgtttaaggtggaatccgatactgttattttgtgaccaaaaaaaaanaaaaaa

SEQ ID NO: 25951 - DNA, 178 bp, Oryza sativa
  Clone ID: PAT_MRT4530_30788C.1
gctgatcattctcatcactacgccgtattgaagaatgcagatgatagatagagagccgatacatccgatctatgaccaacgcttactccatagggtgccagcttgctcggtagatctgaatattgcatgccatgccacatgctgtgatctgtaacgcttaccggatatcttgggtgca

SEQ ID NO: 25952 - DNA, 761 bp, Oryza sativa
  unsure (1)..(761): unsure at all n locations
  Clone ID: PAT_MRT4530_30789C.1
ttcggcacgaggcccactccccgatccccatcccctccgggctccggcggcgccgtctccgatcgccctcgactgagccggcggagaggctcgaggggagggaccccaccgggggaatccagctcggttcgacctgtcggcggcgggagcggccgccgtccacccatcgcagccggctcgacctggcttcagaagttcagatatggacacagggcgttcttcccagttgaccgagcgagtacggcgtatgcctgcttcctccaactctggccgtccccccctgcgtgtgctgttcgacgtcccggagccgtgggcggccaaggagctctgccgcctccgcatcgtctgccggccctggcggtcgctgacatctgatccccttttcatgaagacacacgtggctcaccaccgagagacgttcttcttggccagctttaaggatgacaagacgcacatccatatcatggattttgcaggcaatgtgattaagcagataggcataccagctggccacaaggtgttatgcacacgcctcgatctggtttgtgtagccacaaataagaacagctgccatgttcttaatcctgtcactggagatgtctacaacttgccaaagagtccagcagaggagcacacgtaccatgtcaatctgcgcaagcctttcacctcatttgcatttgggcatgttgcctcaacaggagagtacaaggngctccggatgttcaaccgtcctggatttacggaccttgggataccacagc

SEQ ID NO: 25953 - DNA, 3944 bp, Oryza sativa
  Clone ID: PAT_MRT4530_3078C.1
atgtttcgacagttggcgcgccagcaacaacgacttcaccaccggcctgcctccgtcgccgccgactggtgtcatcgcctatacggttggtcggtcacaccaccgttcatgggcgtccatgtcttcaccgaccggctggccttcgccgccgccgactggtgtttccgcctgcacggctggtctattatgccgccgctgttgggcgtctacgacttcaccaccggcctgcctccgtcaccgccgactggtgtcctcgcctatacggtcggttggtcacaccaccgttgatgggcatcgtcatctacaccgccggcctgcctccgtcgccgccgactggtgtccccgcctacacggtcggttggtcacaccaccgttgatgggcatcgtcatctacaccgccggcctgcctccgtcgccgccgactggtgtccccgcctacacggtcggttggtcacaccaccgttgatgggcatcgtcatctacaccgccggcctgcctccgtcgccgccgactggtgtccccgcctacacggtcggttggtcacaccaccgttgatgggcatcgtcatctacaccgccggcctgcctccgtcgccgccgactggtgtccccgcctacacggtcggttggtcacaccaccgttgatgggcatcgtcatctacaccgccggcctgcctccgtcgccgccgagtggtgcctccgcctacacggctggcctattatgccgctgctgttgggcgtctacgacttcaccgccggcttgcctccgtcgccgccgagtggtgcctccgcctacacggctggcctattatgccgctgctgttgggcgtctacgtcttcaccgccggcctgcctccgtcgccgccgattggtgcctccgtctacacggctggcctatatggttggttggtcacaccaccgtttttgggcgtctacgtcttcaccaccggcctgcctccgtcgccgccgactggtgcctccgcctacacggctggcctattatgccgctgctgttgggcgtctacgacttcgccgccgactggtgcctccgcctatatggttggttggtcacaccaccgttgttgggcgtctacgtcttcaccaccggcctgcctccgtcgccgccgactggtgcctccgcctacacggctggcctattattccgctgctgttgggcgtctacgtcttcaccgccggcctgtctccgtcgccgccgagtggatcctccgtctacacggctggcctattatgccgccgctgttgggcgtctacgacttcaccgccggcctgcctccgtcgccgccgagtggtgcctccgcctacacggctggcctattatgccgccgctgttgggcgtctacgacttcaccgccggcctgcctccgtcgccgccgagtggtgcctccgcctacacggctggcctattatgccgccgctgttgggcgtctacgacttcaccgccggcctgcctccgtcgccgccgagtggtgcctccgcctacacggctggcctattatgccgccgctgttgggcgtctacgacttcaccgccggcctgcctccgtcgccgccgagtggtgcctccgcctacacggctggcctattatgccgctgctgttgggcgtctacgacttcaccgccggcctgcctccgtcgccgccgagtggtgcctccgcctacacggctggcctattatgccgctgctgttgggcgtctacgacttcaccgccggcctgcctccgtcgccgccgagtggtgcctccgcctacacggctggcctattatgccgccgctgttgggcgtctacgacttcaccgccggcctgcctctgccgccactgactggtgttttcgcctatacggttggtggacttcgccgccgttaatgggcttcatcatctacaccactggcttggtttcactggcgccgactggtgtttttgtcaccattgatggactgctttattcccacatcggctacttctgctgtcatcgagggaatacgacaaagctaagtcatcatttattacctatcgagttatggagttctatcttcctatgctttccgtttggtttgccaatggatggttgcctttgggccgattcctagcacccgggggctcgttggatggaccgagtaacgcaaggtgctaagtattattcggaataaatcaaaagcatagagatgagataaatttattttcctatgactagtcggacagagcgtttaaacgtaatgaattatctgctcggggaaatcaaaattgacaagaggagaaatacatatttataaatattttaaaatacttgattttttctcgagtattatatttatatcagatactactcatcctatatgtttgttctgcagaatccagatccagatatgcataaaagggattcatggctttaagcttatctcttacgctccaggaatggatcagtcagaacatcaccaccggcttacctcgaccgccgccgactagtgtttccgcctgcacggctggcctattatgccgccgttgttgggcgtctacgtcttcaccgaccggcttgccttcgccgccgccgactggtgtttccgcctgcacggctggcctattatgccgccgttgttgggcgtctacgtcttcaccgaccggcttgccttcgccgccgccgactggtgtttccgcctgcacggctggcctttatgccgccgttgttgggcgtctacgtcttcaccgaccggcttgtcttcgccgctgccgactggtgtttccgcctgcacggctggcctttatgccgccgttgttgggcgtctacgtcttcaccgaccggccgcctcgaccgccgccgattggtgtttccgcttgcacggctggcctattatgccgccgttgttgggcgtctacgtcttcaccgaccagccgcctcgaccgccgccgattggtgttttccgcttgcacggctggcctattatgccgccgttgttgggcgtctacgtcttcaccgaccagccgcctcgaccgccgccgattggtgtttccgcctgcacggctggcctattatgctgccgttgttgggcgtctacgtcttcaccgaccggcttgccttcgccgccgccgactggtgtttccgcctgcacggctggcctattatgccgccgttgttgggcgtctacgtcttcaccgaccggcttgccttcgccgccgccgactggtgtttccgcctgcacggctggcctttatgccgccgttgttgggcgtctacgtgttcaccgaccggccgccgcatccgccgctgactggtgtcaccgcctgcacggctggcctgttataacgccaactgatgctatcttcttcacggctggctacatcgctgtcactactaataggcatcagtatcttcaacacaagctgcctacgtttgccatggctgccgactggtttcttcacttccatggctgcatgattctgccagtgttgattggccttaccatcttcatcgccggtcgtctcgtctgctgctgactagtgccctcgcctctacatctggtttatacagctaccactactgatggacatcatcgtcttccgccgccgactcgtgttatgccgccgccgactggtgcttttatcttcacaactgcgcgtcttcactaccggttcacttcatcatggcaacacaactttgtcatcatggtggagcgacttcatctttattatcttcggaaccagcaaactctattgctgctacttcacaagttttgctacatcaccaaccatgacgttgttgtgaatctcgacatctcggcatgcgatgccgtgttattttactacaacaagtggctctccaatattcaggatttctacttggacatcttcaacacatatcttcaatcaagcaatgactactcgacgacaagaagctataattctcgactctatgttcagttgtttcccaac

SEQ ID NO: 25954 - DNA, 502 bp, Oryza sativa
  Clone ID: PAT_MRT4530_30790C.1
gttttaacttcctccctctcgcccggttttccctcaaccccacagatcaccagccgccgccgccgcatcagggcatcgtcgccatttttgctgtgccctacgcccacgaggccacgagtggagttcgtcgccgacgccacaaccgaccgctcgcggcatccacgccgcacctccctgatcgtcaccaccgttgctccattgatctggtcggtaacgatggaggaggcagccttgagtgggaagcggtgaggttttaccatttttgcgcacgcggctagattgaaaggatgcaattaatgtgtcctggcaatcaggcaaatcatccatctccaagtccgaccgctgacgctcgatctgaatcctctgcctgaaaatgggctgctggccggtaaattaggcagttccagaggatagagcaggaagagagtcgggaccatgactcgcaaggattttcatatcatgggggtacacagtcaagttatgctgaggatggtgagcacct

SEQ ID NO: 25955 - DNA, 358 bp, Oryza sativa
  Clone ID: PAT_MRT4530_30791C.1
caaaaaaaccatggaggtcaataattaatcccccaaaggaaaaaaggctcccggccaaaggaagcccctagtttttaaccacccccccaaagccatcccccgggggggcttaagaacccaagggcccagtcccgggggcccagggaaacccaacccggaacaaaacccccccggcccaatgggggaggcccccgtggaaaacccccggggggttcgccgccgggccctcaaggccccttttcgggcggcgggggaacccctgggccagggggggcccaccatgggggggccgggccccccgggaaagccccccaccctggggggggggccgcgggccccggggcccaggggggggggc

SEQ ID NO: 25956 - DNA, 299 bp, Oryza sativa
  Clone ID: PAT_MRT4530_30792C.1
gtcggatctaattaatttacctcctccacctcctcctcctccccccgatcggatcggcccggctcctcctcctccgccgccgccaccgccgccgcagataggagaagatggccgcacttgaaccttcctcttacctcggagctggaacgagggccacctgacaagctctgcaccatctagatgctggctgagccgctcgcaggccctgcagaggcgttggagacgccagacaacaggaggcttggggacacacagctctgcttaaaatgcagaacatgcgacacgttggagtgagcgct

SEQ ID NO: 25957 - DNA, 300 bp, Oryza sativa
  Clone ID: PAT_MRT4530_30793C.1
gcggacacaaattcctccgtgcctggccagccacacatcacacgcgcgcgccggccaacttacgcttttcccctactcacgcggcgcctcaacgagccgcggcggaaggaaggatgaggagccttggcaaggaggatgggacgaggccccctgcggccgcagaggtggcgtcgaaaacaaggttgatggacctgaactggttcccaacgagcggggagatcatgcggaagctagtgtggtggcaaacgcccataggcatctagcgtcgaatggaattttgtataagcaggaccctgtgac

SEQ ID NO: 25958 - DNA, 430 bp, Oryza sativa
  Clone ID: PAT_MRT4530_30794C.1
ccacgcgtccggtcaagtcctcagctctcgtttggcatccaaagaagaattaggtgttattactagggtttagagaggtgttgattactagggtttagagagggaaaggaagggaagggctatggcggcgccgtggtgggactcggagtacaaggaccgctcctcgctggagtaccgcgtgtacgtcggcaacctgccctactccgtcgacgagcaaaccctcatggactacttcgccgactacggcgccatcagtgccgagatcgcttgggacagtgagatggggaggccacgcgggttcgggttcgtcaacttcgaggacaacgagtcggtgaacgccgccatccacggcatgaacggccaggacatcggcggccgcaacgtcaccgtcgcgcgggcccagacgcgcccccgccgctggagggcgtga

SEQ ID NO: 25959 - DNA, 5727 bp, Oryza sativa
  Clone ID: PAT_MRT4530_30795C.1
atgacgaagccgccatccaagacggaggtggagccatccaatgtgataccggtcacattggaggatatcgaaggagaggaccgcaaagctatggaggagtacatcaacgaactcacacgggaggcgttgatgagggcaagcactaggactcctcaaggcgtgatcatcaagcccgggccacgtcctaagcttgcccccgacttggtaagtaatgatgaggtaacacaatctatccaacaacaagtagcatctacaatagattcatctatgattgcttttaaagataagttagatgcaacttttgagggtaaatttgataagtttttaagggttaaattcggccctcttatggctgattacatgtcaaaggataaagcctctaccactgctaaccaacctcctatagatcaaacgggtagtaaaaccgatggaacggcgcacacggccggtctgaccgggcctgacgaccggtcagaccaggacttagccgtcggtccgaccggccaaacggccggtcagaccgggtattaccccggcggtcagaccggcactcaggccagtccgaccgcacctctggatgccagtcagaccgggccctgggccggtcagaccggcgcaattgttccgatacagggaatagatccaatgactaatgttggttatttgtatcatcttagaacatttgatcctcctgtatctagtgctacaagtagtccccaagttcccccacatgttcctaatgcttataatgatgttgctagggggtatcctcccgatactagacaaggccaatataatcatattgcgccacaaacacaacctattagaccacctaatccaccgccaaatcaacatgggcctaataatatggaggatataattagtgagattattaggaatagattcgggattgaaactaggaatcgtgctagggtttacaaaaagccgtatcctgactattatgataatgtgccatttccccgtaattatagagttcccgaatttaccaagtttagtggtgaggatagtgaaaccacatgggagcatgtaggtcaatttttggcacaatgtggtgaggctaatagtgatacttttaaattgcgcttgttttctttatctttgtctggtaatgcttttacatggtttacttctttaccggcaaattctattcatacttgcgctcaattagaagagaaatttcatgattatttctatactggagaaactgagcttaggttatgtgatttaacatcggttaaggaaaagtataatgagccagtcattgattatattaagagatttagggatgttagaaaccgatgttataccttgaatataactgatagagatttggctggtcttgcttttaatggtttaattgctcctcttagagaaagactagatggccaacaatttcttgatgttagtcaacttatgcaaagggctctggctcaggaaagccgggttaaggataataaaaaacttgttagatcatatgacaaaaagcccaatgttaatgcgattgattaccctgaggctagtgatagtgaggaagagggttatcatgatatatatgttgccgagtggtcatgtactaataaaaacaagccttttgtttgctctaacctaatgccgactcctcgcaaagatcgacaaagtgaggttcaatcggccatagatgaaggacgattgaagttcaccgatggctccaagatgaagcttgatcatgatccttttccgtatgagaaggaaggtggtttgagagctcgcaataaaggaaaaagaccaagattacctcctagggagcgatttggtcattcaccaagacagtcgcattcacctccatatcatcatccacaagatatgtcatggggttcttatccaatgccgccgccgggttatccttatccttattacatgccatggggggcaacgccgccaatgttcaatcatatgcctccaatgcaattcaaccaagggtgggaaggactaaggaggccaattcatgagcgtttgtcttcaccaaacaacggccggttttatggtaaaaatcgggctgatgaagaaagaaggaaaggaaagcacatcaaggtggaggcaaggacttcggaagtaattaccatcaaagtggggtctcatgatgtgccaataccttctggagatggagttggagtgtcctcaaatagaaaatctgaagccgataccagctcatcgcagtcggctagtctgaccgggccctctggccgcggtccgaccgacgcctcaggctggtctgaccgtgcgccaagtgtcggtctgaccggcgcatctggccggtctgatcgatggtctacggccggtctgaccgggctccagtgccggtttgacaggagaattgcaaagggcgatgtgagggcttcatcgtcttcaaacaaaattaatagggggcattatttacctcctggaacagagccgaatcctagatggatgcctaaggatttgatggctactcgaaagagaaggttgcaacgtcttggagctcatgaaataagagagaaaaaggccgaagaacaaagagataaaagattcaatgagtttcgaccaccaccggtatggaggcgtaaatccatagagaaggaaaagccggttgatgtagaagagaaggaggagcaattggttgataaaggtgaatcatctccaaaagaagacatggatatcaacatggtatgtatgttgtctatggagttttgtgctatggatgaagccgaggttgctcaattctcattaggtcctaaagacgcggtttttgagaagcccgatgagtcaaaccatcacatgaagcctctctatctcaaaggccatgttgatgggaaactggtctctaggatgctagtggatggaggtgccgccatgaacttgatgccgtactcattattcaagaagttggggcgtgaggatgatgagttgaagaagaccaacatgattctcaatggcttcaatggtgaaccaaaggaggcgaagggtatcttttcggcggagctcaccgtgggaaacaagacgctaccaaccgttttcttcatcgtcgatgtgcaagagtggttacaaaagagggtgcaagaatattggtctacaaagaacgatattggtgaagccgttgaaaattttgatgaagtggagaagcttggacaagggtttacatcggccgatccattggaggaagtagacataggtgatggaaccaaaccaaggccgacttttgtaaacaaaaatatgagagccgattataaggttgagataatcgagctacttaaagaatatgttgattgctttgcatgggaatatcatgagatgccgggtcttagcctcccggtggagaagaaggggagtggtaagaatagagtttgcatagattttagagatttaaataaagccactcccaaaaatgagtatcctatgcctatagccgacgtgatgattaatgatacctcgggtcataaggtgattagctttctagatggtaatgccggctacaatcaaatctttatggcggaagaggatatgtacaagacggcttttaggtgcccaggatttgttggtttgtttgagtgggttgtcatgacttttgggttgaagaataccggtgcaacatatcaaagggcaatgaatttgatctttcatgatttgttaggtattatcctagagatctacattgatgatattgttgtcaaatcggatggtatggaaggacacatagccgatttgaggttagcttttgagaggatgcgccggtatggtttgaagatgaacccacttaaatgtgcttttggtgtgtcggcgaggaagttcttaggattcatggtgcatgagagaggagttgagattgatcctaagaagatagagaagattcgtgatttcaaagcgccgacatgcaagaaggaagtacaaaagttgctaggtaaggtgaattatttgagaaggtttatttctaacctagcgggtaaaatcgatgcttttgttcctgtacttcgcttgaaaaaaaaagccgattttacttggagggcaaaacaacaagaggcgtttgaagagttgaagaggccaattctaagtgggagaattggcaagtgggcatatgctttgatagaatatgatttggcttatgaaccattgaaatctatgaaaggccaaattgtatgtgattttatagtggaccatcatgtagatattgcttatgaggaaaaggtctgcttagttgaagttatatcttggaagatttattttgatggttcttcttgcaaggaaggtcaaggcataggggtagttttgttttcacctaatggcatgtgttatgaagcatcggttcgtttggagtattattgtacaaataatcaagccgaatacaatgctttattattcggcttacaagttatggagatggttggagctaaatacgtggaggcttttggtgattcggaattggtggtacaacaagtcgccggagtctacaaatgcttggacggatcactaaataggtacctcgattcatgtttagatattattgccaattttgaaaattttgctattagatatatttctaggcatgataattctagagcaaatgacttggcacaacaagcatctggctataatgtgaaaaagggattatttctggtattagaagaaccggtgcttgattttaaatctttgtgcgaaattggcaaaactggagaccaggggcagtctgaccggcattgcatggccggtctgaccagtgaccaggggcggtctgaccggcctcatgccgttggtctaaccggcaaccccgagcggtctgaccggccctgtgtggccggtctgaccggttctgggcagagcgctggggggcacgtttcaatcaatttagaggccgaattaattgtgaattcggacgtttgtgcccaggaaacagaagaagattggagaattcctttgattcaatatttgaaagatcctacacttaaggttgatcagaaaattcggtggcaagcattcaaatatacattgcttgatggagatttgtatcgccgaaatatagatggtgtcttgttgaagtacttagatgaagatcaatctaaagtggctatgggagaggggcataggttcgtgctagttgctacgaattacttcaccaagtgggccgaagccatgcctttgaagaatatgactcatacggaggctaatggacaagccgagtcgagtaataagacattgttgaagttagtgaagaagaagattgaggaacacccaaagaggtggcatgaggtgctttccgaagaattgtgggcgcataggatatctaaacatggtgctactaaagtcactccttttgagttggtttatggtcaagaagccgttttaccggtggaggtaaatcttggttctcttcgttatatcaagcaagatgatttgtcaagtgaagattacaagacattgatgggagacaaccttgatgaagtcatcgacaagcgcttgaaggcattggaagagatagagaaagagaagaagagggtggccaaggcgtacaacaagagggtgaaagcaaagttgtttcaagttggagacttggtttggaagacaattttgcctttgggtactcgatccaaggagttcggtaagtggtctcctagttgggagggtccttatcgagtgtgcggatttgttcgaggaaacgcatactttttggagacacttcaaggggagcgttttcagtga

SEQ ID NO: 25960 - DNA, 3425 bp, Oryza sativa
  Clone ID: PAT_MRT4530_30796C.1
atggatatcaacatggtatgtatgttgcctatggaattttttgctatggatgaagccgaggttgctcacttttcactaggtcctaaagatgcagtttttgagaagcccgatgaatcaaaccgtcatatgaagcctctctatctcaaaggtcatattgatggaaagccggtctctaggatgcttgtggatggaggtgccactgtgaatttgatgccatactcgttgttcaagaagttggggcatggagatgatgagttgaagaagactaacatgattctcaatggcttcaatggtgaaccaacggaggcaaagggtatcttttcagcggagcttaccgtggggaacaagacgttaccaaccgctttcttcatcgtcgatgtgcaagagactaatttagagtggttacaaaagagggtgcaagaatatcggtctacaaagaacgatattggtgaaactattgaagattttgatgaagtggagaagcttggacaagggtttatatcggccgatccattggaggaagtagacataggtgatggaaccaaaccaaggctgacttttgtaaacaaaaatatgagagtcgattataaggttaagataatcgagctacttaaagagtatgttgattgctttgcatgggagtaccatgagatgccgggtcttagccgtgagcatgttgagcatcggcttccaattaaaccgggttttaggccttataagcaaccacctcgtcgttttaatcctttgctatatgaccgagtcaaagaggagattgatcggttgttgaaggcggggtttattaggccatgtcgttatacggagtgggtttctagcatagtcccggtggagaagaaggggagtggtaagattagagtttgcatagattttagagatttaaataaagccactcccaaagatgagtatcttatgcctatagccgacatgatgattaatgatgcctcgggtcataaggtgattagctttctagatggtattatcttagagatctacattgatgatattgttgtcaaatcggatagaatggaaggacacatagccgatttgaggttagcttttgagagaatgcgccggtatggtttaaagatgaacccacttaagtgtgcttttggtgtgtcggcagggaagttcttaggattcatggtgcatgagagaggagttgagattgatcctaagaagatagaaaaaattcgtgatttcaaatcaccgacatgcaaaaaggaagttcaaaagttgctaggaaaggtgaattatttgagaagatttatttctaatctagcgggtaaaatcgatgcttttgttcctatacttcgcttgagaaaggaagccgattttacttggggagcaaaacagcaagaggcgtttgaagggttgaaaaggtatttgtctactccacctgttgtgcgggtgcctaaagccagaaagccttttcggttatatattgcctccgaagacaaagtcattggtgccgttttgacgcaagaggaagatggcaaggagtatatttttacatatttgagccgccgtcttttggatgccgaaacaaggtatgtctttatagagagactttgtctatgcttgtaccaaattgaggcattatttgttatctagtacatgcatagttgcttgtcaagccgatgttattaaacacatgttgcaaaggtcaattttaagtgggagaattggtaagtgggcatatgctttgattgaatatgatttgtcttatgaaccgttgaaatctatgagaggccaaattgtatgtgattttatagtagatcatcatgtagatattgcttatgagaaaaaagtttgctcagttgaagttatactttggatgatttattttgatggttcttcttgcaaagaaggtcaaggcataggggtagttttgttttcacctaatggcatgtgttatgaggcatcggttcgtttggaatattattgtacaaataatcaagccgaatatgatgctttattattcggcttacaagtgatggagatgattggagctaagcacgtggaagcgtttagtgattcggaattgatagtgcaacaagttgccggagtctacaaatgcttggacggatcactaaataggtatcttgactcatgcttggatattattgccaattttgataattttgctattagatatattgctaggcatgataattctagagcaaatgatttggcacaacaagcatctggctataatgtgaagaagggattatttctggtattagaagtgtcgatgcttgattttaagtctttgtgcaaaattggtaaaactggagaccagaggcggtctgaccggtgaccaggggcggtctgaccagccacatgccgccaatctgaccggccaccccgggcggtctgaccggccttgcacggccggtctgaccggttctggacagagcactggggggcacgccacaattgattcaaaggccgaattaattgtaaattcggacatttgtgcccaagatacagaagaagattggagaattccttttattagatatttgaaagatcctacacttaaggttgatcggaaaatttggcggcaagcgttcaaatacacattgcttgatgaagatttatatcgccgaaataaaaatggtgtcttattgaagtgtttagatgaagatcaatctaaagtggctatgggagagaggcataggttcgtgctagttgctacggattacttcactaagtgggccaaagccgtgctgctcaagaatatgacttatatggaggtaattgactttattttgaagcatattactcatagattcggtattccgcaaacattaactacggatcaaaccgagtcgagtaataagacgttgttgaagctagtgaagaagaatattgaagaacacccaaagaagtggcatgaggtgctttccgaagcattgtgagcgcataggatatctatacatggtgccactaaaatcactccttttgagttggtttatggtcaagaagccgttttaccggttgaggtaaatcttggttctcttagttatatcaagcaagatgatttgtcaagtgaagattacaagacattgatgggagacaaccttgatgaagtcatcgacaaacgcttgaaggctttggaagagatagagaaagagaagaagagggtggccaaggcgtaccacaaaagggtgaaagtgaagttgtttcaagttggagacttggtttggaagacagttttgcctttgggtactcgatccagggagttcgattcacgttgttcatcaaaaaggcaagggggcatatgtttacacccaaatttggcacctaggattaaaataggaaaaattgccaaagtttagaagtctaccgatttcctccgagtaggctggtctgaccgccgtgtgttggccggtcagaccgccggt

SEQ ID NO: 25961 - DNA, 730 bp, Oryza sativa
  unsure (1)..(730): unsure at all n locations
  Clone ID: PAT_MRT4530_30797C.1
gcaaacaaagcttaccttccttctctctctctctctctctctgaactctctgaaattagagacgatgaagtgcagcagagtcagattagttcttgtgatggtttctctgcaggccatgatcgccatgctgccagatggagcaggagcacaaaatggagatgggagtaggtgcagcaaggtgaggtgcgggatggggagctgcagcgagtcgagcgactacgtgttcgggttcgcgtgcaggtgcaaccccgggtggagccgctaccacctcggcaacctgcagttccccttcctcccatgtgtcatacccaactgcaccatcaactactcgtgccagaacgggtcgtcgtcgccgtcgccgtcgccgccaccgccacctcctccgccgccggcgatgccgtcgctgacgaacctctccatctacgacccttgcctcctccagtactgcggcgacggcggcagctgcgagaggtcgtcggagttcggccaccgctgcgcctgccacgacggcttccagaaccttctcaacgacacctcctacccttgctaccggcagtgttcgcttgggtcggactgctccggcctggggatcagcatgttcaacgggtcgcacggngggacggcgccgccggcgccggtctcgttcaccgtcaagaagtccggcgtgctgctccacctcctcctcgtgctggtctcctccttcatgataggatgaacagcagagcacagc

SEQ ID NO: 25962 - DNA, 7184 bp, Oryza sativa
  Clone ID: PAT_MRT4530_30798C.1
atgacgaagcagtcgtcatccaagacggaggtggagccgaccaatgtgataccaatcacattggatgactttgaaggggaagattgcaagtccatgaaggagtacattaaggagatcacacaagaggcgttgatgagggcgtgcactaggactcgtcaaggcatgatcatcaagcccgggccacgtcctaagctcactctcgatttggtaagcaatgaagaggtaacacaatctatccaacaacaagttgcatctacaatagattcatccatgattatttttaaaaataagttagatgcaactattgaaggtcgatttgatgagtttttaagaactaaattcggccctctcatggccgattttatgttaaaagataaagcctctaccagtgctagccaagctcctatagatcaaacgagtaggagaaccgatggagcggcgcagacagccggtccgaccgggcctgatggccgatcagaccggatattaccccggcggttagaccgggactcaggccggtctgaccgcgcctctggacgtcggtcagatcgggccttggaccgaacatttgattctcctgtatctactgttgcaactaattcccaagttcccccacatgttcctaatgcttataatgatgttgctagggggtatcctcccgatactaggcaaggccaatataatcatattacgccgcaaacacaacctattaggccaccaaatccaccaccaaatcaacataggcctgataatatggaggaaataattagtgggattattagggataaattcgggattgaagctaggaatcgtgctaaggtttaccaaaagccgtatcctgattattatgataatgtgccatttcctcgtggttatagagttcccgaatttaccaagtttagtggtgaagatagtaggaccacatgggagcatagatttagggatgttagaaaccgatgttatagcttgaatataactgatagagatttggctggtcttacttttaatggtttaattgctcctcttagagaaaggttagatggccaacaatttcttgatgttagtcaacttatgcaaaaggctctggctcaggaaagccgggttaaggataataaaaaatttgttagaccatatgagaaaaagcctaatgttaatttgattgattaccctgaggctagtgatagtgagggtgagggtgatcatgatatgtatgttgctgagtggtcatggactaacaaaaacaagccttttgtttgctctaatctaatgccaactcctcgcaaagattggcaaagtgaggttcaatcggccatagatgaaggacgattgaagttcaccgatagttccaagatgaagcttgatcatgatccttttccggtgaatacaattaatttcaatgataagaagatgttgattcggccggagcaagccgaatctactaagggaaaaggagtggtcattggtgaaccgaggccaaagatgatagtgccaaagaagccggagaaccgggccaatgaagaaaagagggaaggaaagcgtattacggtggaggcaaggacttcggaagtgattaccatcaaagtggggtctcatgatgtgccaataccttctggagatgaagttggagagtcctcaagcaacaaacccaaagccggtaccagctcatcgcagtcggccggtctgactaggccctctggccggtctgaccgcagccatacggccggtctgaccggaccatctggccagtctgaccgtcggcctaatgacggtccgaccgatgctccaggccggtctgacagccggcatcatgtcggtccaaccggcgcccctggccggtctgaccgatggtctaagtccggtctgaccgggctccagcaccggttcgatgggagatttacaaagggtagtgcggggacttcatcgtcttcaagcagacctaacagggggcattatttacctcctggaacagagccgaaacctaggaggttcaatgagttgcgaccaccaccggtttggaggcgtaaatccgtagagaaggaagaaccgattgttgtagagaagaaggaaaaacaatcggttgataaagatgagtcatctctaaaagaagacatggatatcaacatggtatgtatgttgcctatggagttttgtgctgtggatgaagccgaagttgctcaattttcactaggtcctaaagatgcggtttttgaaaagcccgatgagtcaaaccgtcatatgaaacctctctatctcaagggtcatattgatgggaagccggtctctagaatgctagtggatggaggtgccgccgtgaatttgatgctgtattcattgttcaagaagatggggcgtggagttgatgagttgaagaagaccaacatgattctcaatggcttcaatgatgaaccaacggaggcgaagggtatcttttcggtggagcttaccgtgggaaacaagacactaccaaccgctttcttcatcgtcgatgtgcaagattttgataaagtggagaagcttggacaagggtttacatcggccgatccattgaaagaagtagatataggtaatggaactaaaccaaggccgacttttgtaaacaaaaatatgagagccgattataaggttaagataatcaagctactcaaagagtatgttgattgctttgcatggaagtatcatgagatgccgggtcttagccgtgagcttgttgagcatcggcttccaattaaaccgggttttaggccttataagcaaccacctcgtcattttaatcctttgctatatgaccgagtcaaagaggagattgatcggttgttgaaggcggggtttattaggccatgccgttatgcggagtgggtttctagcatagtctcggtggagaagaaggggagtggtaagattagagtttgcatagactttagagatttaaataaagctactcccaaagatgaatatcctatgcctatagccgacatgatgatcaatgatgcctcgggtcataagaacgccggtgcaacatatcaaagggcaatgaatttgatcttccatgatttactaggtattatcttagaaatctacattgatgatattgttgtcaaatcagatggtatggagggacatatagccgatttgaggttagcttttgagaggatgcgccagtatggtttgaagatgaacccacttaaatgtgcttttggtgtgtcggcggggagattcttaggattcatggtgcatgagagaggagttgagatttaccctaagaagatagaaaaaattcgtgatttcaaagcgccgatatgtaagaaggaagttcaaaagttgctaggtatggtgaattatttgagaagatttatttttaacctagcgggtaaaatcgatgcttttgttcctatacttcatttgaagaaggaagccgattttacttggggggcaaaacaacaagaagcgtttgaggagttgaagaggtatttatctactccacccgttgtgcgggcgcctaaagccggaaagcctattcggttatatattgcctctgaagacaaagtcattggtgccgttttgacgcaagaggaagatggcaaggtatatattattacatatttgagccgccatcttttggatgccgaaacgaggccaattctaagtgggagaattggcaagtgggcatatgctttgataaaatatgatttggcttatgaaccattgaaatctatgagaggccaaattgcatgtgattttatagtagaccatcatgtagatattgcttatgaggaagatgtttgcctagttgaagttataccttggaagatttattttgatggttcttcttgtaaagaaggtcaaggcataggggtagttttgttttcacctaatggcatgtgttatgaagcatcggttcgtttggaatattattgtacaaataatcaagcagaatacaatgctttattattcgacttacaagtcatggagatggttggagctaagtacgtggaagcttttggtgattcggaattggtggtgcaacaagtcgccgaagtttataaatgcttggacggatcactaaataggtaccttgattcatgtttggatattattgccaattttgataattttgctattaggcatattgctaggcatgataattctagagcaaatgatttggcacaacaagcatctggctatgatgtgaagaagggattgtttctgctatttgaagagccgatgcttgattttaaatttttgtgcgaaattggcgaaattggagaccaggggcggtctgaccggcgttgcgcggccggtctgaccggtgaccaagtgcagtctgaccggccacatgccgccgatctgaccggcgaccccgggcgatctgaccggccttgtatggccggtctgactggttctgggcagggcgctggggggcatgccacaatcaatttagaggccaaattaattgtgaattcggacatttgtgcccaggaaacagaagaggattggagaattccattgattcgatatttgaaagatcccacacttaaggttgattggaaaattcggcggcaagcgttcaaatacacattgcttgatgaagatctatatcgccaaaatatagatgatgtcttgttgaagtgcctagatgaagatcaatctaaagtggctatgggagaggggcataggtttgtgctagttgctatggattacttcaccaagtgggccgaagtcgtgccgctgaaaaatatgactcatacggagataattgactttattttgaagcatattattcatagattcggtatcccgcaaacattaactatggatcaagccaagtcgagtaataagacattattgaagctaataaaaaagaagattgaggagcacccaaagaggtggcatgaagtgctttccgaagcattgtgggcgcataggatatctaaacatggtgccaccaaagtcactccttttgagttggtttatggtcaagaagccattttaccggttgaggtaaatcttggttctcttcgttatatcaagcaagatgatttgtcaggtgaagattacaagacattgatgggagacaaccttgatgaagtcatcgataagcgcttgaaggctttggaagagatagaaaacgagaagaagagggtggctaaggcgtacaacaaaagggtgaaagtaaagttgtttcaagttggagacttggtttggaagacaattttgtctttgggtactcgattcagggagttcgattcacgttattcatcaaaaaggcagaggggcatgtgtttacacccaaatttggcatctaaggttaaaataggaaaggttgccaaaatttggaagtctaccggtttccttcgagtgggccgctcaaccctccccatgccccatgttagatccgccgctgaaagggacaatggctctggtggtgatgtcaccccgggaactccaagcccgacccatggtgcccgtgtgaggcagcggaagcgctccagcgatgctccatctgacgtgaacaaaaccaatggcgctaatttgctgctaaatgaccagaacaagtacaagtcaatgcttattcgcacgtattcttcgctctggatgatggcaggatttgtgtttttgatatacatgggacatctatacatatgggctatggttgtcgttatccaaatctttatggcgagtgagctcttcaatctgctgaggaaggccaacgaggacaggcagcttccagggttcagactacttaactggcatttcttcttcactgcgatgctttttgcgtatggccgtttccttagtcggcagcttgtcaacacggtgacttcagacaagttattgtacaagcttgtgagtggcttgatcaagtaccaaatgtttatttgctactttctttatatagcagggtttgtatggtttattctcactctaaagaaaaaggcgtacaagtatcaattcagtcaatatgcatggactcacatgatcctattgatgcttgctaatttcatgggtcatttccagtggttaacatgccccagaaagctcaagaccgagaaacttgtgcaaaacaacacaatagaacaaccaataactcagaaactgaccagtaagccctcgctgccacttgttgctgcttatgggctgcagatggtggaaggtgatgcagtgggcatgggaggaattgggcaagatgtgggtggtggtggtgggcttggtgactcaggggagtggaagaagttagtcgatgcggaaggggaatatgtccagtatggtgacagtagcggtatttctgcaaaaaaattagctcactctttggatttgtcgactggatggcttcattgtgatcctggctctatatttacaccagaaagttatgatttaccaggatggatcccttggcgagaagtggcaattatgcctattcagtggcatgccttagctcttggcttgtttgcttcaataatagcaccatttggagggtttttcgctagtggttttaaaagagctttcaaattcaaggattttggtgatagcatacctggccatggtggatttactgacaggatggattgtcaaatggttatggctgtgtttgcttatatctattaccaatcgtttgtgatggtacaggacttatctgttgagacaatcatggagcagatactgagaaatctcacgttcgaggagcagcatgatctttacgagcaactaggcaagttactgacgagagggaactgatgctaacatagagacatcatgcacgaaatcaacaggactatgtgcattgttttttttacttttagatcatcatgtacagccctaacaccctaaaaacaaaagaatgataacgcttaggattgtttttttttttcctcgatcgatgtaagggtatgatgttttccgagtatacaggagtttgttcttgccttctctttgtatttttctttcggttttcatctttgtggctgcatgagaaggcaaatgaaggcccagtagcaaactagcagccatgacattttttttttctttcttgtcgtcgatgggttcttgacttcttgtactttgtagaacgatattaatcccattatttccttgctttatgggtgcactaacctaaaaaaaaaaaaaaaaaaaaaaactcgagggggggcccggtacccaattcgccctatagtgagtcgtatacaatt

SEQ ID NO: 25963 - DNA, 446 bp, Oryza sativa
  unsure (1)..(446): unsure at all n locations
  Clone ID: PAT_MRT4530_30799C.1
cgacnantatccgaattattcaagaaattcaagaagtgaacagaggaggaaaggaaacatggcttcgtttgcatccacggcggcgccttggggatgcgtcgccggagctcggcgtggcggcggcggcggcgggcggtgtggggtgcgcgcgtccgcggcgctggcggtggcggcgccggcggcgaggacgcactacgaggtgctcggggtcggggcgggcgcgagcaggggggagatcaaggcggcgtaccggcgtctggcgagggaggtgcacccggacgccggcgccacgggggacgaggacttcatacggctccacgccgcgtacgccacgctcgccgaccccgacgagcgcgcgcgttacctgaataagcatttctagccggcggcgtcggcgttccggcgggcngcccgcgtcgtcgttccggcggcggacgtggnaaacg

SEQ ID NO: 25964 - DNA, 751 bp, Oryza sativa
  Clone ID: PAT_MRT4530_3079C.1
cctgttcaggggcgacggctaaaggacatagcaccactagtctacgcgattgcaaaaaagaagaatgcaagcctgcaacaagtatcgctttcccgaccaatggttggttgacctcggtttgccggtaacctcaggctggacgacagaactaattagccaacttgtcaatgtctagggtgctgttcatagcctgcagttgacagagtacgaaaaggacaagatcacatggaagctaactagtcacggcgaatacatgacgacatcggcctacaacgcacaacttcttggcataaaagcttcaatttcaatgcccctatctggaagccctaggcgccgcgcaaatgtaaaacattcgcttcgcttggcttgttatccaaaatagagtatggacctccgacagattggcaacccgtgggtaatcgaaaatggctccatctgcccctttgtcgaaggaatcaggaaacggccctcacctcctggcggagtgtagatatgtgaaagaatctaggcgacacttgcagactggacaacatgtgaacaaataagaccaacgttatggcaacaagcctcgacgctactcaagtggtgggaggccaccgcatgttccaacgaagcgccaaagaaagccttgcagactctaatgctattagtcgcctaggatatttggaatgaaaggaaccgcagagtttttcagcaccaagagcttccggtggctagtctgatagccaaaattaaggaggatgccaaaaca

SEQ ID NO: 25965 - DNA, 399 bp, Oryza sativa
  Clone ID: PAT_MRT4530_307C.1
atggagggcccgctgtcagccacgaactgctccacgatcacagcaaattgccatgggaactcgacaggcttcttgacggaggcactcgacgcgcgccccacgctcctgggaggaggtgctctagaccctgtggcacaggaactcatccatcatgcgcgacatggcgacgcggagggcactgttgaggcggctgcttcgtactcctgctcgcaccagccgccaccggtgtcttccgctgcggcaccgtggaatccgttcggccccggtggcgatacagacgacgcgggacaggatgggatcaaggagattgtgtcgggtggtgttggtgttggcaccaacggcagcttcgtgtttggtggtgccgctcccgctacgagtcagcaagctcccgtggagtag

SEQ ID NO: 25966 - DNA, 1164 bp, Oryza sativa
  Clone ID: PAT_MRT4530_30800C.1
atgcttccgggggtggagctggcgaggcggcggcgggtgcactaccacggcgacggggcggcggcgggggcagggtttggggagcaccaccacgggcactacaactacttccaccagcagcaccaccgtcaggcggtggcgagcgcggaggcgggggcgggcgcagggggcgaggtgagccccgcggtggcggcgcgcatccggctcgaggagaagctgcggggcgccgcggccgcgccctcgtcgtctctctcgagacaacagaacaaccagcaagagcagcagattcagctgcccactgaacccaggcctactcccaaacattcgatgaccatgctggaggcgccatcaacaagaaaagccccccgccgcgagatgaggaggacactttccaaggccgatctctgcgctgtgtgcctcgacgaagtgcgggagcgacaccagcgggtcaccaggctaccctgctcccacaagtaccactcggagtgcgtcctcccctggctggccatccaaccagactgcccctgctgcaggacgcaggccatgatcgccatgctgccagatggagcaggagcacaaaatggagatgggagtaggtgcagcaaggtgaggtgcgggatggggagctgcagcgagtcgagcgactacgtgttcgggttcgcgtgcaggtgcaaccccgggtggagccgctaccacctcggcaacctgcagttccccttcctcccatgcaccatcaactactcgtgccagaacgggtcgtcgtcgccgtcgccgtcgccgccaccgccacctcctccgccgccggcgatgccgtcgctgacgaacctctccatctacgacccttgcctcctccagtactgcggcgacggcggcagctgcgagaggtcgtcggagttcggccaccgctgcgcctgccacgacggcttccagaaccttctcaacgacacctcctacccttgctaccggcagtgttcgcttgggtcggactgctccggcctggggatcagcatgttcaacgggtcgcagccggggacggcgccgccggcgccgttctcgttcaccgtcaagaagtccggcgccgccgcctcctcccttctgccggccggcggcggcgtgctgctccacctcctcctcgtgctggtctcctccttcatgataggatga

SEQ ID NO: 25967 - DNA, 5811 bp, Oryza sativa
  Clone ID: PAT_MRT4530_30801C.1
atgatgccagtcaccttggataaattcgaaggagaagaccgtaaagctatggaggagtacatcaacgaactcacacgggaggcattgatgagggcaagcactaggactcgtcaaggtgtgaccatcaagcccgggccacgtcctaagctcgctcctgacttggtaagtaatgatgaggtaacacaatctatccaacaacaagtagcatctacaatagattcatctatgattgcttttaaagataagttagatgcaacttttgaggataaatttgatgagtttttaagggttaaattcggccctcttatggccaattacatgtcaaaaaataaagcctctaccactgctaaccaacctcctatagatcaaacgggtagtaaaaccgatgaagcggcgcatgcggccggtctgaccgggcctgacggccggtcagaccaggacttagccgtcggtccaaccggccaaacggtcggtcagaccggcactcaagccagtgccggtccgaccgcgcctctggatgccggtcagaccgggccttgggccggtcacaccggtgcaattgttccgatacaaggaatacatccaatgactaatgctggttatttgtatcatcttagaacatttgatcctcctgtatctactgctgcaagtagtccccaggttcccccacatgttcctaatgcttataatgatgttgctagggggtatccccccgatactagacaaggccaatataatcatattgcgccacaaacacaatctattaggccactgaatccaccgccaagtcaacatgggcctaataatatagaggatataattagtgagattattaggaatagattcgggattgaaactaggaatcgtgctagggtttacaaaaagccgtatcctgattattatgatgatgtgccgtttccccgtaattttagagttcccgaatttaccaagtttagtggtgaggatagtaagaccacatgggagcatgtagatcaatttttggcacaatgtggtgaggttaatagtgatacttttaaattgcgcttgttttctttatctttgtccggtaatgcttttacatggtttacttctttaccggcaaattctattcatacttgggctcaactagaagaaaaatttcatgattatttctatactggagaaactgagcttaggttatgtgatttaacatcggttaagcaaaaatataatgaatctgtcattgattatattaagagatttagagatgttagaaaccgatgttataccttgaatataactgatagagatttggctagtcttgcttttaatggtttaattgctcctcttagagaaagattagatggccaacaatttcttgatgttagtcaacttatgcatagagctctggctcaagaaagccgggttaaggataataaaaaacttgttagaccatatgacaaaaggcctaatgttaatgtggttgattaccctgaggctagtgatagtgaggaggagggtgatcatgatatatatgttgccgaatggtcatggactaataaaaataagccttttgtttgttctaacctaatgccaactcctcgcaaagatcgacaaagtgaatttaaatatagttttgatgtggccaagtgtgataagatttttgattatcttttgcaagaaaaacaaattagattacctaaaggccatgtcataccatctcaagaagagttgaaacgtcgtgcatattataaatggcatgattctcattctcattctattaatgattgcaatgtgtttcgacgacaggttcaatcggccatagatgaaggacgattgaagttcaccgatggctccaagatgaagcttgatcatgatcctttttcggtgaatacaattaatttcaatgataaaaaggtgttgattcggctggagcaagccgaatctactaagggaaaaggagtggtcattggcgaaccaagacctaagatgatagtgccaaagaagccggaggttggcgtttggaaggaaaataagaatgaagcttcaacttctaaagcccctaggaagaccaaagtgacttttgacatgcttttggaaaagtatgagaaacaaggtggtgagagagctcgaaataaaggaaaaagaccaagatcacctcctagggagcgatttggttattcaccaagacggtcgcattcacctccatatcatcatccacaagacatgtcatggggttcttatccaatgccgccgctgggttatccttatccttattacatgccatggggagcaacgccgccaatgttcaatcatatgcctctaatgcaattcaacctagggtggggaggaccaaggaggccaattcatgagcatttgtcttcaccaaacaacggccggttttatggtaaaaatcgggctaatgaagaaagaagggaaggaaagcgcatcaaggtggagggaaggacttcggaagtaattaccatcaaagaggggtctcatgatgtgccaataccttctggagatggagttggagtgtccccgaacaaaaaatccgaagccgataccagctcatcgcagtcggccggccggtctgaccgtacgccgagtgtcggtctgaccggcacatctggccggtctgaccgatggtctacggccggtctgaccgggctccagcgccggtttgacaggagaattgcaaaggacgatgtgagggcttcatcgtcttcaaacaaaattaatagggggcattatttacctcctggaacagagccgaatcctaggtggatgcctaaggatttgacgtctgctcaaaagagaaggttgcaatgtcttcgggctcaagagataagagagaaaaaagccgaagaacaaagagataaaaggtttaatgagttgcgaccaccaccggtatggaggcgtaaatccatagagaacgaaaagtcggttgttgtagaggagaaggaggaacaatcggttgataagggtgaatcatctccaaaagaagacatggatattaacatggtatgtatgttgcctatggatttttgtgctatggatgaagccgaggttgctcaattctcattaggtcctaaagatgcggtttttgagaagcccgatgagtcaaaccgtcacatgaagcctctctatctcaaaggccatgttgatgggaagccggtctctaggatgctagtagatggaggtgccgccgtgaacttgatgccgtactcattattcaagaagttagggcgtgaggatgatgagttgaagaagaccaacatgattctcaatggcttcaatggtgaaccaacagaggcaaagggtatcttttcggcagagctcaccgtgggaaacaagacgctaccaaccgctttcttcatcgtcgatgtgcaagaggctaatttagagtggttacaaaagagggtgcaagaatatcggtctacaaagaacgatattggtgaaaccgttgaagattttgatgaagtagagaagcttggaaaagggtttacatcagccgatcctttggaggaagtagatataggtgatggaactaaaccaaggccgacttttgtaaacaaaaatatgagagccgattataaggcggggtttattaggccatgtcgttatgcggagtgggtttctagcatagtcccggtggagaagaaggggagtggtaagattagagtttgcatagattttagagatttaaataaagccactcccaaagatgagtatcctatgcctatagccgacatgatggttaatgatgcctcgggtcataaggtgattagctttctagatggtaatgccggctacaatcaaatctttatggcggaagaggatatgtacaagacggcttttaggtgcccgggatttgttggtttgtttgagtgggttgtcatgacctttgggttgaagaatgccagcgcgacgtatcaaagggcaatgaatttgatcttccatgatttgctaggtattattttagagatctatattgatgatattgttgtcaaatcggatggtatggaaggacacttagccaatttgagattagcttttgagaggatgcgccggtatggtttgaagatgaacccacttaaatgtgcttttgaagccgattttacttggggggcaaaacaagaagaggcgtttgaagagttgaagaggtatttgtctactccacccgttgtgcgagcgcctaaagccggaaagccttttcggttatatattacctccgaggacaaagtcattggtgccgttttgatgcaagaggaagatggcaaggaatatatcattacatatttgagcagccgtcttttggatgccgaaacgaggccaattctaagtgggagaattggcaagtgggcatatgctttgatagaatatgatttggcttatgaaccattgaaatctatgaaaggccaaattgtatgtgattttatagtggaccatcatgtagatattgcttatgaggaaaaggtttgcttagttgaagttataccttggaagatttattttgatggttcttcttgcaaggaaggtcaaggcataggggtagttttgttttcacctaatggcatgtgttatgaagtatcggttcgtttggagtattattgtacaaataatcaagccgaatacaatgctttattattcggcttacaagttatggagatggttggagctaaatacgtggaggcttttggtgattcggaattggtggtacaacaagtcgccggagtctacaaatgcttggacggatcactaaatagatacctcgattcatgtttagatattattgccaattttgataattttgctattagacatattgttaggcatgataattctagagcaaatgacttggcacaacaagcatctggctataatgtgaaaaagggattatttctggtattagaagagccggtgcttgattttaaatctttgtgcaaaattggtaaaactggagaccaggggcggtctgaccagctgcttgccgtcggtctgaccggcgatcccgagcagtctgaccagccctgtgtggccggtctgaccggttctgggcagagcactggggggcatgtttcaatcaatttagaggccgaattaattgtgaatttggacgtttgtgcccaggaagcagaacaagattggagaattcctttgattcgatatttgaaagatcctacacttaaggttgatcggaaaattcggcggcaagcattcaaatatacattgcttgatggagatttgtatcaccgaaatatagatggtgtcttgttgaagtgcttagatggagatcaatctaaagtggctacgggagaggctaatggacaagccgagtcgagtaataaaacattgttgaagttagtgaagaagaagattgaggaatacccaaagaggtggcatgaggaagccgttttaccggtggagataaatcttggttctcttcgttatatcaagaaagatgatttgtcaagtgaagattacaagacgttgatgggagacaaccttgatgaagtcatcgagaagcgcttgaaggcattggaagagatagagaaagagaagaagagggtggccaaggcgtacaacaatagggtgaaagcaaagttgtttcaagttggagacttggtttggaagacaattttgccttcgggtactcgatccaaggagttcggtaagtggtctcctagttgggagggtccttatcgagtatacggcattgttcgagggaacgcatattttttggagacacttcaaggggagcgctttcagcgagcaatcaacgggaaatacttgaagaaatacttcccgagcgtttggcaagacgcttag

SEQ ID NO: 25968 - DNA, 2298 bp, Oryza sativa
  Clone ID: PAT_MRT4530_30802C.1
atgaagaagaagaaaagttctcatttgggcgggcccacatgtcatacaccaaccctctcgtgggccccagatgtctggtggtatatcccggggcccgtgttcacatctatacgcttctccagtctcccctggcccggaagcaaacggggagcagcaatggagaagagacgccggctcgtcgtcgccggcgacggcgagggggacggcggcgaggcctccggcagcgccgcgcgcggcctggtggagagcctcccggaggcgctcctcgtggaggtggtcgtcaggctggagctggaggccgcgtgctcggccgcgtcgtcctgccgcgccctccgcgccgccgccgccgccgccttctccgccgtcacctccctcgacctatcgatgttcccgccgacgaatgccatcctgaataggattctcgcgggcaatggcgcgctccgctgcctcgccgtcaactgcagcctcctcgatgactccgcggtgggcgccatcgcgaagggaagcctccgcgagctctcgctgctcaagtgctcgtccttctcctcgtacctctttgtggcagttggtgagagatgcaaaaatttgagatcatttgtgctggagatggcagcttcagatgatgatgaacatttcgggatctgccgaaagtccatagcacacatcgtcaaaggatgcggttacctggagaatctttcactcaagttctttcctctgctaggtccaggctccgttgattttgagtcattggtacccattcctagtaccatcaaggtactattgctacagcctgtgtcgaattggcaggcaaagaggctatttcctataagcacaagtctgaagacatctattagcaacactctagaatcactctctttagttcttgacataataactgatgaacttgttgcgttcatcactgggagtctccataacttagttgagttgtgcctagaagataacccaatgaaagaaccagatttgcacaatgacctgacaaacgttgggctccaagcacttgggttatgccacaacctggcacatttatctctgacacgtggtaagcagaattgttcgtccaccttcagaagggtaactgactttgggataatgatgcttgctgacggatgcaagcaactgaaaaccattagacttgctgggttttctaaagtgagggatgctgggtatgcagcccttcttcagtcttgcaaggacctgaagaaatttgaggtcagtactggatacttgtcagatttgacatgtcttgatcttgatgaggcagctccaaagattacggaagtgaggttgctgtgctgtagtctattaaccagtgaaacagccatctcactctcatcctgcaccaagttggaagttctagacctatcaggttgcaggagcatcgcagactctgggttggcttctatttcgcagctttcgaagctaacactattggatcttgctggagctgacattaccgatgcaggattatctgcactcggtaatgggcggtgcccaatgtcttcattatgtttgagaggttgcaaaaggatcagcaacaatggcatagcttctttgttgtgcgggagtggcaccatcaacaaaactctaatctcactggatatcgggaatgtacctagaatatcaggcagagctgtcacgttgattgccaagaactgcgagcagatcagcagcctctgcctccggaactgcctcctcatcaatgattcttctcttgaaactctaggttctatgcgtcacaatttgggtaaaagttccctaagaatgctggatctctcctattgttctaggctgtcacgtaatttcctgggactatttgagccgccattttttaggggcctgaggtggcttggtgttgggaagaacatgttggaacgccgtggctgcagtccaactgtcgcggagctcctggagcgaaagcctggattaacagtctgtggcaacgcctgcgagatgggctgcaggaatcagtgccatcctgacattcgaaggcaataaaccgaagattgtcgttcgggtttgattctgtaattccttcatccgttctgtgaacataactgtggaacatctctctgcagtttgtaggttagaacggggctgttctttacggatttgttggtttgctctgcacttgtagattgtaaacaaggaacagctcttaggattggttggttttctttgcacttgtagattgtaaacaaggagctgttcttaggattggtcggctgcttgtgtcctgtaataaagtaatgaattcttattggaaaaaaaaaaaaaaaa

SEQ ID NO: 25969 - DNA, 4487 bp, Oryza sativa
  Clone ID: PAT_MRT4530_30803C.1
atgacaaagcctccatcaaccaaggcggaggtggaaccggtcaatgtgataccagtcgcattggaggagcttgatgagggagcacgcaaagctttagatgaacatctcaaggcatatactcaagatctactaatgaaggcgtgcgctaggacccgccaaggtgtgattttcaagccgggatcattgcctaaacatactttcgacatggtaagtgctgaagaggtatcacaatctatccaacaacaaattgcgcatacgatagattcatctatggttactttaaataataagttagatgcatctatcgaaactcgttgtgaagaatttatgaggactaaatttggccctctcatggccgattttatgttcaaagataaagcctctaccagtgctagccaagcccccatagatcaaataagtagtaaaaccgatggggccgccggtcagaccggtcagaccgggtattaccccggcggtcagatcggaccccaaaccggtctgaccgcgcctttggatgccggtcagttcggggcttggaccggtcagaccggcgcaatcatcccaatacagggggtagatccaatgacaaataacatgtttttataccatataccagcacccaatcctcctatatccactattggtccccaagttcaaccacatatccctaatgcttacaatgatcctactaggggatatactcccgatactaggcatggccaatataattatattgcgccgcaaccacaacctattaagccaccaaacccaccaccaaatcaaaataggcctgataatatggaggaattgattagtggtattattaaggataaatttggaattaaagctaggaatcatactaaggtttaccaaaagccatatcctgattactatgacaacataccatatcctcgtggttatagagttcccgaatttaccaagtttagtggtgaggatagtaagaccacatgagagcatgtaggtcaattcttagcgcaatgtggagaggctagtagttctgatacttttaaattgcgtttgttttctttatctttgtccggtacttcttttatatggtttacttcttttccggcaaattctattcatacttggactcaagtagaacaaagatttcatgattatttttatactggtgaaactgaacttaggctaagtgatttaacatcggttaggcaaaaacacaatgaatcagtcattgattatgttaagagatttagcgatgttagaaaccgatgttatagcttgaatataactgatagagatttggctgatcttgcttttaatggtttaattgctcctattaaagaaagattagattgccaacaatttttttatgttagtcaactcatgcaaaaggctctggctcaggaaagccgggttaaggatagcaaaaaatttgttagagcctaatgttaatttgattgattatcctgaagctagtgatagtgatgatgagggtgatcatgatatgtatgttgcggagtgatcatgaactaacaaaaataagccttttgtttgctctaatttaatgccgactcctcgtaaagatcggcaaagtaaggttaagtatagttttgacgtggccaaatgtgatatgatttttttttatcttttgcaagaaaaacaaattagattacctaaaggccatgtcataccctctcaagtagaattgaagcgtcaagcttattgtaaatggcatgattctcactctcattctactaatgattgcaatgtgtttcgacgacaggtttaatcggccatagatgaagggcgattgaaatttaccgatggttccaagatgaagcttgatcatgatcctttcccggtgaatacaattaatttcaacaataagaaggtgttgattggtcaaggagtggtcattggagagcctaggccaaagatgatggtgccaaagaatccggagaagtatgagaagcaaggtggtgagaaagctcgcaacaaaaggaaaagaccaagatcacctcctagggagcgatttggtcattcaccaagacagtcggaatcacctacatatcatcgttctcaaaacatgtcatgggggccttatccaatgctgccgtcgggttatccttttccttactacatgccatggggggcaacaccatcaatgttcaatcatatgcctccaatgcaatacaaccggggccagctcgttagcgtttatctttaccaaacaatggccagttttatgctaagaaccgggccaatgaggagaaaagggaaggaaagcgtgtcaaagtggagattaggacttcggaggtgattactatcaaagtggggtctcatgatgagccaataccttctggagatgaagttggagagtcttcaagcaataaatcgccctctggccggtctgaccgcagccctaaggctggtctgaccgggccatcaggccggtttgaccgtcagcccaatgtcggtatgaccggcgcttctggctggtctgactaatggtctacgtccggtctaaccgggctccagcgccggttcgacaggagatttgcaaagggtagttcaggggcttcatcgtcttcgagtaaaatcaacagagggcattatttacctcctggaacagagccgaaaccgaggtggatgcctaaggatttgacgggtaccaaaagagaaggttgcaacatctttgggcccaagaattaagagagagagaggccgaagagcaaagagatagaaggttcaatgagttgcgaccactgcctgagaaggaagaacaatcggttgctaaggatgaatcatctccaaaggaggacatggatgtcaacatggtgtgtatgttgcctatggagttttacgctatagatgaagccgaggttgctcaattctcactaggtcctaaagatgcggtttttgagaagcctgatgagtcaaaccgtcatatgaagcctctctatttcaaaggtcatattgatgggaagccggtctctaggatgctagtggatggaggtgctgccatgaatttcatgccatactcgttgttcaagaagttggggcatggagatgatgagttgaagaagaccaacataattctcaatggcttcaatggtgaaccaacggaggcgaaggatatcttttcagtggagcttaccgtgggaaacaagacgctaccaaccgctttcttcatcgtcgatgtgcaaggtaactacaatgttattttgggtcgttgttggatccatgccatttgttgtgtgccttttaccttgcatcaatgtttaattcaatgggacggcgatgatgttgagattgttcaagcggatacatcgcccgaggttgcaatggccaatgcaacatttgagtggtgttatgggaatattcaatgcttatcgggatggatctttctaaagctaatttagagtggttgcaaaagagggtgcaagaatatcggtctacaaagaacgatattagtgaaactattgaagattttgatgaagtagagaagcttggttaagggttcacatcggccgatccgttgcaagaagttgacataggtgatgaaactaagccaaggccaacttttgtaaacaaaaacatgagagtcgattataaagctaaaataatcgagctacttaaggagtatgttgattgcttcgcatggaagtatcatgagatgccgggtcttaaccgtgatcttgtcgagcatcggcttccaattaaaccgggttttaggcctcataaacaaccgcctcgtcgtttcaatcctttgctatatgaccgagtcaaagaagagattgatcggttgttgaaagcgggagatttgaataaagctactcccaaagatgaatatcctatgcctatagccgacatgatgattaatgatgcctcgggtcataatgtgattagctttttggatggtaatgccagctacaatcaaatctttatgacggaggaggatatgtacaagacggcttttaggtgcccgggatttgttggtatatttgagtgggttgtcataacttttggattgaagaacgccgaggcaacatatcaaagggcaacgaatttgatcttccatgatttactaggtattatcttagaaatctatattgatgatattgttgtcaaatcggatggtattgtgggacatagccgatttgaggttagcttttgagaggatgcgccggtatggtttgaagatgaacccacttaaatgtgcttttggtgtgtcggcggggaagttcttaggattcatggtgcatgaaagaggagttgagattgatcctaagcagatagaaaagattcgtgatttcaaagcgccgacatggaagtaggaagttcaaaaattactaggtaaggtgaattatttgaggagatttatatctaacctagcggggctaccattcaaatatacattgcttgatggagatttatatagccgaaatatagatggagttctgttgaaacattttttttccgagtggtgaaacattgcaaca

SEQ ID NO: 25970 - DNA, 1050 bp, Oryza sativa
  Clone ID: PAT_MRT4530_30804C.1
atggggcggcgcgcgcgctgcctctgcctcctcctcctcctcctcctcgtcgtaggtggcggtttccacgtggccaacgcgcaggcgtcgccggcgccgccacagacgggcacgagggcggtcaaccgcgccgtgtccaccgtcatcaccgtcgtcatcggcgtcttcttcgtcctcgtcttcgtatgcgtcatcgtcaaccagtgctgcgactgcgactcctccgctggcgctggggctgggcaagggcagtcgtcggctgctcggcgccgccgcgggctcgacccggcggcggtggcggcgatcccggtcgtgccgtacgcggaggtcaggaagcacaggagcggcggcggcggcgcgctggagtgcgccgtgtgcctcaccgtgttcgacgacggggacgacctccgcctcctcccgcagtgctcccacgcgttccaccccgactgcatcgacccctggctcgagggccacgtcacctgcccgctgtgccgcgccaacctcgagaagcagccagcgccgtcgccgcctgccgtggagttctcctcctcgcctgctgcggccgcggcggcggcggaggagtcgcgtacgcccgaggccgcggcggtgcgggttgaggaggtggcggaggcgagcgacgaagaggagacgaggaggagggaggaggaggccgtggagctggagagtctgcgcgccgtgcggcgggcggcgaggatgccgaggtcgaactcgacggggcactcgctgtgcgcgctgccggcgccgcgcgcgccggggccgggcgacggcggtgaccacgagaggttcacggtgcggctgccgccgcacgtccgggaggaggtgctcaagtcgaggcgcctccggcacgccacgagcctcgtcctcggcatcaggggatcgagccgcgagggcagctcgaggggcggcggcgggagctggcacggcgcgcggcggtggccgtccttcctggcaaggacggtgtcgtgggcgcgcggcggcgtgggagcggacaccagcgcgaaggagacgccatgccgtgatgcggtctga

SEQ ID NO: 25971 - DNA, 2496 bp, Oryza sativa
  Clone ID: PAT_MRT4530_30805C.1
atgtcggctagcaaacaagctcattgggacgagattggaatcagccaagccttagccctcaccatagcaaatttggccaaggacgaacccctgatagctgctgccacctatttctggtccaacacccttaatgcctttctcttcaaccaagggccaatgaccccaactctgctggatatcatcatgctcaccggtttagatgtgacctcgtcggccaaccccatgaacttgaacaccaagagtactttcgagttcaagactaagagcattggaggctggtcaggatacattgcagcatacatgggcaaaggaccagttaccccaagagagcatgtagccttcctgttgatgtggctagaaaaattccttttctgcgggtcaagttgtggtcctacaaccaactggcagttcatagccgaggctctagaatcgaagaagcaatttcccttgggcaagatccttctcggctatctatatcaaatgttgaacaatgcatcagccaagatgattattagctcagtagtcggggcaggtggaccatggtggttattgcaatcctggctaaacctggtagtcatgaaagttgtcaatcggccatctgtgacggaagccgaatttccaaggttggagccgattgtggaagatgatggagaagaacgcactcattgtagatgcatgtcatacggagaatatgcctctatgccagccgatgcgggagcaaagctatcggctgaacttctaaaggactggttcttcagtttttatgatgggtttcagaaggatgcccgagtttggttcttctatgccgattcaatggactttgaactaccagctgatttcagatttgaagacatcaatcacgaaaaatttcagcaatctcgagaagtcttcactactgctatcagcccgtgcatcctccctgttggcatccatcaagggagaaatattcaagtctcctatgagttctatcatccaatgtcatcggctagacaactcggaatgggacagctgccgatcagcctgtactttgccgacaagatccagtgcagaggtgacatctcttcaaccttaatgatggatcggctactgaacatccccagacctccattaggcagcattgagaacataaagttggcaaggttcaggagccgggcacttgacagatggtggagtgaatggaagctgcacttgttccatcaattggcgtccatgtatatgatagacctgttccctgatgccattcctcagacaacagaatcttctcctcctcgtcggagtaatagtggcaaggacattgaatataccccaagtctaattccaaatggaggtggaccatctccctccgccatcggctataatgcccccaagacctcagcacttctccaagggctcatcagagaaccagccgatgctggcaagaagcgaaaaaccagatcatcggctgttgatattttagccccagctttaaagaagaaaactaaaccaaagaagaccacgccagctgatgatctgcctgttctagatccatccatcgaaaaggttccggatgaagaagtgattggagatgatgtcgatcaagccgcagccgaaataagtgacacagaaagaacaccatcggcttcacccaagcataccccttcaactccttctgctccagttcacttcctaagtaaaaagaaaaccgctgtaaggaagaaatcggctacatcaactcctaaaccggctgcaccagtggaatcaggtggccgcactccatcggctgcagacagtcatcatgttgaaggagaagaacaactagctgctcctgttattccagttttagccgatctgttctctttcgacataaaagattaccttgatgaaacagaacaagacatcaccagtaaagcaacagctcttctgcccgatgatgtaaagagaacgctcaaagacatctctcatcggctagaagcatcattggataacctggtaaccaactgtggaccgatccgggaaaggttcacagacatccaagctcttctcccagatgaactagctgacgctcttactccagccgtctaccttgagcaacaccagttcaagctggaaaaggccaggcagaggttagccgatcgccgggagcgcaaagctattgaagctacaattcagcacaatcggcagcttgtacacgtagagaaatccaagcttgatcaattgtccgagggcccgatcaaatcaaatatcaatcggcttgaagctcgcaagattgatctcatggcacaactccaagaatgcaatgctgagctggatctggagcacaagaagctagccgatctcccacaagccgtcgaagaacagaaggcaaagctaaaatcggctatcaagaacattgctgacatgaccaaatccttgaaagtcatccctggaaccgacgctcaagacgcccaagccatagaagaagtagatcagattaggcaaagggctatatcggctatccagggatatttgtctcagtga

SEQ ID NO: 25972 - DNA, 549 bp, Oryza sativa
  Clone ID: PAT_MRT4530_30806C.1
atgacaaagcctccatcaaccaaggcggaggtggaaacggtcaatgtgataccagtcgcattggaggagcttgatgagggagcacgtaaagctttggatgaacatctcaaggcatacactcaagacctattgacgaatgcgtgcgctaggacccatcaaggtgtgaccttcaagccgggatcattgcctaaacctactttcgacatgggaagtgctgaagaggtatcacagtctatccaacaacaaattgctcatacaatagattcatctttggttactttaaataataagttagatgcatctattgaaactcgttgtgaagaatttatgaggactaaattcggccccctcatggccgattttatgttcaaagataaagcctctaccagtgctagccaagcccctatagatcaaataggtagtaaaactgatagggcaaagacgcaacaaaccggttatcctagagtcaccaaccacctcaatctagcaaaagctaaaccaagatgggttttgataaataaaccggctagcggagccgattctagataa

SEQ ID NO: 25973 - DNA, 870 bp, Oryza sativa
  Clone ID: PAT_MRT4530_30807C.1
atggtggacaaatccatagagtggatggacgaggacgtgcagggctgcgctcgccggccgtgtgaagggatgaggatggggacgcgcggtagcatggctgggatggctgcctgcgacaaggccggcggagagggaaaagtgaggaggcgattagaggagagcgaggcggcggcggcggcggcggagggggagactggagaagagaagggggagcggttcagggccaaaaatcatggcgcgtcatccgcccgcgccaacggaaatcaagaaattttgcgcgccgtccaccccgccaacggaaatttggcgcgccaagccaaaatagtccgtccgtgccacgcgccatggatcggaggaggcagggcattaactccagccagcgtgcgccacagcggtagtatcggtagcgccggccgggtgtatggatggtcaatgcgcggtaaagaaagagaatgtatgaacgaggtggagaaagcggtgatcgccttagcacagtcgtcaccaccgacgaatattgctgcctctgacatctcccctctcctcatcggcgcctctccactctcggtgaaaagcctcgctgctgccaacttcctcctccgcaaacttgccctcatcgtcgccgcttcctccttcgcaagctcgccgccactgcatctatcctcctccacggctgccaacatctcctcctcgacacctgaagacacaaatggagccatggagtccttcctcaccactacgcatgggagtcatagcctcctttcagcaatattgacaggaagaaccaggacgacggggacatactttgatgttttggccgtcgatccgatggtgttggctatcatcttcgacttcaagaaggagaacggctag

SEQ ID NO: 25974 - DNA, 4618 bp, Oryza sativa
  Clone ID: PAT_MRT4530_30808C.1
taaaaagaaaaaccctaaaaagtctttttccccccttcccctcttgggccggctcggcccacctccctccctctctctcctctcccccgcggcccaatcggtctcctccccgcgcgcgtgccgctgacgggcgggcccgcccgccacccttgctgacaggtggggcccacctgtcatccctgtcctcccgccgctcccgccgcctcgcccgtgccctagcgccgccgccgccgcgaatcccgccgcctcccgccgtccgcgcgcgcaataaagagggggaaatcactccccgtgattccctccctctttccccccacttttccctctctctctccctcggatttgttcggaaacgtttccccctaaacctcgccggcgcatcaatggcggccggatcttccgcggccgattccccctcatccggccgttctctccccctcccaacgctatataaacgctccccgtgcctccctccaccgtttccgccactcgccgctctctctctccgccggaatcgagctcgcgccgtcgctccctctctccgccgtcgccgccgagctccggtccgccgccgtcgtcgcctcggaccttctcccgcctcggcgtcgcctccttcggctccgccgcgtcctcgccgacctcgtccacccctccgtttcgcccgccgaccgccggaacgccgccgtccccgtcgacccgtgccgcgccgccgccttcttccgctccagtcgccgttcccgtcgtcgtcgtcgacccggggtgagccgtggaccgcccatttcgtttgccccttccctcccctctctcggccgccgctccgccgtgcctatggccgccgccggcgaccataggggcgctggcgcgccgcctcccgtcggccgtgccggcgaggccgccttcgggcgcgccccgcggctgccatgtggggcccggctcggccatataaggaccggtcttcgggcctctgttgcaaagcactaccgtacttccacatgtctagtgggtaaggcttagtttgtggctcagtctgatctctaggacaaatgaaggctacacgagctgtggcccggtagtcgagatgtcatggcacagggttggtgccctgctgctaggggctcagtcctaccgacctgtcccggaggttccggccgtaggtggggttgggttggtactcttgtttatggctaggatgggttggaaactatgtcatgtcttccgtccggataccgtggtgctaaaatgtggaatggttggcctgggttggcttgggacgagctgggacccagggtcgggttgccagttcggtctgaatcatcgtaggccttgggttaaggcagaaaaaagggaaggaaagcgcaccaaggtggaggaaaggacttcggaggtgattactatcaaaataggatctcatgatgtgcctataccttctggagatggagttggaaagtccccaagcaaaaaatccgaagccggtaccagctcctcgcagtcggccagtctgaccaggccctctggccggtctgaccgcagccatgttgccggtctgaccgggccatcaggccggtctgaccgccgacctgacgacggtctgaccgacgcctcaggccggtctggccggtctgaccggtggcctacagccggtctgaccgggctccggtgtcggtttgatgagagggctgcaaagggcgatgtgggggcttcatcgtcttcaagcaaagttaatagaggacattatttgcctcctagaacagagccgaatcctaggtggatgcctaaggatttgacggctacacaaaagagaaggttgcaatgtcttcgggcccaagaattaagggagaaaaaggccgaagaacaaagagataaaaggttcaatgagttacgaccaccaccggtatggaggcctaaatccatagagaaggcaaaaccgattgatgtagaggagaaggaagaacaatcggttgacaaagataaatcgtctccaaaggaggacatggatatcaacatggtgtgtatgttgcctatggagttttgtgctatggatgaagccgaggttgcccaattctcattaggtcctaaagatgcggtttttgagaagcccgatgagtcaaaccgtcacatgaagcctctctatctcaaaggccatgttgatgggaaaccggtctctaggatgctagtggatggaggtgccgccgtgaatttgatgccgtattcgctattcaagaagttggggcatgaggatgatgagttgaagaagaccaacatgatcctcaatggcttcaatggtgaaccaatggaggcgaggggtatcttttcggcggagctcaccgtgggaaacaagacgctaccaaccgctttcttcatcgtcgatgtgcaagaggctagtttagagtggttacaaaaaagggtgcaagaatatcggtctacaaagaacgatattggagagaccgttgaagattttgatgaagtagagaagcttgggcaagggtttacatcggccgatccattagaagaagtagacataggtgatggaattaaaccaaggccgacttttgtaaacaaaaacatgagagccgattataaggttaagataatcgagctacttaaagaatatgttgattgctttgcatgggagtaccatgagatgccgggtcttagccgtgagcttgttgagcatcggcttccaattaaaccgggttttaggccttataagcaaccacctcgtcgttttaatcctttattatatgaccgagtcaaagaggagattgatcggttgttgaaggcggggtttattaggccatgtcgttatgcggagtgggtttctagcatagtcccggtggagaagaaggggagtggtaagattagagtttgcttagattttagagatttaaataaagctactcctaaagatgagtatcctatgcctatagccgacatgatgattaatgatgccttgggtcataaggtgattagcttcttagatggtaatgccggctacaatcaaatttttatgacagaagaggatatgtacaagacggcttttaggtgtccggggtttgttggtttatttgagtgggttgtcatgacctttggtttaaagagtgccggcgcaacgtatcaaagggcaatgaatttgattttccatgatttgctaggtattatcttagagatctacattgatgatattgttgtcaaatcggatggtatggaaggacatatagccgatttgatattagcttttgagaggatgcgccggtatggtttgaagatgaacctacttaaatgtgcttttggtgtgtcggcggggaagttcttaggattcatggtgcatgagagaggagttgagattgatcctaagaagatagaaaaaattcgtgatttcaaagcgccgacatgcaagaaagaggtccaaaagttgctaggtaaggtgaattatttgaggaggtttatttctaacctagcgggtaaaatcgatgcttttgttcctattcttcgcttgaagaaagaagccgattttacttggggggcaaaacaacaagaggcgtttgaagagttgaagaggtatttatctactccacccgttgtgcgagcgcctaaagccgaaaagccttttcggttatatattgcctccgaggacaaagtcattggtgccgttttgacgcaagaggaagatggcaaggaatatatcattacatatttgagccgccgtcttttagatgccgaatcgagacatattgctaggcatgataattctagagcaaatgacttagcacaacaagcatctggttataatgtgaagaagggattatttctgatattagaagaaccggtgcttgattttaaatctttgtgcgaaattagcaaaattggagaccagggcggtctgaccggcgttgcacggccggatacagaagaggattggagaattcctttgattcaatatctaaaagatcccacacttaaggttgatcgaaaaattcggcggcaagcattcaaatatacattgcttgatgaagatttatatcgccgaaacgtagacggtgtcttgttgaagtgcttggatgaagatcaatctaaagtggctattggagaagggcataggttcgtgctagttgctacggactacttcaccaagtgggccgaagccgtgccttcgaggaatatgactcatacggaggctaatggtcaagccgagtcgagtaataagacattgctaaaactagtgaaaaagaagattgaggagcacccaaagaggtggcatgaggtgctttccgaagcattgtgggcgcataggatatctaaacatggtgccactaaagtcactccttttgagttggtttatggtcaagaagccattttaccggtagaggtaaatcttggttctcttcgttatatcaagcaagatgatttgtcaagtgaagattacaagacgttgatgggagacaaccttgatgaagtcgtcgacaagcgcttgaaggcattggaagagatagagaaagagaagaagagggtggccaaggcatacaacaagagggtgaaagcaaaattgtttcaagttggagacttggtttggaagacaattttgcctttgggtactcgatccaaggagttcggtaagtga

SEQ ID NO: 25975 - DNA, 4304 bp, Oryza sativa
  Clone ID: PAT_MRT4530_30809C.1
gttcaatcggccatagatgaaggacgattgaagttcatcgatggttccaagatgaagcttgatcatgatccttttccgatgaatacaattaatttcaatgataagaaggtgttgattcggccagagcaagccgaatctactaagggaaaaggagaggtcattggtgaaccgaggccaaagatgatagtgccaaagaaaccggaggttggtgtttggaaggaaaataatagtgaagcttcaacttctaaaacccctaggaagaccaaagtgacctttgatatgcttttggggaagtacgagaaacaaggtggtgagaaagctcgcaacaaagggaaaagaccaagatcacctcctagggagcaatttggtcattcaccaagacggtcggaatcacctcaatataattgttctcaaaacatgtcatggggtccatatccaatgccgccgtcgggttatacttatccttactacatgccatggggggcaacaccgccaatgttcaatcatatgcctccaatacaattcaatcaagggtggggaggaccaaggaggacaatccatgagcatttgtcttcaccaaacaatggctggttttatgatgaagttggagagtcctcaagcaacaaacccgaagcaggtaccagctcatcgcagtcggccggtctgaccaggccttctagccggtctgaccgcaatcatacggccggtctgactgggccatctggccggtctgactgccgacccgacgatggtccgaccgacgcctcaggccggtctgaccgcccaccaaatgtcgatatgaccggcgtatctggccggtctgaccggtggtctacatccggtctgaccgggctccagcgccagtttgacaggaggtttgctaagggcaatgcgggggctttatcgtcatcaagtaaactcaatagagggcactatttacctcctggaacggagctgaaacctaggtggatacctaagtatttaacggctactcaaaggagaaggttgcaacgtcttcgggcccaagaaataagagagcaaaaggccgaagagcaaagggataggaggtttaatgagttgcgaccaccaccggtatggaggcgtaaatccatagagaaggaagaaccggttgttgtagaggagaaggaagaacaatcggttgctaaagatgagccatctacaaaagaagacatggatatcaacatggtatatatgttgcctatagagttttgtgctatggatgaagccgaggttgctcaattttcactaggtcctaaagatgcggtttttgagaaacccgatgagtcaaattgtcatatgaagcctctctatctcaagggtcatattgatgggaagccgttggggcgtggagataatgagttgaagaagaccaacatgattctcaatggcttcaatggtgaaccaaaggaggcgaagggtatcttttcggtggagcttaccatgggaaacaagacgttaccaaccgctttcttcatcgtcgatgtgcaaggggctaatttagagtggttacaaaagagggtgcaagaatatcggtctacaaagaatgatattggtgagactattgaagatttcgatgaagtggagaaacttggacaagggtttacatcggccgatccattggaggaagttaagataatcgagctacttaaagagtatgttgattgctttgcgtgggagtaccatgagatgccgggtcttagccgtgagcttgttgagcatcggcttccaattaaaccgggttttagcccttacaagcaaccacctcgtcgttttaatcctttgctatatgaccgagtcaaagaggagattgatcagttgttgaaggcggggtttactaggcgatgtcattatgcggagtgggtttctagcatagtcccggtggagaagaagggaagtggtaagattagagtttgcatggactttagagatttgaataaagctactcccaaagatgaatatcctatgcctatagccgacatgatgatcaatgatgcttcgggtcataaagtgattagttttttagatggtaatgccggcaacaatcaaatctttatgacggaacaggatatatataaaacgacttttaggtgcccgggatttgttggtttgtttgagtgggttgtcatgacttttggattgaagaacgccggtgcaacatatcaaagggcaatgaatttgatcttccatgatttactaggtattatcttagaagtctacattgatgatattgttgtcaaatcggatggtatggaggaacatatagccgatttgaggttggcttttgagaggatgcgccggtatggtttgaagatgaacccacttaaatgtgcttttggtttgacggcagggaaattcttaggattcatggtgcatgagagaggagttgagattgatcctaagaagatagaaaaaattcgtgatttcaaagcgccgacatgcaagaaggaggtccaaaagttgctaggtaaaatcgatgcttttgttcctatacttcgcttgaaaaaagaagccgattttacatggggggcaaaacaacaagaagcgtttgaggagttgaagaggtatttatctactccacccgttgtgcgggcgcctaaagctggaaagccttttcggttatatattgcctccgaagacaaagtcattggtgccgttttgacacaagaggaagatggcaaggaatatattattacatattttagccgccgtcttttggatgccgaaacgaggccaattctaagtgggagaattggcaagtgggcatatgctttgatagagtatgatttggcttatgaaccattgaaatctgtgagaggccaaaatgtatgtgattttatagtagaacatcatgtagatattgcttatgaggaagaggtttgcctagttgaagttataccttggaagatttattttgatggttcttcttgcaaagaaggtcaaggcataggggtagttttgttttcacctaatggcatgtgttatgaagcatcggttcgtttggaatattattgtacaaataatcaagccaaatacaatgctttattattcggcttacaaatcatggagatggttggagctaagcacgtggaagcttttggtgattcggaattggtggtgcaacgagtcgccggattttataaatgcttggacggatcactaaataggtaccttgattcatgcttggatatcattgccaattttgataattttactattagacatattgctaggcatgataattctagagcaaatgacttggctcaacaagcatctggctataatgtgaagaagggattatttctggtattggaagagccggtgcttgattttaaatctctgtgcgaaattggcgaaattggagaccaggggcggtctgaccgacgttgcgcggccggtctgaccggtgaccaagtgcggtataaccggccacatgccgccggtttgaccggcgaccccgagcggtctgaccggcctttgattcgatatttaaaagatcccacacttaaggttgatcggaaaattcgatatttaaaggattggagaattcctttgattcgatatttaaaagatcccacacttaaggttgatcggaaaattcggtggcaagcactcaaatgcacgttgcttgatgaagatttatatcccgaaatatagatggtgtcttgttgaagtgcctagatgaagatcaatctaaagtggctatgggagaggggcataggttcgtggtagttgctacggattacttcaccaagtaggccgaagctgtgccgctgaagaatatgacttatacggaggtaattgcctttaatttgaagcatattattcatagattcggtatcccgcaaacattaactacggatcaagccgagtcgagtaataagacattgttaaagctagtgaaaaagaagattgaggaacacccaaagaggtggcatgaagtgctttccgaagcattgtgggcgcataggatatctaaacatggtgccactaaagtcactccttttgagttggtttattgtcaagaagttgttttaccgattgaggtaaatcttggttctcttcgttatatcaagcaagatgatttgttaagtgaagattacaagacatttgttaagaccttgatgatgtcattgacaagcgtttgaaggctttggaagagatagacaaagagaagaagagggtggcctaggcatacaacaaaagggtgaaagcaaagttgtttcaagttggagacttggtttggaagacaattttgccttcgggtactcgatccagggagttcg

SEQ ID NO: 25976 - DNA, 2132 bp, Oryza sativa
  Clone ID: PAT_MRT4530_3080C.1
agaaagcacgaaagttaccaagggctaccacccggagacacgtggccacaatgatcaacctgccagtagcaacaacaaccatccatccgcaatccatggtgtcggcacgtggccccctcctcttttttttttttttgtccggcaacacatcggcgttgtcttgcatttctttagaagggccttgtcaccggggacagttcctatcaaaaagggtgataagcagttgatcacatattcagtcatcattacgatgcaactattcggaccgagattcatccaatacgccataatgttacaggaaacgaactaatgtagctgctccactattacgaatttgatcgaacggctgaacggctccagattcacctcacacacttgtatgccaactcgatctttgccacccatcactagtctgctagtttgggaacttcattttgtactgctgagcagtcataaaggtcgctgtaatcatctttcctgcgaaccatctaccatgcagtgcgcgttgagcagctgtcgcagctgctacactgtcgaaatgaaggtacacaaagccagcagtatttttgtcaacaaaaatgtgatttactgcaccaaactttgagcattcatcctggacatcatctttaatatccaaatcaaaatcaggatctgtctccactgcagggtcaaacatgttcttcagcaatagaaactcagtaggtgaaccaatatctgcagattgagtaccaggaatttgtatgccaggaactgttccaatagcaggtattgttggttgtatgagtgaagtggttggcagaggagcaccagtaaccgatgcagacggtaactcaacagatgtgttcacaccaggaataccaataccaccagttatgctggttgcagtgccactccggtccaatttacgcatcagcatagctctagagcttgcatttaatgccaaacctccaccttcatcatcatctaaatctcccgtagttgcacccccaacttgcaaaccagcttgctcagtaacagccgagaccttaattactcttccagcaatatcaaggtgaccatttaaactgtgagcagcttttgcatcttcaagccgtgcgaacggcagctggacaagctccacttgcccaaatggttcgaatacctgtctcaattgatcctcagtgatattggaatgtaggttgccaacatacaactttcttgctccacctgaagctattccacctgatgccacgtttgactgaactagattcttttcagcctctgagggcttaaccatcacttgttgcccaagaagcacctgaccagttagagctatcgccattggaacagacatagcatcatagaactcaatgtacccaactcctttggaacgccgcgagttcctgtccataataaggcgaacatcacggaccttccctgctcttgagaagaactcatagacgtctctttcatctgccttcaaagatagctggaaggcaaatacagtcctttgatctctttctggatcagcttctggctctgcaccgtcatctttcctacgtctaacatcgcggtcacggtagtcacggttgcggtcgctgcgttcgcgctccttctggagctccctcaccatctcctcctcctccgtgcggcgacgctcagggcggctgctgcttcttcgttccctcccgctatccctctccctgcgcctgtccctctcgctgtccctgtccctgtccctgtccctgctcctatccttctccgcttccttgctcctatccttctccccatccttgcccctatccttctccgcatccttgccgcggctgcggctgctcctctccttctccttcccgtcatcccgatcccggtgctcccggccgccgccgccgcctcggtgccggtcacggtcccggtcccggtcctccccggagcgtgagcgcttcgacccgcgctcctcgtcgtcgcggccgccgccggaggagcgccggcgggagccggcgcggtccttctcgccggagccgttggtcgacggcgcggagggctcgaccgtcttctctaggtactcgtactcgtcgaactccatggcggcgccgctcgtcgactcgcgtggagacctggatttggtgggggggagaagaagcagaaacccc

SEQ ID NO: 25977 - DNA, 553 bp, Oryza sativa
  Clone ID: PAT_MRT4530_30810C.1
tccccgggctgcaggaattcggcgcaaatcttgtaaaaagcctatgggaaattcaaaaactcctcaaccatcaaagaagtcccgaattatgttgtcagatactgatggccaccaactggacaatgatgagttttcatctgaaagtgcatcaaatcaaatggttctgttcaaccctgaaactgtagctaaagggcaagatgaacttggagagaaccattcaccatctttgcagaaatcagccaataatccgaaccgaggaatgccatctattggggcattcactgtccaatgtgccaagtgtttcaaatggagacttattccgacaaaagagaagtatgaagaaattcgtgagtgtattatacaggaaccttttgagtgcgaacgagcccgtgagtggagacctgatgtaacatgtaatgatccagaagatatatctcaggatggaagcaggctttgggctattgacaaacccaatattgcactacctcctcctggatgggaaagacagatcagaataagaggcgaaggaggcaccaaatttgctgatgtgtga

SEQ ID NO: 25978 - DNA, 5548 bp, Oryza sativa
  Clone ID: PAT_MRT4530_30811C.1
atgacgaagcagtcgtcatcaaaggtagaggtggagcctatcaatgtgataccaattacattggatgacttcgaggaggaagatcgcaagtccatagaggagtacattaaggagatcacataggaggcgttgatgagggcgtgcactaggactcgtcaaggcgtgatcatcaaacccgggccacgtcctaagctcactcccgatttggtaagcaatgaagaggtaacacaatctatccaacaacaagttgtatctacaaaagattcatccatgattatttttaaaaataagttagatgcaactattaaaggtcgatttgataagtttttaagaactaaattcggccctctcatggccgattttatgttaaaagataaagcctctaccagtgctagccaagttcctatagatcaaacaagtagtggaaccgatggagcggcgcagacagccggtcagaccgggtattatcacggcggtcagaccgggactcaggccggtctgaccgcgcctctggacgttggtcagaccgggccctggactggtcagaccggcgcaattattccgattcaggggatatatccaatgactaatgctagttatttgtatcatcttagaacatttgatcctcctatatctactgctgcaactaatccccaagttcccccacatgttcctaatgcttataatgatgttgctaatgggtatcctcccgatactaggtaaggccaatataatcatattgcgccgcaaacacatcctattaggccaccaaatccaccaccaaatcaacataggcctaataatgtggaggaaataattagtgggattattagggataaattcgggattgaagctaggaatcgtgctaaggtttaccaaaagccgtatcctgactattatgataatgtgccattccctcgtggttatagagttcccgaatttgccaagtttagtggtgaagatattaggaccacatgagagcatgtaggtcaatttttagcgcaatgtggtgaggctaatagtgatacttttaaattgcgcttattttctttgtctttgtccggtaccgcttttacatggtttacttctttaccggcaaattatattcatacttggactcaattagaacaaagatttcatgattatttctatactggagaaactgagcttaggttatgtgatttgacatcggttaagcaaaaatataatgagcctgtcattgattatattaagagatttagggatgttagaaaccgatgttatagcttgaatataactgatagagatttggctggtcttgcttttaatggtttaatttctcatcttagagaaagattagatgaccaacaatttcttgatgttagtcaacttatgcaaaaggctctggctcaggaaagccgggttaaggataataaaaaaattgttagaccatataagaaaaagcctaatattaatttgattgattaccctgaggctagtgatagttaagatgagggtaatcatgatatgtatattgctgagtggtcatggactaactaaaataagccttttgtttgttctaatctaatgccaactcctcgtaaagatcggcaaagtgagattaaatatagttttgatgtggccaagtgtgataagattttttattattttttataagacaaacaaattagattacctaaagaccatatcataccatctcaagaagaattgaaacgtcgagcttattgtaaatggcatgattcccactctcattctactaatgattgcaatgtgtttcgacgacaggttcaatcagccataaatgaaggacgattgaagttcaccgatggttccaagatgaagcttgatcatgatccttttccggtgaatacaattaatttcaatgagaagaaggtgttgattcggccggagcaagccgaatctactaagggaaaaggagtgatcattggcgaatcgaggccgaagatgatagtgccaaagaagccggagaagtatgaaaagcaaagtggtgagagaactcgcaacaaagggaaaagaccaagatcacctcctaggaagcgatttggtcactcaccaagacggtcgcattcacctccatatcatcattcacaagacatgtcatggggtccttatccaatgctgccgccgggttatctttatccttattacatgccatggggggcagcactgccaatgttcaaccatatgcctccaatgtaattcaaccaagggtgcggaggaccaaggaggccaatccatgagtgtttgtcttcaccaaacaatggccagttttatggtaagaaccgggccagtgaagaaaagagggaagggaagcgtattaaggtggaggcaaggacgtcgaaagtgattaccatcaaagtggggtctcatgatgtgccaataccttctggagatgaagttggagagtcttcaagcaacaaaaccgaagccggccggtctgaccgccgaccgaatgacggtctgaccgatgcctcaagccggtctgaccgccgacctaatgtcggtctgaccgatgcctcagaccggcgcatctggccggtctgaccggtggtctacgtccggtctgaccgggctccagcgccggtttgacaggaggttcacaaggagtaaagtgggggcttcatcgtcatcaagtaaactcaatagggggcactacttacctcctggaacagagccgaaacctaggtggatgcctaaggatttgacggctactcaaaggagaaggttgcaacgtcttcgggcccaagaaataagagagaaaaaggccgaagagcaaagagataaaaggttcaatgagttgtaaccaccaccggagaaggaagaacaatcagttgttaaagatgagtcatctccaaaagaagacatggatatcaacatggtatgtatgttgcctatggagttttgtgctatggatgaagccgaggttgctcaattttcactaggtcctaaagatgcggtttttgagaagcccgatgagtcaaaccgtcatatgaaacctctctatctcaaaggtcatattaatgggaagccggtctctaggatcctagtggatggaggtaccgccgtgaatttgatgccgtactcgttgtttaaaaagttggggcggggagatgatgagttgaagaagaccaacatgattctcaatggcttcaatggtgaaccaacggaggcgaagggtatcttttcggtggagcttaccatgggaaacaagatgctaccaaccgctttcttcatcgtcgatgtgcaaggtaattacaatgttattttgggtcgttgttggatccatgccaattgttgtgtgccttctaccttgcatcaatgtttaatttaatgggacggcgatgatgttgagattgttcaagcggatacatcggccgaggttgcaatggccgatgctacttttgagtggcgtcatgggaatattcaatgcttatcggggatggatctttctaaagctaatctagagttgttacaaaagagggtacaagaatatcggtctacaaagaacgatattggtgaaactattaaagattttgatgaagtggagaagcttggacaggggtttacatcggccgatccattagaggaagtagacataggtgatggaactaaaccaaggccgacttttgtaaacaaaaatatgagagccgattataaggttaagataatcgagttacttaaagagtatgttgattgctttgcattggagtaacatgagatgccgggtcttagccgtgagcttgttgagcgtctgcttccaattaaaccgggttttaggccttataagcaaccacctcgtcgttttaatcctttactctatgaccgagtcaaagaggagattgatcggttgttgaaggcgggagatttaaataaagctactcccaaagatgaatatcctatgcctatagccgacatgatgatcaatgatgcctcgggtcataaggtgattagctttttagatggtaatgccggttacaatcaaatttttatggcggaggaggatatgtacaaaacggcttttaggtgcccaggatttgttggtttgtttgagtgggttgttatgacttttgggttgaagaacgccggtgcaacatatcaaagggcaatgaatttgatcttccatgatttgctagggattatcttagatatctatattgatgatattgttgtcaaatcggatggtatggagggacatatagcctatttgaggttagcctttgagaggatgcgccggtatggtttgaagatgaacccacttaaatgtgcttttggtgtgtcggcggggaagttcttaggattcatggtgcatgagagaggagttgagattgatcctaagaagatagaaaaaattcgtgatttcaaatcaccgacatgcaaaaaggaagttcaaaagttgctaggaaaggtgaattatttgagaagatttatttctaatctagcggggcaagcgttcaaatatccattgcttgatgaagatgtatatcgccgaaatatagatggtgtcttgttgaagtgcctagatgaagatcagtctaaagtggctatggcagaggtacatgaaggaatttgtggaactcatcaatcagcccacaagatgaattggttgcttaggagagcggggttctattggccaaggatgattgagaattgcttcaaatactataggagatgtgaagcttgtcaacggttcggcaatgggcataggttcgtgctagttgctacgaattacttcaccaagtgggccgaagccgtgcctctcaagaacatgactcatacggaggtaattgactttattttgaagcatattatccatagattcgatattccgcaaacattaactacggatcaaggtgcttcttttacgtctaaggaagtaaagagttttgccgaatcttatggtattaaattgttgagttcttctccttactacgctcaggctaatggacaagccgagtcgagtaataaaacattgttgaagctagtgaaaaagaagattgaggaacacccaaagaggtggcatgaggtgctttctgaagcattgtgggctcataggatatctaaacatggtgctactaaagtcactccttttgagttggtttatggtcaagaagtcgttttaccggttgaggtaaatcttggttctcttcgttatatcaagcaagatgatttgtcaagtgaagattaaaagatgttgatgggagacaaccttgatgaggtcatcgacaagcgcttgaaggctttggaagagatagagaaagagaagaagagggtggccaaggcgtataacaaaagggtgaaagcaaagttgtttcaagttggagacttggtttggaagacaattttgcctttgggtactcgatccagggagttcggtaagtggtctcctagttgggaaggtccttatcgagtatgcggtattgttcgagggaacgcatattttttggagacacttcgaggggagcgtttttagcgagcaatcaacgggaaatacttgaagaaatacttcccgagcgtttggcaagacgct

SEQ ID NO: 25979 - DNA, 4158 bp, Oryza sativa
  Clone ID: PAT_MRT4530_30812C.1
aactggattcggaaatgatcagcaaccggcactatttacctcctggaatagagccgaaaccaaggtgaatgcctaaggatttaacggctactcaaaagagaaggttgcaacatcttcaggcccaagaattaagagagagagaggccgaagaggaaagagatagaaagttcaacaagttgcgaccaccgcgtacaaaggtatggaggcataaatccatatatggagaaaaaccggttgttgtgcaaaaggaaaaggaagaacaatcggttgctaaagaaaattcatctccaaaggaagacatggatatcaacatggtgtgtatgttgcctatggagttttgtgctatggatgaagccgaggttgctcaattttcactagatcctaaagactgagaagcccgatgagtcaaaccatcatatgaagcctctttatctcaaaggtcatattgatgggtagccagtctctaggatgctagtggatggaggtgctgccgtgaatttgatgccatactcgttgttcaagaagttgggacgtggagatgatgagttgaagaagaccaacatgattctcaatggcttcaatggtgaaccaacggaagcaaagggtatcttttcggtggaacttaccgtgggaaacaagacgttgcccactgccttcttcatcgtcgatgtgcaaggtaactacaatgttattttgggtcgttgttggatccatgccaattgttgtgtgccttctaccttgcatcaatgcttaattcaaagggacggcggtgatattgaaattgttcaagcagatacattggtcgaggttgcaatatggccgatgcaacatttgagtggtgtcatgggaatattcaatgcttatcggggaggaatctttctagttatgatttcattagtatctccgatgacaaatttgtacctatccaaaaaagggtgcaagaatatcggtctacaaagaacgatattggtgaaactattgaagattttgatgaagtagagaagcttggtcaagggtttacatcggccaatccgttggaagaagtagaaataggttaaaatctacccaaggccgacttttgtaaacaaaaatatgagagccgattataaggttaaaataatcaagcaacttaaggactatgtggattgcttcgcatgggagtatcatgagatgccgggtcttagccgtgatcttggtgagcatcggcttccgattaagtagggttttaggccttataaacaaccacctcgtcgtttcaatcctttgctatatgaccgagtcaaagaggagattgatcggttgattgaaagcggggtttattaggccatatcattatgtggagtgggtatctagtatagtcccggtggaaaagaattggagcggtaagattagagtttgcatagactttagagatttaaataaagctactccgaaagatgaatatccaatgcctatagccgacatgatgattaatgatgcttcgggtcataaggtgattagttttttggatggtaatgccggctacaatcaaatttttatggtggaagaggatatgtacaagacggcttttaggtgcccgggatttgttggtctatttgagtgggttgtcatgacttttggattgaagaacgccggtgcaacatatcaaagggcaatgaatttgatcttccatgatttgctaggtattatcttagaaatctatattgatgatattgttgtcaaatcggatggtatggatggacatatagccgatttgagattagcttttgagaggatgcgccggtatagtttgaagattaatccacttaaatgtgtttttggtgtatcggtggggaagttcttaggattcatggtgcatgagagaggagttgagattgatcctaagaagatagaaaagattcgtgatttcaaagcgctgacatgcaagaaggaagttcaaaaattgctaggtaaggtgaattatttgagaagatttatttctaacctagcgggtaatatcgatgcttttgtccttatacttcgtttgaaaaaagaagtcgattttacttggggggcaaaacaataagaggcatttgaggagttgaagaagtatttatctactccacccgtggtacgagcacctaaagccggaatgccatttcggttatatattgcctccgaagactaagtcatagatgccgttttgacacaagaggaagatggcaaggaatatatcattacatatttgagccgccatcttttggatactgaaacgaggtatcggcattatttgttatctagtacatgcatagttgcttgttaagccgatgttattaaacacatgttgtaaaggccaattctaagagggagaattggcaaatgggtgctttgattgaatatgatttggcttatgaaccattgaaatctatgaaaggccaaattgtagttgattttatagtagaccatcatgtggatattgcttatgaagaagaggtttgcttactgaagtcataccttggaagatttattttgatggttcttcttgcaaagagggtcaaggcataggagtagttttattttcacctaatggcatgtgttatgaggcatcagttcgtttggaatattattgtacaaatgatcaaaccgaatacaatgctttattatttggcttacaagtgatggtaatggttggagctaaacacgtggaagcatttggtgattcggaattggtggcgcaacaagttgccggagcttataaatgcttggacggatcaataaataggtatctcgatcaatgcttggatattattgccaattttgataatttttcaattagacatattgctaggcgtgataattctagagcaaatgacttagcacaacaagcatctggctataatgtgaaaagaggagtatttttgatattggaagagccggtgcttgattttaaacctttgtgcgaaattggcaaaatcagagaccaggtgcggtctgactggcattacatggccggtctgacttgtgaagattggagggttcctttgattaaatatttgaaagatcttacacttaaggttgatcgaaaaatttggttgcaagcgttcaaatatacattgcttgatggagatctatatcgcagaaatatagatggagttctattgaagtgcttggatgatgatcaatctaaagtggctataggagaggtacatgaagggttctattggccgaggatgattgaggattgcttcaaatattataggggatgcgaagcttgtcaacggttcggcaatgttcaattggcgcccgccgccgtgttgaaccctattatcaaaccatggccgttccgaggttgagctttggattttattggtcaaatttatccttcgtcatcaaaggggcataggttcgtgctagttgcaacagattacttcagcatgtgggccgaagccgtgccgctcaagaacatgactcatacggaggtaattggctttattttgaagcatattatccatagattcggtattccacaaacattgactatggatcaaggagcttctttcatgtctaaggaactgaagagttttgccgaatcctatggtatcaaattgttgagttcttctccttactacgctcaggctaatggacaagccgagtcgagtaataaaacgttgttgaagctggtaagaaagcagattgaggaacacccaaagaagtggcatgaggttgtttctgaagcattgtgggcacataggatatctaaacatggtaccactaaagtcactccttttgagtcagtttatggtcaagaagccattttgccagttgaggcgaatcttggctctcttcgttatatcaaacaagatgatttatcaagtgaagattacaagacattgatgggagacaaccttgatgaagtcatcgacaagcgcttgaaggcgaagggtgagagcaaagttgtttcaagttggagacttggtttggaagacaattttgcctttgggtactcgatccagagagttcggaaagtggtctcctagttgggaaggtccttatcgagtatgcggcattgttcgagggaacgcatattttttggagacacttcaaggagagcgttttcagcgggcaatcaacgggaaatacttgaagaaatacttcctaagtgttttgcaagacgcttag

SEQ ID NO: 25980 - DNA, 469 bp, Oryza sativa
  unsure (1)..(469): unsure at all n locations
  Clone ID: PAT_MRT4530_30813C.1
ggccgccctttttttttttttttggaaatatgttactgtttttaactataatggngggcagttagaaaactcacatttttacaatagggaatttagctttccaaaagaagaaaaaaaacaagagatagagcctcagctccagctccacatctcctggagctagaacccagccaaacagtttcagctccacctaaaatgagagtggagctggatgaaactctctcacaaaatgaactagagaagtggagctgggtttaggcagctccacaactctactccagacccaactcctgaagttaaatttagaagttggaactctaccaaacaggcccttagctgctttataccactgcaaaaacgaaagcttcaggatttgccccctccaatgcttcatgcaaatgtggctcttaattaggtgcacgtatcaatgggctcctggggattcagatggccggagctcatggtcaaa

SEQ ID NO: 25981 - DNA, 243 bp, Oryza sativa
  Clone ID: PAT_MRT4530_30814C.1
cccacgcgtccgcagtactcaggtacttgtggtatgacattcattttagatattacctcaaattgtacatgaaagtgaatccctagaaagagtaatgctgtccgctggttggagtgacatctttcgccctcatcttcaacctttgctccacttttttttaatacttcctactatgtattcttgtaaggggaaaaaaatcagtgctacagaaaagagatgcaaagaaaaaaaaaaaaaaaaaaa

SEQ ID NO: 25982 - DNA, 509 bp, Oryza sativa
  Clone ID: PAT_MRT4530_30815C.1
cccggtgatctgatgggagggggtgctgccgattctgaaacactggccatattgacctaagaagccagcactgaagggggtgtggcaaaaatcatacgaccgggggaggcttgcaaagctgaagtgacaatgacctgcaattctgaccctacataggggcgcccttgttgcaccaccaccatggtgccatcttgtaggtaacctactccctgggaagcttccttgccttgtttgatgatttttagctccagagaatcccctggtagggaaatgggccgcactgcctgggccaaatcgatcacgttgagaatttggactttttgcaagttggcaactttgctgaggttgtaatcattggtgagcaaaatgccattgatttcttgggctaaatggactaattgggcatccaccgtggcaatgtcaccataggcagcggaatgaataacgatgctttggggaaaatccgcctggatactgccgagaatatataatgccctacggcctcgcac

SEQ ID NO: 25983 - DNA, 161 bp, Oryza sativa
  Clone ID: PAT_MRT4530_30816C.1
agactaaaaagactgaatgcaccctaaagttgacagcaaggttaaccactgaccaacaacagctacatccagagacaaaaacaatctaacatcataaatggaaaacaatacccccaaccagatggcccaagccacaaacgggcgtaacaccatgtcgaaac

SEQ ID NO: 25984 - DNA, 465 bp, Oryza sativa
  Clone ID: PAT_MRT4530_30817C.1
atggggaattttgattatcaaggggagaaggcaagggtggagacgaactgcataccttcaaacaggaagagggaggttggtgacaagcttgacgcggagcctgctcccttggccgtgattggtgaaggggctgttagcaagctcgaagaagaggcctttgccgtcccctcctacccaagctccaccactaccgccgtcggcactctcctcgtcaagctcagggagctccacggccttgatcccaagatgaactcgacggaggagtcgatgccgcagggcctccaccaccaagagtttgtcgtcgcccgcgccatcttcacctccaactcgagcttgttgagcagtgttactgccaacggcggcgaaatagcgtggagctccaagccgagagggtgggggtctctccacggatggagctcgctgtcaactttaactgctccacgaagagaggggagagcgagttag

SEQ ID NO: 25985 - DNA, 149 bp, Oryza sativa
  Clone ID: PAT_MRT4530_30818C.1
aaatgcacaaaacttcgaatctcactttacatgcgggggcattttaccacggagtatgaagctccactctacacacatctttttcacttacacaattcataacataccgcgtttttttttattgcgctaaaactctactattttcacat

SEQ ID NO: 25986 - DNA, 483 bp, Oryza sativa
  Clone ID: PAT_MRT4530_30819C.1
atgggagtggtgggcccctgcggcagcccctcggtccacggtggaccgggtgcacccgcggctcaccagccggctccgggggccccacacgtcagccgcacccgatggcacggggggctgacggccaggccccacgcggtggccacacggtgcgcccagaggcggctacatcggcgcggccggcgggaggaggcgcccgcgcccctatggccgccggcggcggccataggcgcggcggagcggcggccaagagaggggaagggaaaggggaaagaggcggcggtccacggctcaccccggagcgacgacagcgacgaggaggcggccgaagtggagggaggcggtggtgcggctcgagtcgacggggtcggcggcgttccggcggtcggcgaccgaaacggaggggtggacgaggtcggcgacggtgcggcgaagccggaggagacgacgccgaggtgggggacggtcccggcgagcagctag

SEQ ID NO: 25987 - DNA, 495 bp, Oryza sativa
  Clone ID: PAT_MRT4530_3081C.1
atgagtcgggcgcggtggaggcggggaggaagggaagcggaggtggaggaggatgaggcggggaggaaggggagcggaggtggaggtggatgtggcgggtgtggtggaggcggcgaggaaggggagcggaggtggaggcggatgaagcgggcacggcagaggcgagccggcgaggcatcccttgtcagaggtggaagaaggcagccatcccagccatgcgaccgcgcgtccccatcctcatcccttcacaaggccggcaagcgtggccctgcacgtccacgtccatccactctgtggatttgtctaccattgtctagccgttcagcaaggctctcaatcatcatcgagctgggcattgaggcctgctgcaactgcttcctcccaatctgtgtggcctacgacgctgtgacgcgccccatcgagttggaggctgcagctggtgccattcatccactttcctcctggagggatgcagcatttttcaggttgtactaa

SEQ ID NO: 25988 - DNA, 354 bp, Oryza sativa
  Clone ID: PAT_MRT4530_30820C.1
atgtggctccttgcttccatccaatttaagaatctccttctccgcctaagacctcctggtgacaacgccatcaacctctcgcccttcaactacatcaccatcaaagcgaacctcctccagctcctcaccacgtcgtctctcatccatgcacaactctccaaggccctctttgccgccacagcttccgacttccctgctaggcaacactccatccgcctcaacctaaagtactaccttgagaactttccctctacactaatcgaggtcttcctctccacctcccactgccttcagacgagccgcaaagaacaagataaaacccatttcttgtggcaaaccactggcaagcggtga

SEQ ID NO: 25989 - DNA, 459 bp, Oryza sativa
  Clone ID: PAT_MRT4530_30821C.1
atgatgcccacaccttctgagcctttgtctccacgatccttcgcccttgccgacaccgtgctcaatgcccaccacccgcatggtgcttcgggcgatcccaccctcatcgcctccgtggtgaccaccacgtctaccaccgctcgcaaggccatcactgccctcctcgccaagcacgccacaattgatgcgtcctcctcctccaagtcgtcatcgttcgcggcagacgccactccgtcggagctcgccacttcgttggcccaggcgcttgcaccactggcgagccacctctacctcccagcatcgacatctcacatgcaattccttggcaattgcgagcactgtgccatcaacctccaagtggagttccacaacttccaccaaggcgacctcttcgtcacggactactgccacaagctcaagaccatggccgacaaccacggtgatgtgggcgaatgttga
